(19) United States
(12) Patent Application Publication
(10) Pub. No.: US 2026/0108570 A1
(43) Pub. Date: Apr. 23, 2026

(54) BACTERIOPHAGE COMPOSITIONS AND METHODS FOR TREATMENT OF BACTERIAL INFECTIONS

(71) Applicant: THE UNIVERSITY OF CHICAGO, Chicago, IL (US)

(72) Inventors: Mark MIMEE, Chicago, IL (US); Ella ROTMAN, Chicago, IL (US)

(73) Assignee: THE UNIVERSITY OF CHICAGO, Chicago, IL (US)

(21) Appl. No.: 19/100,379

(22) PCT Filed: Aug. 1, 2023
(86) PCT No.: PCT/US2023/071414

§ 371 Date: Jan. 31, 2025

Related U.S. Application Data
(60) Provisional application No. 63/370,075, filed on Aug. 1, 2022.

(51) Int. Cl. A61K 35/76; A61P 43/00; C12N 7/02

(52) U.S. Cl. CPC A61K 35/76; A61P 43/00; C12N 7/02

(57) ABSTRACT

Disclosed are compositions, devices, kits, and methods for treatment of Enterobacteriaceae infection. Aspects of the present disclosure are directed to bacteriophage compositions comprising one or more isolated bacteriophage comprising a bacterio-phage sequence that is at least 99% identical to any one of SEQ ID NO:1-74. Further disclosed are devices and kits comprising such compositions and methods for use of such compositions in treatment and prevention of pathogenic Klebsiella infection.

### CROSS-REFERENCE TO RELATED APPLICATIONS

[0001] This application is a national phase application under 35 U.S.C. § 371 of International Application No. PCT/US2023/071414, filed Aug. 1, 2023, which claims priority to U.S. Provisional Application Ser. No. 63/370,075, filed Aug. 1, 2022, each of which are incorporated by reference herein in their entirety.

### SEQUENCE LISTING

[0002] The instant application contains a Sequence Listing which has been submitted in XML format and is hereby incorporated by reference in its entirety. Said XML copy, created on Sep. 12, 2023, is named “ARCDP0784 Sequence Listing (Sep. 12, 2023 Update).xml” and is 8,453,551 byes in size.

### BACKGROUND

### I. Technical Field

[0003] Aspects of this disclosure relate to at least the fields of microbiology and virology.

### II. Background

[0004] Multidrug-resistant (MDR) bacteria infect millions of people around the world, yearly. Many of these infections caused by these bacteria have become untreatable due to resistance to last resort antibiotics. Exacerbating this crisis, the pipeline for antibiotic development is slow and resistant strains rapidly develop in the wake of new drugs. The family Enterobacteriaceae provides an urgent threat of MDR infections, due in part to strains of Klebsiella, which can cause infection in the lungs, bloodstream, and urinary tract. Klebsiella species with the ability to produce extended-spectrum beta-lactamases (ESBL) are resistant to virtually all beta-lactam antibiotics, except carbapenems. Other frequent resistance targets include aminoglycosides, fluoroquinolones, tetracyclines, chloramphenicol, and trimethoprim/sulfamethoxazole.

[0005] Infection with carbapenem-resistant Enterobacteriaceae or carbapenemase-producing Enterobacteriaceae is emerging as an important challenge in health-care settings. One of many carbapenem-resistant Enterobacteriaceae is carbapenem-resistant Klebsiella pneumoniae. Over the past 10 years, a progressive increase in carbapenem-resistant Klebsiella pneumoniae has been seen worldwide. Carbapenem-resistant Klebsiella pneumoniae is resistant to almost all available antimicrobial agents, and infections with carbapenem-resistant Klebsiella pneumoniae have caused high rates of morbidity and mortality, in particular among persons with prolonged hospitalization and those critically ill and exposed to invasive devices (e.g., ventilators or central venous catheters).

[0006] Also complicating Klebsiella treatment has been the emergence of hypervirulent Klebsiella, a Klebsiella variant that is significantly more virulent than classical Klebsiella. While classical Klebsiella is an opportunistic pathogen responsible for nosocomial infections that usually affect immunocompromised patients, hypervirulent Klebsiella is clinically more concerning since it also causes disease in healthy individuals and can infect virtually every site of the body. Hypervirulent Klebsiella overproduce capsule components and siderophores for iron acquisition, among other factors, and such strains can acquire resistance plasmids and become multi-resistant to a variety of antibiotics, including carbapenems.

[0007] Carbapenem is often used as a drug of last resort when battling resistant bacterial strains, and mutant strains could result in infections for which healthcare professionals can do very little, if anything, to treat. Thus, new treatments are needed to contain the threat of MDR bacteria, including Klebsiella.

[0008] A promising response to MDR infections is bacteriophage (phage) therapy. Phages are environmentally ubiquitous, host-specific, and effective viruses that can infect MDR bacterial strains. Importantly, they have been shown to be safe and effective in animal and compassionate-use human trials. Because they use the replication machinery of their bacterial host, phage mutation rates are directly influenced by those of the host; as such, phages may rapidly adapt to target strains of bacteria.

[0009] There exists a need for new and improved methods and compositions for treatment of bacterial infections, including Klebsiella infections such as Klebsiella pneumoniae, Klebsiella quasipneumoniae, and Klebsiella variicola.

### SUMMARY

[0010] Aspects of the disclosure include bacteriophages, bacteriophage compositions, bacteriophage pharmaceutical formulations, kits, devices, medical devices, therapeutic devices, polynucleotides, methods for preparing a device, methods for treatment of a Klebsiella infection, and methods for preventing a Klebsiella infection.

[0011] In some aspects, there are compositions or pharmaceutical compositions comprising a collection of isolated bacteriophage comprising an Ackermannviridae bacteriophage, a Tevenvirinae bacteriophage, a Slopekvirus bacteriophage, a Siphoviridae bacteriophage, a Demerecviridae bacteriophage, or any combination thereof. In some aspects, the Ackermannviridae bacteriophage is an isolated bacteriophage comprising a bacteriophage sequence that is at least 99% identical to SEQ ID NO:1 or SEQ ID NO:37. In some aspects, the Tevenvirinae bacteriophage is an isolated bacteriophage comprising a bacteriophage sequence that is at least 99% identical to SEQ ID NO:2 or SEQ ID NO:40. In some aspects, the Slopekvirus bacteriophage is an isolated bacteriophage comprising a bacteriophage sequence that is at least 99% identical to SEQ ID NO:3 or SEQ ID NO:41. In some aspects, the Siphoviridae bacteriophage is an isolated bacteriophage comprising a bacteriophage sequence that is at least 99% identical to SEQ ID NO:4 or SEQ ID NO:52. In some aspects, the Demerecviridae bacteriophage is an isolated bacteriophage comprising a bacteriophage sequence that is at least 99% identical to SEQ ID NO:5 or SEQ ID NO:56. In some aspects, the Ackermannviridae bacteriophage is ΦER12; the Tevenvirinae bacteriophage is ΦER15; the Slopekvirus bacteriophage is ΦER16; the Siphoviridae bacteriophage is ΦER39; and the Demerecviridae bacteriophage is ΦER46.

[0012] In some aspects, there are compositions or pharmaceutical compositions comprising a collection of isolated bacteriophage comprising an Autographiviridae bacteriophage, a Tevenvirinae bacteriophage, one or more Slopekvirus bacteriophage, a Purpuraviridae bacteriophage, or any combination thereof. In some aspects, the Autographiviridae bacteriophage is an isolated bacteriophage comprising a bacteriophage sequence that is at least 99% identical to SEQ ID NO:74. In some aspects, the Tevenvirinae bacteriophage is an isolated bacteriophage comprising a bacteriophage sequence that is at least 99% identical to SEQ ID NO: 36. In some aspects, the one or more Slopekvirus bacteriophage comprise two Slopekvirus bacteriophage, and the Slopekvirus are isolated bacteriophage comprising a bacteriophage sequence that is at least 99% identical to SEQ ID NO:47 and SEQ ID NO:49. In some aspects, the Purpuraviridae bacteriophage is an isolated bacteriophage comprising a bacteriophage sequence that is at least 99% identical to SEQ ID NO:32. In some aspects, the Autographiviridae bacteriophage is ΦMM9; the Tevenvirinae bacteriophage is ΦER11; the one or more Slopekvirus bacteriophage comprise two Slopekvirus, and the two Slopekvirus are ER27 and ΦER36; and the Purpuraviridae bacteriophage is ΦER3.

[0013] In some aspects, there are compositions or pharmaceutical compositions comprising a collection of isolated bacteriophage comprising an Autographiviridae bacteriophage, a Tevenvirinae bacteriophage, one or more Slopekvirus bacteriophage, a Demerecviridae bacteriophage, a Purpuraviridae bacteriophage, or any combination thereof. In some aspects, the Autographiviridae bacteriophage is an isolated bacteriophage comprising a bacteriophage sequence that is at least 99% identical to SEQ ID NO:53. In some aspects, the Tevenvirinae bacteriophage is an isolated bacteriophage comprising a bacteriophage sequence that is at least 99% identical to SEQ ID NO:2 or SEQ ID NO:40. In some aspects, the Slopekvirus bacteriophage is an isolated bacteriophage comprising a bacteriophage sequence that is at least 99% identical to SEQ ID NO:47. In some aspects, the Demerecviridae bacteriophage is an isolated bacteriophage comprising a bacteriophage sequence that is at least 99% identical to SEQ ID NO:5 or SEQ ID NO:46. In some aspects, the Purpuraviridae bacteriophage is an isolated bacteriophage comprising a bacteriophage sequence that is at least 99% identical to SEQ ID NO:72. In some aspects, the Autographiviridae bacteriophage is ΦER43; the Tevenvirinae bacteriophage is ΦER15; the Slopekvirus bacteriophage is ΦER27; the Demerecviridae bacteriophage is ΦER46; and the Purpuraviridae bacteriophage is ΦMM7.

[0014] In some aspects, there are compositions or pharmaceutical compositions comprising 1, 2, 3, 4, 5, 6, 7, 8, 9, 10, 11, 12, 13, 14, 15, 16, 17, 18, 19, 20, 21, 22, 23, 24, 25, 26, 27, 28, 29, 30, 31, 32, 33, 34, 35, 3,6 37, 38, 39, 40 or more different isolated bacteriophage (or any range derivable therein) each comprising a bacteriophage sequence or an entire nucleic acid sequence that is at least, at most, equal to, or between any two of 90.0%, 90.1%, 90.2%, 90.3%, 90.4%, 90.5%, 90.6%, 90.7%, 90.8%, 90.9%, 91.0%, 91.1%, 91.2%, 91.3%, 91.4%, 91.5%, 91.6%, 91.7%, 91.8%, 91.9%, 92.0%, 92.1%, 92.2%, 92.3%, 92.4%, 92.5%, 92.6%, 92.7%, 92.8%, 92.9%, 93.0%, 93.1%, 93.2%, 93.3%, 93.4%, 93.5%, 93.6%, 93.7%, 93.8%, 93.9%, 94.0%, 94.1%, 94.2%, 94.3%, 94.4%, 94.5%, 94.6%, 94.7%, 94.8%, 94.9%, 95.0%, 95.1%, 95.2%, 95.3%, 95.4%, 95.5%, 95.6%, 95.7%, 95.8%, 95.9%, 96.0%, 96.1%, 96.2%, 96.3%, 96.4%, 96.5%, 96.6%, 96.7%, 96.8%, 96.9%, 97.0%, 97.1%, 97.2%, 97.3%, 97.4%, 97.5%, 97.6%, 97.7%, 97.8%, 97.9%, 98.0%, 98.1%, 98.2%, 98.3%, 98.4%, 98.5%, 98.6%, 98.7%, 98.8%, 99.0%, 99.1%, 99.2%, 99.3%, 99.4%, 99.5%, 99.6%, 99.7%, 99.8%, or 99.9% identical to (or any range derivable therein) any one of SEQ ID NO:1-74. In specific aspects, the SEQ ID NO(s) is/are any one or any combination of SEQ ID NO:1 OR SEQ ID NO:37, SEQ ID NO: 2 or SEQ ID NO:40, SEQ ID NO:3 or SEQ ID NO:41, SEQ ID NO:4 or SEQ ID NO:52, and SEQ ID NO:5 or SEQ ID NO:56. In specific aspects, the SEQ ID NO(s) is/are any one or any combination of SEQ ID NO:8 or SEQ ID NO:32, SEQ ID NO: 14 or SEQ ID NO:36, SEQ ID NO: 20 or SEQ ID NO:47, SEQ ID NO:22 or SEQ ID NO:49, and SEQ ID NO: 74. In specific aspects, the SEQ ID NO(s) is/are any one or any combination of SEQ ID NO:2 or SEQ ID NO: 40, SEQ ID NO:5 or SEQ ID NO:46, SEQ ID NO:20 or SEQ ID NO:47, SEQ ID NO:25 or SEQ ID NO:53, and SEQ ID NO:72.

[0015] Additionally or alternatively, in some aspects, there are compositions or pharmaceutical compositions comprising at least one isolated bacteriophage comprising a bacteriophage sequence or an entire nucleic acid sequence that has at least 1000, 1100, 1200, 1300, 1400, 1500, 1600, 1700, 1800, 1900, 2000, 2100, 2200, 2300, 2400, 2500, 2600, 2700, 2800, 2900, 3000, 3100, 3200, 3300, 3400, 3500, 3600, 3700, 3800, 3900, 4000, 4100, 4200, 4300, 4400, 4500, 4600, 4700, 4800, 4900, 5000, 5100, 5200, 5300, 5400, 5500, 5600, 5700, 5800, 5900, 6000, 6100, 6200, 6300, 6400, 6500, 6600, 6700, 6800, 6900, 7000, 7100, 7200, 7300, 7400, 7500, 7600, 7700, 7800, 7900, 8000, 8100, 8200, 8300, 8400, 8500, 8600, 8700, 8800, 8900, 9000, 9100, 9200, 9300, 9400, 9500, 9600, 9700, 9800, 9900, 10000 or more contiguous nucleotides from any one of SEQ ID NO:1-74. In specific aspects, the SEQ ID NO(s) is/are any one or any combination of SEQ ID NO:1 OR SEQ ID NO:37, SEQ ID NO:2 or SEQ ID NO:40, SEQ ID NO:3 or SEQ ID NO:41, SEQ ID NO:4 or SEQ ID NO:52, and SEQ ID NO:5 or SEQ ID NO:56. In specific aspects, the SEQ ID NO(s) is/are any one or any combination of SEQ ID NO:8 or SEQ ID NO:32, SEQ ID NO: 14 or SEQ ID NO:36, SEQ ID NO: 20 or SEQ ID NO:47, SEQ ID NO:22 or SEQ ID NO:49, and SEQ ID NO: 74. In specific aspects, the SEQ ID NO(s) is/are any one or any combination of SEQ ID NO:2 or SEQ ID NO: 40, SEQ ID NO:5 or SEQ ID NO:46, SEQ ID NO:20 or SEQ ID NO:47, SEQ ID NO:25 or SEQ ID NO:53, and SEQ ID NO: 72.

[0016] Additionally or alternatively, in some aspects, there are compositions or pharmaceutical compositions comprising at least one isolated bacteriophage comprising a bacteriophage sequence or an entire nucleic acid sequence that has, has at most, has at least, or has between any two of 1, 2, 3, 4, 5, 6, 7, 8, 9, 10, 11, 12, 13, 14, 15, 16, 17, 18, 19, 20, 21, 22, 23, 24, 25, 26, 27, 28, 29, 30, 31, 32, 33, 34, 35, 36, 37, 38, 39, 40, 41, 42, 43, 44, 45, 46, 47, 48, 49, 50, 51, 52, 53, 54, 55, 56, 57, 58, 59, 60, 61, 62, 63, 64, 65, 66, 67, 68, 69, 70, 71, 72, 73, 74, 75, 76, 77, 78, 79, 80, 81, 82, 83, 84, 85, 86, 87, 88, 89, 90, 91, 92, 93, 94, 95, 96, 97, 98, 99, 100, 101, 102, 103, 104, 105, 106, 107, 108, 109, 110, 111, 112, 113, 114, 115, 116, 117, 118, 119, 120, 121, 122, 123, 124, 125, 126, 127, 128, 129, 130, 131, 132, 133, 134, 135, 136, 137, 138, 139, 140, 141, 142, 143, 144, 145, 146, 147, 148, 149, 150, 151, 152, 153, 154, 155, 156, 157, 158, 159, 160, 161, 162, 163, 164, 165, 166, 167, 168, 169, 170, 171, 172, 173, 174, 175, 176, 177, 178, 179, 180, 181, 182, 183, 184, 185, 186, 187, 188, 189, 190, 191, 192, 193, 194, 195, 196, 197, 198, 199, 200, 201, 202, 203, 204, 205, 206, 207, 208, 209, 210, 211, 212, 213, 214, 215, 216, 217, 218, 219, 220, 221, 222, 223, 224, 225, 226, 227, 228, 229, 230, 231, 232, 233, 234, 235, 236, 237, 238, 239, 240, 241, 242, 243, 244, 245, 246, 247, 248, 249, 250, 251, 252, 253, 254, 255, 256, 257, 258, 259, 260, 261, 262, 263, 264, 265, 266, 267, 268, 269, 270, 271, 272, 273, 274, 275, 276, 277, 278, 279, 280, 281, 282, 283, 284, 285, 286, 287, 288, 289, 290, 291, 292, 293, 294, 295, 296, 297, 298, 299, 300, 301, 302, 303, 304, 305, 306, 307, 308, 309, 310, 311, 312, 313, 314, 315, 316, 317, 318, 319, 320, 321, 322, 323, 324, 325, 326, 327, 328, 329, 330, 331, 332, 333, 334, 335, 336, 337, 338, 339, 340, 341, 342, 343, 344, 345, 346, 347, 348, 349, 350, 351, 352, 353, 354, 355, 356, 357, 358, 359, 360, 361, 362, 363, 364, 365, 366, 367, 368, 369, 370, 371, 372, 373, 374, 375, 376, 377, 378, 379, 380, 381, 382, 383, 384, 385, 386, 387, 388, 389, 390, 391, 392, 393, 394, 395, 396, 397, 398, 399, 400, 401, 402, 403, 404, 405, 406, 407, 408, 409, 410, 411, 412, 413, 414, 415, 416, 417, 418, 419, 420, 421, 422, 423, 424, 425, 426, 427, 428, 429, 430, 431, 432, 433, 434, 435, 436, 437, 438, 439, 440, 441, 442, 443, 444, 445, 446, 447, 448, 449, 450, 451, 452, 453, 454, 455, 456, 457, 458, 459, 460, 461, 462, 463, 464, 465, 466, 467, 468, 469, 470, 471, 472, 473, 474, 475, 476, 477, 478, 479, 480, 481, 482, 483, 484, 485, 486, 487, 488, 489, 490, 491, 492, 493, 494, 495, 496, 497, 498, 499, 500, 501, 502, 503, 504, 505, 506, 507, 508, 509, 510, 511, 512, 513, 514, 515, 516, 517, 518, 519, 520, 521, 522, 523, 524, 525, 526, 527, 528, 529, 530, 531, 532, 533, 534, 535, 536, 537, 538, 539, 540, 541, 542, 543, 544, 545, 546, 547, 548, 549, 550, 551, 552, 553, 554, 555, 556, 557, 558, 559, 560, 561, 562, 563, 564, 565, 566, 567, 568, 569, 570, 571, 572, 600, 700, 800, 900, 1000 nucleotide differences from any one of SEQ ID NO:1-74. In specific aspects, the SEQ ID NO(s) is/are any one or any combination of SEQ ID NO:1 OR SEQ ID NO: 37, SEQ ID NO:2 or SEQ ID NO:40, SEQ ID NO:3 or SEQ ID NO:41, SEQ ID NO:4 or SEQ ID NO:52, and SEQ ID NO:5 or SEQ ID NO:56. In specific aspects, the SEQ ID NO(s) is/are any one or any combination of SEQ ID NO:8 or SEQ ID NO:32, SEQ ID NO: 14 or SEQ ID NO: 36, SEQ ID NO:20 or SEQ ID NO:47, SEQ ID NO:22 or SEQ ID NO:49, and SEQ ID NO: 74. In specific aspects, the SEQ ID NO(s) is/are any one or any combination of SEQ ID NO: 2 or SEQ ID NO:40, SEQ ID NO:5 or SEQ ID NO:46, SEQ ID NO:20 or SEQ ID NO:47, SEQ ID NO:25 or SEQ ID NO:53, and SEQ ID NO: 72.

[0017] It is contemplated that in some aspects, a composition has a nucleic acid sequence that has a percent identity with respect to a SEQ ID NO and also at least a certain number of contiguous nucleotides of that same SEQ ID NO, such as at least 99.1% identity and at least 100,000 contiguous nucleotides from SEQ ID NO:1, for example. The term “bacteriophage sequence” refers to a sequence from bacteriophage and does not include a nucleotide sequence greater than 20 contiguous nucleotides that is not from bacteriophage. Such non-bacteriophage sequences would be heterologous, and in aspects of the disclosure, they could be used to purify, select, and/or provide additional functionality to the bacteriophage. The heterologous sequence encodes a peptide or polypeptide in some aspects.

[0018] In some aspects, there is no more than one isolated bacteriophage in the composition, wherein the bacteriophage sequence or the entire nucleic acid sequence comprises all or part of any of SEQ ID NO: 1-74. In specific aspects, the SEQ ID NO(s) is/are any one or any combination of SEQ ID NO: 1 OR SEQ ID NO:37, SEQ ID NO:2 or SEQ ID NO:40, SEQ ID NO: 3 or SEQ ID NO:41, SEQ ID NO:4 or SEQ ID NO:52, and SEQ ID NO:5 or SEQ ID NO: 56. In specific aspects, the SEQ ID NO(s) is/are any one or any combination of SEQ ID NO: 8 or SEQ ID NO:32, SEQ ID NO: 14 or SEQ ID NO:36, SEQ ID NO:20 or SEQ ID NO:47, SEQ ID NO:22 or SEQ ID NO:49, and SEQ ID NO: 74. In specific aspects, the SEQ ID NO(s) is/are any one or any combination of SEQ ID NO:2 or SEQ ID NO:40, SEQ ID NO:5 or SEQ ID NO: 46, SEQ ID NO:20 or SEQ ID NO:47, SEQ ID NO:25 or SEQ ID NO:53, and SEQ ID NO: 72. In additional aspects at least, equal to, or no more than 2, 3, 4, 5, 6, 7, 8, 9, 10, 11, 12, 13, 14, 15, 16, 17, 18, 19, 20, 21, 22, 23, 24, 25, 26, 27, 28, 29, 30, 31, 32, 33, 34, 35, 3,6 37, 38, 39, 40 or more different isolated bacteriophage (or any range derivable therein) in a composition or used in a method described herein. In some aspects, a composition comprises or a methods comprises administering at least, equal to, or no more than 2, 3, 4, 5, 6, 7, 8, 9, 10, 11, 12, 13, 14, 15, 16, 17, 18, 19, 20, 21, 22, 23, 24, 25, 26, 27, 28, 29, 30, 31, 32, 33, 34, 35, 3,6 37, 38, 39, 40 or more different isolated bacteriophage (or any range derivable therein), wherein the bacteriophage comprises all or part of any of SEQ ID NO:1-74. In specific aspects, the SEQ ID NO(s) is/are any one or any combination of SEQ ID NO:1 OR SEQ ID NO:37, SEQ ID NO:2 or SEQ ID NO:40, SEQ ID NO:3 or SEQ ID NO:41, SEQ ID NO:4 or SEQ ID NO: 52, and SEQ ID NO:5 or SEQ ID NO:56. In specific aspects, the SEQ ID NO(s) is/are any one or any combination of SEQ ID NO:8 or SEQ ID NO:32, SEQ ID NO: 14 or SEQ ID NO:36, SEQ ID NO:20 or SEQ ID NO:47, SEQ ID NO:22 or SEQ ID NO:49, and SEQ ID NO: 74. In specific aspects, the SEQ ID NO(s) is/are any one or any combination of SEQ ID NO:2 or SEQ ID NO: 40, SEQ ID NO:5 or SEQ ID NO:46, SEQ ID NO:20 or SEQ ID NO:47, SEQ ID NO:25 or SEQ ID NO:53, and SEQ ID NO: 72.

[0019] In a specific aspect, the composition or method comprises two different isolated bacteriophage. In a specific aspect, the composition or method comprises three different isolated bacteriophage. In a specific aspect, the composition or method comprises four different isolated bacteriophage. In a specific aspect, the composition or method comprises five different isolated bacteriophage. It is specifically contemplated that the different isolated bacteriophage may be similar, such as evolved from the same sequence, and/or have, have at least, have at most, or have between any two of 1, 2, 3, 4, 5, 6, 7, 8, 9, 10, 11, 12, 13, 14, 15, 16, 17, 18, 19, 20, 21, 22, 23, 24, 25, 26, 27, 28, 29, 30, 31, 32, 33, 34, 35, 36, 37, 38, 39, 40, 41, 42, 43, 44, 45, 46, 47, 48, 49, 50, 60, 70 80, 90, 100, 110, 120, 130, 140, 150, 160, 170, 180, 190, 200, 210, 220, 230, 240, 250, 260, 270, 280, 290, 300, 310, 320, 330, 340, 350, 360, 370, 380, 390, 400, 410, 420, 430, 440, 450, 460, 470, 480, 490, 500, 600, 700, 800, 900, 1000, 2000, 3000, 4000, 5000, 6000, 7000, 8000, 9000, 10000, 20000, 30000, 40000, 50000 or more nucleotide differences between any two different isolated bacteriophage. Moreover, it is specifically contemplated that any composition may contain, or any method described herein may involve, 1, 2, 3, 4, 5, 6, 7, 8, 9, 10, or more bacteriophage that is/are not derived from any of SEQ ID NO: 1-74 or from a bacteriophage deposit corresponding to the bacteriophage with that SEQ ID NO.

[0020] Any composition may comprise about 10⁴, 10⁵, 10⁶, 10⁷, 10⁸, 10⁹, 10¹⁰, 10¹¹, 10¹², 10¹³, 10¹⁴, 10¹⁵ or more plaque forming units (PFUs) or viral particles. In some aspects, a composition includes or a method includes a step of administering about 10⁸ to about 10¹² plaque forming units (PFU) per milliliter (PFU/ml) of isolated bacteriophages.

[0021] In some aspects, a composition comprises 1, 2, 3, 4, or 5 different isolated bacteriophage, each comprising a bacteriophage sequence that is at least 99%, 99.1, 99.2%, 99.3%, 99.4%, 99.5%, 99.6%, 99.7%, 99.8%, or 99.9% or more identical to any one of SEQ ID NO: 1 or SEQ ID NO:37 (ΦER12), SEQ ID NO:2 or SEQ ID NO:40 (ΦER15), SEQ ID NO: 3 or SEQ ID NO:41 (ΦER16), SEQ ID NO:4 or SEQ ID NO:52 (ΦER39), or SEQ ID NO: 5 or SEQ ID NO:56 (ΦER46). In some aspects, a composition with at least two different isolated bacteriophage, wherein each bacteriophage comprises a bacteriophage sequence with no more than 20, 15, 10, 5 or fewer nucleotide changes in any one of SEQ ID NO: 1 or SEQ ID NO: 37, SEQ ID NO:2 or SEQ ID NO:40, SEQ ID NO:3 or SEQ ID NO:41, SEQ ID NO:4 or SEQ ID NO:52, or SEQ ID NO:5 or SEQ ID NO:56.

[0022] In some aspects, a composition comprises 1, 2, 3, 4, or 5 different isolated bacteriophage each comprising a bacteriophage sequence that is at least 99%, 99.1, 99.2%, 99.3%, 99.4%, 99.5%, 99.6%, 99.7%, 99.8%, or 99.9% or more identical to any one of SEQ ID NO: 8 or SEQ ID NO:32 (ΦER3), SEQ ID NO:14 or SEQ ID NO:36 (ΦER11), SEQ ID NO: 20 or SEQ ID NO:47 (ΦER27), SEQ ID NO:22 or SEQ ID NO:49 (ΦER36), and SEQ ID NO: 74 (ΦMM9). In some aspects, a composition with at least two different isolated bacteriophage, wherein each bacteriophage comprises a bacteriophage sequence with no more than 20, 15, 10, 5 or fewer nucleotide changes in any one of SEQ ID NO:8 or SEQ ID NO:32, SEQ ID NO: 14 or SEQ ID NO:36, SEQ ID NO:20 or SEQ ID NO:47, SEQ ID NO:22 or SEQ ID NO: 49, and SEQ ID NO:74.

[0023] In some aspects, a composition comprises 1, 2, 3, 4, or 5 different isolated bacteriophage each comprising a bacteriophage sequence that is at least 99%, 99.1, 99.2%, 99.3%, 99.4%, 99.5%, 99.6%, 99.7%, 99.8%, or 99.9% or more identical to any one of SEQ ID NO: 2 or SEQ ID NO:40 (ΦER15), SEQ ID NO:5 or SEQ ID NO:46 (ΦER46), SEQ ID NO: 20 or SEQ ID NO:47 (ΦER27), SEQ ID NO:25 or SEQ ID NO:53 (ΦER43), and SEQ ID NO: 72 (MM7). In some aspects, a composition with at least two different isolated bacteriophage, wherein each bacteriophage comprises a bacteriophage sequence with no more than 20, 15, 10, 5 or fewer nucleotide changes in any one of SEQ ID NO:2 or SEQ ID NO:40, SEQ ID NO:5 or SEQ ID NO:46, SEQ ID NO:20 or SEQ ID NO:47, SEQ ID NO:25 or SEQ ID NO: 53, and SEQ ID NO:72.

[0024] In some aspects, there is a composition comprising 1, 2, 3, 4, 5, 6, 7, 8, 9, 10, 11, 12, 13, 14, 15, 16, 17, 18, 19, 20, 21, 22, 23, 24, 25, 26, 27, 28, 29, 30, 31, 32, 33, 34, 35, 36, 37, 38, 39, 40, 41, 42, 43, 44, 45, 46, 47, 48, 49, 50, 51, 52, 53, 54, 55, 56, 57, 58, 59, 60, 61, 62, 63, 64, 65, 66, 67, 68, 69, 70, 71, 72, 73, or 74 different isolated bacteriophage, wherein the different isolated bacteriophage is Deposit Numbers ______ (sequence identical to SEQ ID NO: 1 and SEQ ID NO:37); Deposit Numbers ______ (sequence identical to SEQ ID NO:2 and SEQ ID NO:40); Deposit Numbers ______ (sequence identical to SEQ ID NO:3 and SEQ ID NO: 41), Deposit Numbers ______ (sequence identical to SEQ ID NO:4 and SEQ ID NO:52), Deposit Numbers ______ (sequence identical to SEQ ID NO:5 and SEQ ID NO:56), Deposit Numbers ______ (sequence identical to SEQ ID NO:6 and SEQ ID NO:30); Deposit Numbers ______(sequence identical to SEQ ID NO:7 and SEQ ID NO:31); Deposit Numbers ______(sequence identical to SEQ ID NO:8 or SEQ ID NO:32), Deposit Numbers ______ (sequence identical to SEQ ID NO:9 and SEQ ID NO:33), Deposit Numbers ______ (sequence identical to SEQ ID NO:10), Deposit Numbers ______ (sequence identical to SEQ ID NO:11); Deposit Numbers ______ (sequence identical to SEQ ID NO: 12 and SEQ ID NO:35); Deposit Numbers ______(sequence identical to SEQ ID NO: 13 and SEQ ID NO:34), Deposit Numbers ______(sequence identical to SEQ ID NO: 14 and SEQ ID NO:36), Deposit Numbers ______ (sequence identical to SEQ ID NO: 15 and SEQ ID NO:38), Deposit Numbers ______ (sequence identical to SEQ ID NO: 16 and SEQ ID NO:39); Deposit Numbers ______ (sequence identical to SEQ ID NO: 17 and SEQ ID NO:42); Deposit Numbers ______ (sequence identical to SEQ ID NO: 18 and SEQ ID NO:43), Deposit Numbers ______ (sequence identical to SEQ ID NO:19 and SEQ ID NO:45), Deposit Numbers ______ (sequence identical to SEQ ID NO:20 and SEQ ID NO: 47), Deposit Numbers ______ (sequence identical to SEQ ID NO:21 and SEQ ID NO: 48); Deposit Numbers ______ (sequence identical to SEQ ID NO:22 and SEQ ID NO:49); Deposit Numbers ______ (sequence identical to SEQ ID NO:23 and SEQ ID NO:50), Deposit Numbers ______ (sequence identical to SEQ ID NO:24 and SEQ ID NO:51), Deposit Numbers ______ (sequence identical to SEQ ID NO:25 and SEQ ID NO:53), Deposit Numbers ______(sequence identical to SEQ ID NO:26 and SEQ ID NO:54); Deposit Numbers ______(sequence identical to SEQ ID NO:27 and SEQ ID NO:55); Deposit Numbers ______(sequence identical to SEQ ID NO:28 and SEQ ID NO:59), Deposit Numbers ______ (sequence identical to SEQ ID NO:29 and SEQ ID NO:60). Deposit Numbers ______ (sequence identical to SEQ ID NO:61), Deposit Numbers ______ (sequence identical to SEQ ID NO:62), Deposit Numbers ______ (sequence identical to SEQ ID NO:63), Deposit Numbers ______ (sequence identical to SEQ ID NO:64), Deposit Numbers ______ (sequence identical to SEQ ID NO:65), Deposit Numbers ______ (sequence identical to SEQ ID NO:66), Deposit Numbers ______(sequence identical to SEQ ID NO:67), Deposit Numbers ______ (sequence identical to SEQ ID NO: 68), Deposit Numbers ______ (sequence identical to SEQ ID NO:69), Deposit Numbers ______(sequence identical to SEQ ID NO:70), Deposit Numbers ______ (sequence identical to SEQ ID NO:71), Deposit Numbers ______ (sequence identical to SEQ ID NO:73), Deposit Numbers ______ (sequence identical to SEQ ID NO:44), Deposit Numbers ______ (sequence identical to SEQ ID NO:46), Deposit Numbers ______ (sequence identical to SEQ ID NO:57), and Deposit Numbers ______ (sequence identical to SEQ ID NO:58).

[0025] In some aspects, the composition is in a pharmaceutical formulation or pharmacologically acceptable formulation comprising one or more additional ingredients and wherein the formulation is intended to be administered to an organism, such as a mammal or human. In some aspects, the composition further comprises one or more pharmaceutically acceptable carriers and/or excipients. In some aspects, the composition further comprises one or more antibiotic drugs. In some aspects, the composition is a solution or emulsion of solid. In some aspects, the composition is formulated for oral, gavage, intraperitoneal, intravenous, aerosol, or inhalant application.

[0026] Any of the bacteriophage compositions described herein can be implemented as a method or use. Methods and uses include but are not limited to treating a Klebsiella infection in a subject, preventing a Klebsiella infection in a subject, treating and/or preventing a Klebsiella infection in a subject, increasing the susceptibility of a drug-resistant Klebsiella strain in a subject to clearance by the subject's immune system, increasing the susceptibility of a pathogenic Klebsiella strain in a subject to clearance by the subject's immune system, increasing the susceptibility of a drug-resistant and/or pathogenic Klebsiella strain in a subject to clearance by the subject's immune system, increasing the susceptibility of a drug-resistant Klebsiella strain in a subject to conventional antibiotic treatment, increasing the susceptibility of a pathogenic Klebsiella strain in a subject to conventional antibiotic treatment, increasing the susceptibility of a drug-resistant and/or pathogenic Klebsiella strain in a subject to conventional antibiotic treatment, reducing the virulence of a drug-resistant Klebsiella strain in a subject, reducing the virulence of a pathogenic Klebsiella strain in a subject, reducing the virulence of a drug-resistant and/or pathogenic Klebsiella strain in a subject, reducing the level of a drug-resistant Klebsiella strain in a subject, reducing the level of a pathogenic Klebsiella strain in a subject, reducing the level of a drug-resistant and/or pathogenic Klebsiella strain in a subject, reducing the number of a Klebsiella bacteria in a subject, reducing the number of capsulated Klebsiella bacteria in a subject, improving symptoms in a subject related to infection from a Klebsiella bacteria, reducing the severity of symptoms in a subject related to infection from a Klebsiella bacteria, reducing the length of hospitalization or risk of hospitalization related to infection from a Klebsiella bacteria, treating a subject for a drug-resistant Klebsiella infection, treating a subject for an antibiotic-resistant Klebsiella infection; treating a subject for a hypervirulent Klebsiella infection; providing a device to a subject that reduces the incidence of, treats, or prevents an infection of Klebsiella infection; in some aspects, the Klebsiella bacteria is drug- or antibiotic-resistant and/or includes Klebsiella pneumoniae, Klebsiella quasipneumoniae, and/or Klebsiella variicola.

[0027] Methods and uses may include 1, 2, 3, 4, 5, or more steps such as detecting an infection in an individual, generating a bacteriophage composition, formulating a bacteriophage composition for therapeutic administration, administering or applying a bacteriophage composition to a subject one or more times, evaluating a subject for a Klebsiella infection, monitoring a subject for one or more symptoms of a Klebsiella infection, diagnosing a subject as having or at risk for a Klebsiella infection, administering to the subject one or more antibacterial therapies in addition to a bacteriophage composition, coating a device with a bacteriophage composition, and/or inserting or providing the subject a device coated or containing a bacteriophage composition. Any one or more of the preceding steps may be excluded from certain aspects.

[0028] A subject may be any organism that can be infected by Klebsiella or that can harbor, contain, or carry Klebsiella bacteria. In some aspects, the subject is a mammal, such as a human, horse, cow, pig, dog, cat, monkey, sheep, wolf, or deer. Any method or use described herein can be implemented on a subject that is human. In some aspects, the subject is a mammal; in some aspects, the subject is a human. In some aspects, the subject is at a higher risk for Klebsiella infection than the general population.

[0029] In some aspects there are methods for treating and/or preventing a Klebsiella infection in a subject comprising administering to the subject a bacteriophage composition as set forth herein, including in paragraphs [0010]-[0025]. In some aspects, the Klebsiella is from Klebsiella pneumoniae, Klebsiella quasipneumoniae, and/or Klebsiella variicola. In some aspects, the subject has symptoms of a Klebsiella infection or is at risk for a Klebsiella infection. In some aspects, the subject has been determined to be infected with Klebsiella. In some aspects, the source of the Klebsiella was from a beverage, comestible, another individual, or an environment. In some aspects, the environment is ground or surface water, water used to irrigate crops, a public water system, a hospital, a school, a nursing home, a petting zoo, a cruise ship, a train, or an airplane.

[0030] In some aspects, methods comprise administering a bacteriophage composition 1, 2, 3, 4, 5, 6, 7, 8, 9, 10, 11, 12, 13, 14, 15, 16, 17, 18, 19, or 20 times or more over the course of 5, 10, 15, 20, 25, 30, 35, 40, 45, 50, 55, 60 minutes and/or 1, 2, 3, 4, 5, 6, 7, 8, 9, 10, 11, 12, 13, 14, 15, 16, 17, 18, 19, 20, 21, 22, 23, 24 hours and/or 1, 2, 3, 4, 5, 6, 7 days and/or 1, 2, 3, 4, 5 weeks, and/or 1, 2, 3, 4, 5, 6, 7, 8, 9, 10, 11, 12 or more months (or any range derivable therein). In some aspects, a bacteriophage composition is administered multiple times and/or over multiple days.

[0031] In some aspects, methods or uses further comprise administering an antibacterial treatment, such as an antibiotic drug to the subject before, after, and/or during administration of the bacteriophage composition. In some aspects, the Klebsiella is drug-resistant or antibiotic-resistant, meaning the infection is resistant to at least one drug or antibiotic, but it may be resistant to more than one drug or antibiotic. In some aspects, the Klebsiella is hypervirulent, meaning the infection is more virulent than classical Klebsiella and is capable, in some aspects, of causing community-acquired infections, including in healthy individuals. In some aspects, the Klebsiella is drug-resistant and hypervirulent, meaning the infection is resistant to at least one drug or antibiotic, or more than one drug or antibiotic, and the infection is more virulent than classical Klebsiella and is capable, in some aspects, of causing community-acquired infections, including in healthy individuals.

[0032] In some aspects, the infection is a urinary tract, blood, gut, abdomen, stomach, lungs, skin, ear, eye, nose, oral, kidney, prostate, bladder, brain, vaginal tract, heart, liver, spleen, tendons, or wound infection, or a combination thereof. In some aspects, the subject has a urinary tract infection, neonatal meningitis, a blood-stream infection, pneumonia, sepsis, a surgical wound infection, a wound infection, a skin infection, an eye infection, an ear infection, an oral infection, a prostate infection, meningitis, a vaginal infection, or a combination thereof.

[0033] In some aspects, the subject is immunosuppressed. In some aspects, the subject has an immune cell defect, asplenia, impaired splenic function, nephrotic syndrome, or an autoimmune condition. In some aspects, the subject is administered the composition prior to a medical procedure or regimen. In some aspects, the subject will be subject to immunosuppressive conditions. In some aspects, the subject is receiving or will be receiving chemotherapy. In some aspects, the subject is receiving or will be receiving an immunosuppressant. In some aspects, the immunosuppressant is a glucocorticoid, a calcineurin inhibitor, an antimetabolite, or an antibody therapy. In some aspects, the medical procedure comprises insertion of a device in the subject.

[0034] In some aspects, there is a device, comprising, on, in, and/or around the device, compositions described in paragraphs [0010]-[0025]. In some aspects, additionally or alternatively, a subject receives or is provided a device that contains or is coated with a bacteriophage composition as described herein. In some aspects, the device is a catheter, drive line, syringe, tube, implant, defibrillator, artificial joint, pacemaker, screw, rod, disc, intrauterine device, pin, plate, stent, dental device, eye lens, shunt, valve, neurological or neurosurgical device, gastrointestinal device, genitourinary device, catheter cuff, vascular access device, or wound drain. In some aspects, the device is further defined as having a coating comprising compositions described in paragraphs [0010]-[0025].

[0035] In some aspects, there is a kit, comprising, housed in a suitable container, compositions described in paragraphs [0010]-[0025]. In some aspects, the kit further comprises a device. In some aspects, the device of the kit is further defined as having a coating comprising compositions described in paragraphs [0010]-[0025]. In some aspects, the compositions described in paragraphs [0010]-[0025] are separate from the device of the kit.

[0036] In some aspects, there are methods for producing a composition as discussed herein, including but not limited to compositions described in paragraphs [0010]-[0025]. In some aspects, such methods comprise infecting bacteria with an isolated bacteriophage comprising a bacteriophage sequence that is at least 99% identical to any one of SEQ ID NO: 1-74; culturing the bacteria under conditions to allow bacteriophage to replicate; and isolating bacteriophage from the bacteria culture. In some aspects, methods further comprise purifying the bacteriophage from the bacteria culture.

[0037] In some aspects, isolated bacteriophage are evolved to improve lytic capacity, reduce lysogenic capacity, reduce antibiotic resistance gene obtainment capacity, reduce bacterial virulence gene obtainment capacity, and/or increase the number of bacterial strains subject to lysis by the isolated bacteriophage lytic.

[0038] In some aspects, a composition is a lotion, cream, body butter, mask, scrub, wash, gel, serum, emulsion (e.g., oil-in-water, water-in-oil, silicone-in-water, water-in-silicone, water-in-oil-in-water, oil-in-water-in-oil, oil-in-water-in-silicone, etc.), solution (e.g., aqueous or hydro-alcoholic solutions), anhydrous bases (e.g., stick or a powder), ointment, milk, paste, aerosol, solid form, jelly, and/or powdered form (e.g., dried, lyophilized, particulate, etc). In some aspects, a composition is a solution, lotion, and/or cream. In some aspects, a composition is shelf-stable. In some embodiments, a composition is formulated for topical, oral, aural, nasal, and/or ophthalmic application. In some aspects, a composition is formulated for application more than once a day, once a day, twice a day, once a week, twice a week, once a month, or twice a month during use. In some aspects, a composition is housed in a delivery apparatus. In some aspects, a composition is comprised in a suitable container. In some aspects, a composition is comprised in a kit.

[0039] Throughout this application, the term “about” is used to indicate that a value includes the inherent variation of error for the measurement or quantitation method.

[0040] Recitation of ranges of values herein is merely intended to serve as a shorthand method of referring individually to each separate value falling within the range. Unless otherwise indicated herein, each individual value is incorporated into the specification as if it was individually recited herein.

[0041] The use of the word “a” or “an” when used in conjunction with the term “comprising” may mean “one,” but it is also consistent with the meaning of “one or more,” “at least one,” and “one or more than one.”

[0042] The phrase “and/or” means “and” or “or”. To illustrate, A, B, and/or C includes: A alone, B alone, C alone, a combination of A and B, a combination of A and C, a combination of B and C, or a combination of A, B, and C. In other words, “and/or” operates as an inclusive or.

[0043] The words “comprising” (and any form of comprising, such as “comprise” and “comprises”), “having” (and any form of having, such as “have” and “has”), “including” (and any form of including, such as “includes” and “include”) or “containing” (and any form of containing, such as “contains” and “contain”) are inclusive or open-ended and do not exclude additional, unrecited elements or method steps.

[0044] The compositions and methods for their use can “comprise,” “consist essentially of,” or “consist of” any of the ingredients or steps disclosed throughout the specification. Compositions and methods “consisting essentially of” any of the ingredients or steps disclosed limits the scope of the claim to the specified materials or steps which do not materially affect the basic and novel characteristic of the claimed invention.

[0045] The term “effective,” as that term is used in the specification and/or claims, means adequate to accomplish a desired, expected, or intended result.

[0046] “Individual, “subject,” and “patient” are used interchangeably and can refer to either a human or non-human, such as primates, mammals, and vertebrates. In particular aspects, the subject is a human. The subject is of any age, gender, or race. The subject can be a patient, e.g., have or be suspected of having a disease (that may be referred to as a disorder or medical condition), such as one or more immune system-mediated disorders. The subject may be undergoing or have undergone treatment. The subject may be asymptomatic. The subject may be a healthy individual desirous of prevention of a disease or condition.

[0047] The terms “inhibiting” or “reducing” or “preventing” or “avoiding” or any variation of these terms, when used in the claims and/or the specification, includes any measurable decrease or complete inhibition to achieve a desired result.

[0048] Any method in the context of a therapeutic, diagnostic, or physiologic purpose or effect may also be described in “use” claim language such as “Use of” any compound, composition, or agent discussed herein for achieving or implementing a described therapeutic, diagnostic, or physiologic purpose or effect.

[0049] It is specifically contemplated that any limitation discussed with respect to one aspect of the disclosure may apply to any other aspect of the disclosure. Furthermore, any composition of the disclosure may be used in any method of the disclosure, and any method of the disclosure may be used to produce or to utilize any composition of the disclosure. Any embodiment discussed with respect to one aspect of the disclosure applies to other aspects of the disclosure as well and vice versa. For example, any step in a method described herein can apply to any other method. Moreover, any method described herein may have an exclusion of any step or combination of steps. Aspects of an embodiment set forth in the Examples are also aspects that may be implemented in the context of embodiments discussed elsewhere in a different Example or elsewhere in the application, such as in the Summary, Detailed Description, Claims, and Brief Description of the Drawings.

[0050] Other objects, features and advantages of the present disclosure will become apparent from the following detailed description. It should be understood, however, that the detailed description and the specific examples, while indicating specific aspects of the disclosure, are given by way of illustration only, since various changes and modifications within the spirit and scope of the disclosure will become apparent to those skilled in the art from this detailed description.

### BRIEF DESCRIPTION OF THE DRAWINGS

[0051] The following drawings form part of the present specification and are included to further demonstrate certain aspects of the present disclosure. The disclosure may be better understood by reference to one or more of these drawings in combination with the detailed description of specific aspects presented herein.

[0052] FIG. 1 shows electron microscopy of representative bacteriophage that infect Klebsiella, according to some aspects of the disclosure.

[0053] FIG. 2 shows the phylogenetic relationship of representative bacteriophage that infect Klebsiella, according to some aspects of the disclosure.

[0054] FIG. 3 shows the ability of various bacteriophage to infect clinical Klebsiella strains, according to some aspects of the disclosure.

[0055] FIG. 4 shows adsorption kinetics of representative bacteriophage disclosed herein.

[0056] FIGS. 5A-5C show pH tolerance of representative bacteriophage disclosed herein.

[0057] FIGS. 6A-6C show one-step growth of representative bacteriophage disclosed herein.

[0058] FIG. 7 shows virulence of a representative bacteriophage evolved over multiple passages.

[0059] FIG. 8 shows infection of a clinical Klebsiella strain (MH258) by a representative evolved bacteriophage.

[0060] FIG. 9 shows adsorption kinetics of a representative evolved bacteriophage.

[0061] FIG. 10 shows development of resistance over time by a clinical Klebsiella strain (MH258) to a representative bacteriophage disclosed herein.

[0062] FIGS. 11A-11C shows development of resistance over time by a clinical Klebsiella strain (MH258) to various combinations of representative bacteriophage disclosed herein.

[0063] FIG. 12 shows stochastic time to resistance by a clinical Klebsiella strain (MH258) to various combinations of representative bacteriophage disclosed herein.

[0064] FIG. 13 illustrates schematically a method of bacteriophage receptor identification, according to some aspects of the disclosure.

[0065] FIG. 14 shows bacterial factors determined to be required for infection of bacteria with representative bacteriophage disclosed herein.

[0066] FIG. 15 shows infection of Klebsiella MH258 by representative bacteriophage disclosed herein compared to infection by representative bacteriophage disclosed herein of an MH258 strain in which the wbaP gene is deleted (ΔwbaP) and infection by representative bacteriophage disclosed herein of an MH258 strain in which wbaP gene deletion is complemented (AwbaP pZE4D-wbaP).

[0067] FIG. 16 shows infection of Klebsiella MH258 by representative bacteriophage disclosed herein compared to infection by representative bacteriophage disclosed herein of an MH258 strain in which the wzc gene is deleted (Δwzc) and infection by representative bacteriophage disclosed herein of an MH258 strain in which wzc gene deletion is complemented (Δwzc pZE4D-wzc).

[0068] FIG. 17 shows infection of Klebsiella MH258 by representative bacteriophage disclosed herein compared to infection by representative bacteriophage disclosed herein of an MH258 strain in which the wbaN gene (also referred to herein as the walW gene) is deleted (ΔPSD) and infection by representative bacteriophage disclosed herein of an MH258 strain in which wbaN gene deletion is complemented (ΔPSD pZE4D-PSD).

[0069] FIG. 18 shows infection of Klebsiella MH258 by representative bacteriophage disclosed herein compared to infection by representative bacteriophage disclosed herein of an MH258 strain in which the csrD gene is deleted (ΔcsrD) and infection by representative bacteriophage disclosed herein of an MH258 strain in which csrD gene deletion is complemented (ΔcsrD pZE4D-csrD).

[0070] FIG. 19 shows infection of Klebsiella MH258 by representative bacteriophage disclosed herein compared to infection by representative bacteriophage disclosed herein of an MH258 strain in which the waaH gene is deleted (ΔwaaH) and infection by representative bacteriophage disclosed herein of an MH258 strain in which waaH gene deletion is complemented (ΔwaaH pZE4D-waaH).

[0071] FIG. 20 shows infection of Klebsiella MH258 by representative bacteriophage disclosed herein compared to infection by representative bacteriophage disclosed herein of an MH258 strain in which the ompC gene is deleted (ΔompC) and infection by representative bacteriophage disclosed herein of an MH258 strain in which ompC gene deletion is complemented (ΔompC pZE4D-ompC).

[0072] FIG. 21 shows infection of Klebsiella MH258 by representative bacteriophage disclosed herein compared to infection by representative bacteriophage disclosed herein of an MH258 strain in which the fhuA3 gene is deleted (ΔfhuA3) and infection by representative bacteriophage disclosed herein of an MH258 strain in which fhuA3 gene deletion is complemented (ΔfhuA3 pZE4D-fhuA3).

[0073] FIGS. 22A-22C show infection of Klebsiella MH258 by representative bacteriophage disclosed herein (FIG. 22A) and an area under curve analysis to illustrate lethality of representative bacteriophage infection of the Klebsiella MH258 (FIG. 22B) or of Klebsiella MH258 deletion mutants in which bacterial factors determined to be required for infection of bacteria with representative bacteriophage are deleted and then complemented (FIG. 22C).

[0074] FIGS. 23A-23B show phagocytosis by macrophages of Klebsiella MH258 deletion mutants in which bacterial genes wbaP, wbaN (PSD), wzc, or csrD are deleted or a Klebsiella MH258 strain having extra capsule (wzc-G565A; ER51) (FIG. 23A) and Klebsiella MH258 deletion mutants in which deleted bacterial genes wbaP, wbaN (PSD), wzc, or csrD are complemented (FIG. 23B).

[0075] FIG. 24 illustrates schematically a method for measuring phagocytosis by macrophages of bacteriophage-treated bacteria, according to some aspects of the disclosure.

[0076] FIG. 25 shows phagocytosis by macrophages of Klebsiella MH258 deletion mutants in which bacterial genes wbaP, wbaN (PSD), csrD, waaH, or fhuA3 are deleted or MH258 strains infected with representative bacteriophage.

[0077] FIG. 26 shows measurement of capsule amount of Klebsiella MH258 deletion mutants in which bacterial genes wbaP, wbaN (PSD), wzc, csrD, waaH, or fhuA3 are deleted or a Klebsiella MH258 strain having extra capsule (wzc-G565A; ER51).

[0078] FIG. 27 shows colonization of Klebsiella and the effect of bacteriophage treatment on Klebsiella colonization.

[0079] FIGS. 28A-28B show the effect of Klebsiella colonization and/or bacteriophage treatment on the mouse microbiome.

[0080] FIG. 29 shows that Klebsiella and bacteriophage co-exist in the mouse microbiome.

[0081] FIG. 30 shows that mice infected with a representative bacteriophage disclosed herein have Klebsiella populations without a capsule.

[0082] FIGS. 31A-31C. Genomic alignments of members of Klebsiella Phages. Whole genomes of phages within the same family or genus were aligned using progressive Mauve. The average length of phages genome within a genus or family is indicated to the right of the alignment. For reference, a similar previously published Klebsiella phage genome is included.

[0083] FIG. 32. Klebsiella Phages Exhibit Antimicrobial Activity against Clinically-Relevant Carbapanem-Resistant Klebsiella spp. Individual phages are columns and Klebsiella strains are rows in the host range matrix. Phylogenetic relatedness between phages genomes is determined by VICTOR (Meier-Kolthoff, J. P., and Göker, M. (2017)). Major phage families or genera (for Straboviridae) are denoted by color. Shading intensity indicates the degree of infectivity on spot assays according to an ordinal scale, wherein 0 (white) is fully resistant and 3 (dark shading) is full clearance. Shading values are the mean of three biological replicate spot assays. Representative electron microscopy images of bacteriophages from key families are depicted (scale bar=100 nm). The degree of predicted antimicrobial resistance (AMR) to beta lactam antibiotics is indicated, as are multi-locus sequencing type (MLST), capsule type, and O-antigen type. Kp=K. pneumoniae; Kq=K. quasipneumoniae; Kv=K. variicola.

[0084] FIGS. 33A-33L. Host Factors Necessary for Phage Infection. FIGS. 33A-33H. Kill curves for all phage-strain pairs summarized in FIG. 34C. The top plot depicts the kinetic of phage infection of a gene knockout and its respective gene complement is below (MOI=1). Lines show the mean of three independent biological replicates (n=3). FIG. 33I. Heatmap of top 18 INSeq hits ranked by log₂ fold change for ΦER15 and ΦER39 shows transposon-interrupted genes that were over-represented after 3 hours infection relative to uninfected culture. FIG. 33J. Over-expressing csrD makes cells more permissible to phages. A dilution of the five phages were spotted in duplicate on MH258 carrying an empty vector and MH258 constitutively expressing csrD. Large plaque sizes are seen with ΦER15, ΦER16e, ΦER39, and ΦER46e. FIG. 33K. RNA-seq analysis of ΔcsrD mutant as compared to wild-type. A volcano plot shows 73 down-regulated genes (red circles) and 13 up-regulated genes (green circles) in the ΔcsrD mutant (adjusted p-value<0.05 and log₂ fold change either >2 or <−2; DESeq; n=2). FIG. 33L. Gene set enrichment analysis of differential expressed genes described by the indicated SEED Subsystems. Red indicates high significance, with blue as less significant; the size of the circle indicates the number of genes in that set; while a negative value on the x-axis means that pathway is down-regulated in ΔcsrD and a positive value indicates that pathway is up-regulated in ΔcsrD.

[0085] FIGS. 34A-34C. Transposon Sequencing Identifies Cell Surface Structures, Outer Membrane Proteins, and a Carbon Storage Regulator as Essential Host Factors for Phage Infection. FIG. 34A. Schematic of gene products necessary for phage infection identified in loss-of-function transposon screen by INSeq and arbitrary-primed PCR. FIG. 34B. Representative spot assays depicting susceptibility of wild-type K. pneumoniae MH258, indicated gene knockouts, and complements to phages ΦER12, ΦER15, ΦER16e, ΦER39, and ΦER46e. Spot assays were conducted in biological triplicate. FIG. 34C. Resistance of wild-type K. pneumonia MH258, indicated gene knockouts, and complements to phages ΦER12, ΦER15, ΦER16e, ΦER39, and ΦER46e in 150 minute broth kill curve assays (MOI=1) (see FIGS. 33A-33H). The resistance metric (arbitrary units) represents the ratio between the area under the curve (AUC) of a strain-phage pair and uninfected culture divided by the ratio in AUC of a wild-type MH258-phage pair and uninfected culture. The mean resistance level for each phage-strain pair of three independent biological replicates is indicated (n=3). Shading intensity indicates a greater degree of resistance to a given phage.

[0086] FIGS. 35A-35D. Capsule production, membrane sensitivity, and macrophage engulfment in MH258 knockouts. FIG. 35A. Quantitative uronic acid assay of different mutants shows reduced capsule production in ΔwbaP, Δwzc, ΔwalW, and ΔwaaH mutants (*p<0.05, **p<0.01, ***p<0.001; Unpaired t test with Welch's correction of MH258 to mutant; n=3-5). FIG. 35B. SDS/EDTA plates destabilize the outer membrane in ΔtolB mutants. Representative picture of serial dilutions of each deletion strain and complement. In addition to ΔtolB, the ΔwalW and ΔcsrD (red rectangle) also show sensitivity to SDS/EDTA that is restore upon complementation. FIG. 35C. Macrophage engulfment assay with MH258, deletion mutants and complements. MH258 wzc_{G565A} overproduces capsule and is thus protected from phagocytosis. Values are normalized to the number of wild-type MH258 colonies engulfed by the macrophages during individual experiments. The assay was performed 8 times with each closed black dot representing a separate experiment (n=8). FIG. 35D. A heatmap showing sensitivity to colistin (CT), tigecycline (TGC), cefepime (FEP), amikacin (AK), piperacillin/tazobactam (TZP), meropenem (MEM), and imipenem (IPM). The values show the difference in diameter in mm between MH258, the deletion mutant or complement. Orange shading represents increased resistance/smaller zone of clearing, while dark blue represents increased susceptibility/larger zone of clearing in the mutant (n=4-5).

[0087] FIGS. 36A-36C. Phage-treated K. pneumoniae MH258 are more readily engulfed by macrophages and are sensitized to antibiotics. FIG. 36A. Schematic of macrophage phagocytosis assay. FIG. 36B. Phage-treated and deletion mutant bacteria cultures are enumerated inside murine macrophages using gentamicin protection assay. The values are normalized to the number of wild-type MH258 colonies engulfed by the macrophages during individual experiment. The assay was performed 3-5 times with each closed black dot representing a separate experiment. FIG. 36C. A heatmap showing sensitivity to colistin (CT), tigecycline (TGC), cefepime (FEP), amikacin (AK), piperacillin/tazobactam (TZP), meropenem (MEM), and imipenem (IPM). The values show the difference in diameter in mm between MH258 and the deletion or phage treatment. Orange shading represents increased resistance/smaller zone of clearing, while dark blue represents increased susceptibility/larger zone of clearing in the mutant (n=4-5 for deletion mutants; n=5-6 for phage-treated cultures).

[0088] FIGS. 37A-37C. Combinations of natural or evolved Klebsiella Phage Bank phages can effectively kill multi-drug resistant clinical isolates. FIG. 37A. Combining ΦER12 with phages that depend on a different host factor for infection increases the time resistant subpopulations emerge in kinetic experiments (MOI=10). The time to resistance was determined as the time at which monotonic growth resumed following phage treatment. Phages from various genera or family are colored according to the code in FIG. 32. FIG. 37B. Evolved ΦER16e produces plaques with a larger diameter than ancestral ΦER16. FIG. 37C. The efficiency of killing ΦER3 on various strains is altered depending on the bacterial host on which the lysate was amplified (MOI=1) (ΦER3_{MH258} was amplified on K. pneumoniae MH258, ΦER3_{UTI-7} was amplified on K. quasipneumoniae UTI-7, and ΦER3_{K6} on K. quasipneumoniae K6).

[0089] FIGS. 38A-38K. Combinations of natural or evolved Klebsiella phages can effectively kill multi-drug resistant clinical isolates. FIG. 38A. Schematic showing workflow for anti-Klebsiella cocktail design and optimization. For a specific Klebsiella strain, the best candidate phages from different categories in FIG. 32 are selected and can be further optimized for a given host through repeated passaging. FIGS. 38B-38G. Growth curves for K. pneumoniae strains MH258 (FIG. 38B, FIG. 38E), JHCK1 (FIG. 38D, FIG. 38G), and K. quasipneumoniae strain UTI-7 (FIG. 38C, FIG. 38F). The top row of plots (FIGS. 38B-38D) depict a 2.5 hour growth curve showing the antimicrobial activity of five individual phages selected for the cocktail (MOI=1). The bottom row of plots (FIGS. 38E-38G) depicts the resistance profiles after 16 hours of infection. Individual phage curves all show recovery while each cocktail (teal) shows little to no growth for all three strains (MOI=10). Line color represents the genus or family of the phages as depicted in FIG. 32 (n=3 independent biological replicates) (FIG. 38H, FIG. 38J) Growth curve of evolved phages ΦER16e (FIG. 38H) and ΦER46e (FIG. 38J) show improved killing of the evolved variant (darker, solid line) compared to the ancestral phage (lighter, dashed line) (MOI=1) (n=3 independent biological replicates). Evolved ΦER16e (FIG. 38I) and ΦER46e (FIG. 38K) show improved adsorption to bacterial cells compared to ancestral phages as measured by the rate of decrease of free phages in the supernatant normalized to the original titer (PFU/mL) over time. Evolved variants (darker, solid lines) have less free phages than the ancestral phages (light, dashed linse). Line indicates a non-linear fit to an exponential decay curve (R²>0.98 for ΦER16, ΦER16e, ΦER46e; R²=0.84 for ΦER46) (n=4 independent biological replicates).

[0090] FIGS. 39A-39F. Phage cocktail suppresses and alters Klebsiella population in the mouse gastrointestinal tract. FIG. 39A. K. pneumoniae MH258 titer in fecal samples (Days 3, 7, 8, 10) and cecal samples (Day 15) in gnotobiotic mice treated with PBS (black) or a phage cocktail comprised of ΦER12, ΦER15, ΦER16e, ΦER39, and ΦER46e (red) (˜10⁹ PFU each/mouse). Phages administered on Day 7 and Day 8 suppressed Kp burden in the gut (***p<0.001; Unpaired t test with Welch's correction; n=17 for PBS- and n=23 for cocktail-treated). Data is pooled from 5 separate experiments and error bars represent the standard deviation. See FIG. 40A for individual experiments. FIG. 39B. Phage titers for ΦER39 (purple), ΦER12 (yellow), ΦER15 and ΦER16e (blue), and ΦER46e (orange) in fecal samples over the course of the experiment, with cecal samples on Day 15. The open circle represents the limit of detection on Day 15. The bolded lines are the mean values of 4 separate experiments, with each individual experiment means shown in lighter colored lines (n=18). See FIG. 40C for individual experiments. FIG. 39C. Correlation of the total titer of phage on Day 8 and the fold decrease in K. pneumoniae levels (Spearman p=0.8436; p<0.0001) Threshold for effective Klebsiella killing occurs when at least 3×10⁸ PFU/g stool are present on the day following the first gavage. FIG. 39D. Representative relative 16S rRNA abundance from PBS- and cocktail-treated mice on Day 8. (Kp—Klebsiella pneumoniae; Ri—Roseburia inulinivorans; Am=Akkermansia muciniphila; Ba—Bifidobacterium adolescentis; Sv—Subdoligranulum variable; Ts—Turicibacter sanguinis; Lr—Limosilactobacillus reuteri; Rg—[Ruminoccocus] gnavus; Ac—Anaerostipes caccae; Ec=Escherichia coli; Af—Alistipes finegoldii; Pd—Parabacteroides distasonis; Bu—Bacteroides uniformis; Pv—Phocaeicola vulgatus; Bt—Bacteroides thetaiotaomicron.) FIG. 39E. Principle component analysis of the microbiome composition (16S rRNA relative abundance) of PBS—(black) and cocktail—(red) treated mice on Day 8 for all five experiments. FIG. 39F. The percent of non-capsulated Klebsiella colonies recovered from PBS—(black) and cocktail—(red) treated mice on Day 15 (***p<0.0001; Unpaired t test with Welch's correction; n=17 for PBS- and n=23 for cocktail-treated).

[0091] FIGS. 40A-40C. Phage cocktail suppresses and alters Klebsiella population in the mouse gastrointestinal tract. FIG. 40A. Data from individual trials of K. pneumoniae (Kp) MH258-targeting cocktail. K. pneumoniae MH258 titer in fecal samples (Days 3, 7, 8, 10) and cecal samples (Day 15) in gnotobiotic mice treated with PBS (black) or a phage cocktail comprised of ΦER12, ΦER15, ΦER16e, ΦER39, and ΦER46e (red) (˜10⁹ PFU each/mouse). Phages administered on Day 7 and Day 8 suppressed Kp burden in the gut. FIG. 40B. Aggregate data of K. pneumoniae MH258 fecal or cecal CFU counts partitioned by the recovered total phage titer on Day 8. Mice with fecal phage titers greater than 2×10⁸ PFU/g stool showed a more pronounced decline in fecal Klebsiella levels. FIG. 40C. Data from individual trials of K. pneumoniae (Kp) MH258-targeting cocktail. Phage titers for ΦER39 (purple), ΦER12 (yellow), ΦER15 and ΦER16e (blue), and ΦER46e (orange) in fecal samples over the course of the experiment, with cecal samples on Day 15. The bolded lines are the mean values of 4 separate experiments, with each individual experiment means shown in lighter colored lines.

### DETAILED DESCRIPTION

[0092] The present disclosure is based, at least in part, on the discovery and development of novel bacteriophages and bacteriophage combinations for treatment and prevention of Klebsiella infection, including multidrug-resistant (MDR) or hypervirulent Klebsiella infection. Accordingly, disclosed herein, in some aspects, are bacteriophage compositions comprising 1, 2, 3, 4, 5, 6, 7, 8, 9, 10, 11, 12, 13, 14, 15, 16, 17, 18, 19, 20, 21, 22, 23, 24, 25, 26, 27, 28, 29, 30, 31, 32, 33, 34, 35, 36, 37, 38, 39, 40, 41, 42, 43, 44, 45, 46, 47, 48, 49, 50, 51, 52, 53, 54, 55, 56, 57, 58, 59, 60, 61, 62, 63, 64, 65, 66, 67, 68, 69, 70, 71, 72, 73, 74, or more isolated bacteriophage. In some aspects, disclosed are bacteriophage compositions comprising 1, 2, 3, 4, 5, 6, 7, 8, 9, 10, 11, 12, 13, 14, 15, 16, 17, 18, 19, 20, 21, 22, 23, 24, 25, 26, 27, 28, 29, 30, 31, 32, 33, 34, 35, 36, 37, 38, 39, 40, 41, 42, 43, 44, 45, 46, 47, 48, 49, 50, 51, 52, 53, 54, 55, 56, 57, 58, 59, 60, 61, 62, 63, 64, 65, 66, 67, 68, 69, 70, 71, 72, 73, or 74 isolated bacteriophage comprising a bacteriophage sequence corresponding to ΦER1, ΦER2, ΦER3, ΦER4, ΦER5, ΦER6, ΦER7/ΦER10, ΦER8, ΦER11, ΦER12, ΦER13, ΦER14, ΦER15, ΦER16, ΦER18, ΦER20, ΦER21, ΦER22, ΦER23, ΦER27, ΦER32, ΦER36, ΦER37, ΦER38, ΦER39, ΦER43, ΦER44, ΦER45, ΦER46, ΦER47, ΦER48, ΦER49, ΦER50, ΦER51, ΦER52, ΦER53, ΦER54, ΦER55, ΦMM1, ΦMM2, ΦMM3, ΦMM4, ΦMM5, ΦMM6, ΦMM7, ΦMM8, and/or ΦMM9. In some aspects, any one or more of the foregoing isolated bacteriophage may be excluded from the compositions and/or methods disclosed herein. Further disclosed are devices and kits comprising such compositions and methods for use of such compositions in treatment and/or prevention of pathogenic Klebsiella infection.

### I. Bacteriophage Compositions

[0093] Aspects of the disclosure are directed to compositions comprising one or more bacteriophage. As used herein, a “bacteriophage composition” describes any composition comprising one or more bacteriophage (also “phage” or “Φ”). A bacteriophage of the present disclosure may be a lysogenic phage. A bacteriophage of the present disclosure may be a lytic phage.

[0094] Methods of isolating and characterizing bacteriophage are known in the art and described in, e.g., Hyman P., “Phages for Phage Therapy: Isolation, Characterization, and Host Range Breadth,” Pharmaceuticals (Basel). 2019 March; 12(1): 35, incorporated herein by reference in its entirety. Isolation procedures and variations that are designed to isolate phages include, but are not limited to, e.g., enrichment from an environmental sample, plaque testing, culture lysis, and/or routine test dilution. Characterization procedures used to show that a phage may have utility in phage therapy include, but are not limited to, e.g., plating efficiency, phage morphology by microscopy, whole genome sequencing, one-step growth curves, and/or pulse-field gel electrophoresis. Any one or more of these procedures may be used to isolate and/or characterize a bacteriophage of the disclosure.

[0095] In some aspects, a bacteriophage of the disclosure is a phage of the order Caudovirales. In some aspects, a bacteriophage of the disclosure is a phage of the family Straboviridae, Ackermannviridae, Demerecviridae, Drexlerviridae, Vequintavirinae, Schitoviridae, Autographiviridae, Siphoviridae (proposed Purpuraviridae), Myoviridae, Podoviridae, Chaseviridae, Guelinviridae, Herelleviridae, Rountreeviridae, Salasmaviridae, and/or Zobellviridae. In some aspects, bacteriophages from any one or more of the foregoing bacteriophage families may be excluded from the compositions and/or methods disclosed herein.

[0096] In specific aspects, a bacteriophage of the disclosure is a phage of the family Straboviridae. In some aspects, the Straboviridae family phage is a phage of the genus Angelvirus, Biquartavirus, Bragavirus, Carettavirus, Chrysonvirus, Cinqassovirus, Emmerichvirinae, Gualtarvirus, Jiangsuvirus, Krischvirus, Marfavirus, Mylasvirus, Pseudotevenvirus, Schizotequatrovirus, Slopekvirus, Tevenvirinae, Tulanevirus, and/or Twarogvirinae. In specific aspects, a bacteriophage of the disclosure is a Ceceduovirus, Ishigurovirus, Dhakavirus, Gaprivervirus, Gelderlandvirus, Jiaodavirus, Kanagawavirus, Karamvirus, Moonvirus, Mosigvirus, Mosugukvirus, Roskildevirus, Tegunavirus, Tequatrovirus, Winklervirus, Acajnonavirus, Hadassahvirus, Lasallevirus, Lazarusvirus, and/or Zedzedvirus. In specific aspects, an Straboviridae bacteriophage of the disclosure is ΦER16, ER27, ΦER32, ΦER36, ΦER44, ΦER45, ΦER47, ΦER48, ΦER50, ΦER51, ΦER53, ΦER54. In specific aspects, an Straboviridae bacteriophage of the disclosure is ΦER8, ΦER11, ΦER13, ΦER15, or ΦER38. In specific aspects, a Straboviridae bacteriophage of the disclosure is ΦMM3 or ΦMM4. In some aspects, bacteriophage from any one or more of the foregoing bacteriophage genera, or species therein, may be excluded from the compositions and/or methods disclosed herein.

[0097] In specific aspects, a bacteriophage of the disclosure is a phage of the family Ackermannviridae. In some aspects, the Ackermannviridae family phage is a phage of the subfamily Aglimvirinae and/or Cvivirinae. In some aspects, the Ackermannviridae family phage is a phage of the genus Agtrevirus, Limestonevirus, Kuttervirus, Campanilevirus, Kujavirus, Miltonvirus, Nezavisimistyvirus, Taipeivirus, Tedavirus, and/or Vapseptimavirus. In specific aspects, a bacteriophage of the disclosure is a Ackermannviridae ViI virus (e.g., Kuttervirus ViI). In specific aspects, an Ackermannviridae bacteriophage of the disclosure is ΦER12, ΦER14, or ΦER20. In some aspects, any one or more of the foregoing bacteriophage may be excluded from the compositions and/or methods disclosed herein. In some aspects, bacteriophage from any one or more of the foregoing bacteriophage genera, or species therein, may be excluded from the compositions and/or methods disclosed herein.

[0098] In specific aspects, a bacteriophage of the disclosure is a phage of the family Demerecviridae. In some aspects, the Demerecviridae family phage is a phage of the subfamily Ermolyevavirinae, Markadamsvirinae, and/or Mccorquodalevirinae. In some aspects, the Demerecviridae family phage is a phage of the genus Cetovirus, Jesfedecavirus, Thalassavirus, Vipunavirus, Epseptimavirus, Haartmanvirus, Tequintavirus, Hongcheonvirus, Myunavirus, Novosibvirus, Pogseptimavirus, Shenzhenvirus, and/or Sugarlandvirus. In specific aspects, a bacteriophage of the disclosure is a phage of the genus Tequintavirus (i.e., a T5-like virus). In specific aspects, a Demerecviridae bacteriophage of the disclosure is ΦER46 or ΦER52. In some aspects, bacteriophage from any one or more of the foregoing bacteriophage genera, or species therein, may be excluded from the compositions and/or methods disclosed herein.

[0099] In specific aspects, a bacteriophage of the disclosure is a phage of the family Drexlerviridae. In some aspects, the Drexlerviridae family phage is a phage of the genus Braunvirinae, Eclunavirus, Hicfunavirus, Jhansiroadvirus, Kyungwonvirus, Nouzillyvirus, Rogunavirinae, Tempevirinae, Tunavirinae, Vilniusvirus, and/or Webervirus. In specific aspects, a bacteriophage of the disclosure is a Christensenvirus, Guelphvirus, Loudonvirus, Rtpvirus, Veterinaerplatzvirus, Eastlansingvirus, Lindendrivevirus, Rogunavirus, Wilsonroadvirus, Sauletekiovirus, Changchunvirus, Hanrivervirus, Henuseptimavirus, Tlsvirus, Warwickvirus, Badaguanvirus, Sertoctavirus, and/or Tunavirus. In specific aspects, a Drexlerviridae bacteriophage of the disclosure is PERI, ΦER2, ΦER7/10, ΦER21, ΦER22, ΦER23, or ΦER55. In some aspects, bacteriophage from any one or more of the foregoing bacteriophage genera, or species therein, may be excluded from the compositions and/or methods disclosed herein.

[0100] In specific aspects, a bacteriophage of the disclosure is a phage of the family Autographiviridae. In some aspects, the Autographiviridae family phage is a phage of the genus Aegirvirus, Anchaingvirus, Aqualcavirus, Ashivirus, Ayakvirus, Ayaqvirus, Banchanvirus, Beijerinckvirinae, Bifseptvirus, Bonnellvirus, Cheungvirus, Chosvirus, Colwellvirinae, Corkvirinae, Cuernavacavirus, Cyclitvirus, Ermolevavirus, Foturvirus, Foussvirus, Fussvirus, Gajwadongvirus, Gyeongsanvirus, Igirivirus, Jalkavirus, Jiaoyazivirus, Kafavirus, Kajamvirus, Kakivirus, Kalppathivirus, Kelmasvirus, Kembevirus, Krakvirus, Krylovirinae, Lauvirus, Limelightvirus, Lingvirus, Lirvirus, Lullwatervirus, Maculvirus, Melnykvirinae, Molineuxvirinae, Napahaivirus, Nohivirus, Oinezvirus, Okabevirinae, Paadamvirus, Pagavirus, Pairvirus, Pedosvirus, Pekhitvirus, Pelagivirus, Percyvirus, Piedvirus, Podivirus, Pollyceevirus, Poseidonvirus, Powvirus, Pradovirus, Qadamvirus, Scottvirus, Sednavirus, Serkorvirus, Sieqvirus, Slopekvirinae, Stompelvirus, Stopalavirus, Stopavirus, Studiervirinae, Stupnyavirus, Tangaroavirus, Tawavirus, Tiamatvirus, Tiilvirus, Tritonvirus, Voetvirus, Votkovvirus, Waewaevirus, and/or Wuhanvirus. In specific aspects, a bacteriophage of the disclosure is a Daemvirus, Friunavirus, Pettyvirus, Gutovirus, Kaohsiungvirus, Murciavirus, Trungvirus, Uliginvirus, Kantovirus, Kotilavirus, Phimunavirus, Stompvirus, Kirikabuvirus, Phikmvvirus, Stubburvirus, Tunggulvirus, Aerosvirus, Aghbyvirus, Ahphunavirus, Cronosvirus, Panjvirus, Pienvirus, Wanjuvirus, Acadevirus, Axomammavirus, Eracentumvirus, Tuodvirus, Vectrevirus, Zindervirus, Ampunavirus, Higashivirus, Mguuvirus, Risjevirus, Sukuvirus, Bucovirus, Drulisvirus, Koutsourovirus, Novosibovirus, Aarhusvirus, Apdecimavirus, Berlinvirus, Caroctavirus, Chatterjeevirus, Eapunavirus, Elunavirus, Foetvirus, Ghunavirus, Helsettvirus, Jarilovirus, Kayfunavirus, Minipunavirus, Ningirsuvirus, Pektosvirus, Phutvirus, Pifdecavirus, Pijolavirus, Przondovirus, Teetrevirus, Teseptimavirus, Troedvirus, Unyawovirus, and/or Warsawvirus. In specific aspects, an Autographiviridae bacteriophage of the disclosure is ΦER43 or ΦMM9. In some aspects, bacteriophage from any one or more of the foregoing bacteriophage genera, or species therein, may be excluded from the compositions and/or methods disclosed herein.

[0101] In specific aspects, a bacteriophage of the disclosure is a phage of the family Vequintavirinae. In some aspects, the Vequintavirinae family phage is a phage of the genus Avunavirus, Certrevirus, Henunavirus, Mydovirus, Seunavirus, and/or Vequintavirus. In specific aspects, a Vequintavirinae bacteriophage of the disclosure is ΦER37. In some aspects, bacteriophage from any one or more of the foregoing bacteriophage genera, or species therein, may be excluded from the compositions and/or methods disclosed herein.

[0102] In specific aspects, a bacteriophage of the disclosure is a phage of the family Schitoviridae. In some aspects, the Schitoviridae family phage is a phage of the genus Cbunavirus, Dendoorenvirus, Eceepunavirus, Efbeekayvirus, Electravirus, Enquatrovirinae, Erskinevirinae, Exceevirus, Fuhrmanvirinae, Humphriesvirinae, Littlefixvirus, Migulavirinae, Mukerjeevirus, Oliverunavirus, Pacinivirus, Pariacacavirus, Penintadodekavirus, Pokkenvirus, Pontosvirinae, Presleyvirus, Rhodovirinae, Riverridervirus, Rothmandenesvirinae, Shizishanvirus, Triduovirus, Vicoquintavirus, Waedenswilvirus, Zicotriavirus, and/or Zurivirus. In specific aspects, a Schitoviridae of the disclosure is a Enquatrovirus, Gamaleyavirus, Kaypoctavirus, Johnsonvirus, Yonginvirus, Matsuvirus, Stoningtonvirus, Huelvavirus, Ithacavirus, Pollockvirus, Pylasvirus, Litunavirus, Luzseptimavirus, Dorisvirus, Galateavirus, Nahantvirus, Dongdastvirus, Inbricusvirus, Jwalphavirus, Pourcelvirus, Aoqinvirus, Aorunvirus, Baltimorevirus, Plymouthvirus, Pomeroyivirus, Raunefjordenvirus, and/or Sanyabayvirus. In specific aspects, an Schitoviridae bacteriophage of the disclosure is ΦER49. In some aspects, bacteriophage from any one or more of the foregoing bacteriophage genera, or species therein, may be excluded from the compositions and/or methods disclosed herein.

[0103] In specific aspects, a bacteriophage of the disclosure is a phage of the family Siphoviridae. In some aspects, the Siphoviridae family phage is a phage of the proposed genus Purpuraviridae. In some aspects, the Siphoviridae family phage is a phage of the genus Arquatrovirinae, Bclasvirinae, Bronfenbrennervirinae, Chebruvirinae, Dclasvirinae, Deejayvirinae, Dolichocephalovirinae, Gochnauervirinae, Gutmannvirinae, Hendrixvirinae, Langleyhallvirinae, Mccleskeyvirinae, Mclasvirinae, Nymbaxtervirinae, Pclasvirinae, Queuovirinae, Skryabinvirinae, Trabyvirinae, and/or Tybeckvirinae. In specific aspects, a bacteriophage of the disclosure is a Arquatrovirus, Camvirus, Likavirus, Azeredovirinae, Dubowvirus, Phietavirus, Acadianvirus, Coopervirus, Pregunavirus, Pipefishvirus, Rosebushvirus, Biseptimavirus, Peevelvirus, Brujitavirus, Hawkeyvirus, Plotvirus, Kenoshvirus, Secretariavirus, Tanisvirus, Berteleyvirus, Colossusvirus, Poidextervirus, Spirovirus, Dragolirvirus, Harrisonvirus, Vegavirus, Wandersvirus, Guernseyvirinae, Cornelivirus, Jerseyvirus, Kagunavirus, Cauhtlivirus, Kwaitsingvirus, Nochtlivirus, Sainkungvirus, Shamshuipovirus, Wainchavirus, Wongtaivirus, Yautsimvirus, Carmenvirus, Pobcunavirus, Getalongvirus, Horusvirus, Phystavirus, Limdunavirus, Unaquatrovirus, Bongovirus, Reyvirus, Nclasvirinae, Bettesrvirus, Charlievirus, Redivirus, Baxtervirus, Nymphaduravirus, Bignuzvirus, Fisburnevirus, Phayoncevirus, Amoyvirus, Nipunavirus, Nonagvirus, Seuratvirus, Bambunaquatrovirus, Puchinovirus, Jelitavirus, Slepowrronvirus, Douglasvirus, Lenusvirus, Lideunavirus, and/or Maenadvirus. In specific aspects, a Siphoviridae bacteriophage of the disclosure is ΦER3, ΦER4, ΦER18, ΦER39, ΦMM1, ΦMM2, ΦMM5, ΦMM6, ΦMM7, or ΦMM8. In some aspects, bacteriophage from any one or more of the foregoing bacteriophage genera, or species therein, may be excluded from the compositions and/or methods disclosed herein.

[0104] In specific aspects, a bacteriophage of the disclosure is a phage of the family Myoviridae. In some aspects, the Myoviridae family phage is a phage of the subfamily Emmerichvirinae, Eucampyvirinae, Gorgonvirinae, Ounavirinae, Peduovirinae, Tevenvirinae (a.k.a. Tequatrovirinae), Twarogvirinae, and/or Vequintavirinae. In some aspects, the Myoviridae family phage is a phage of the genus Abouovirus, Acionnavirus, Agricanvirus, Ahtivirus, Alcyoneusvirus, Alexandravirus, Anamdongvirus, Anaposvirus, Aokuangvirus, Asteriusvirus, Atlauavirus, Aurunvirus, Ayohtrevirus, Baikalvirus, Bakolyvirus, Barbavirus, Bcepfunavirus, Bcepmuvirus, Becedseptimavirus, Bellamyvirus, Bendigovirus, Biquartavirus, Bixzunavirus, Borockvirus, Brigitvirus, Brizovirus, Brunovirus, Busanvirus, Carpasinavirus, Chakrabartyvirus, Charybdisvirus, Chiangmaivirus, (olneyvirus, Cymopoleiavirus, Derbicusvirus, Dibbivirus, Donellivirus, Elmenteitavirus, Elvirus, Emdodecavirus, Eneladusvirus, Eponavirus, Erskinevirus, Eurybiavirus, Ficleduovirus, Flaumdravirus, Fukuivirus, Gofduovirus, Goslarvirus, Haloferacalesvirus, Hapunavirus, Heilongjiangvirus, Iapetusvirus, Iodovirus, Ionavirus, Jedunavirus, Jilinvirus, Jimmervirus, Kanagawavirus, Kanaloavirus, Klausavirus, Kleczkowskavirus, Kungbxnavirus, Kylevirus, Lagaffevirus, Leucotheavirus, Libanvirus, Lietduovirus, Llyrvirus, Loughboroughvirus, Lubbockvirus, Machinavirus, Marfavirus, Marthavirus, Mazuvirus, Menderavirus, Metrivirus, Mieseafarmvirus, Mimasvirus, Moabitevirus, Moturavirus, Muldoonvirus, Mushuvirus, Muvirus, Myoalterovirus, Myohalovirus, Myosmarvirus, Naesvirus, Namakavirus, Nankokuvirus, Neptunevirus, Nereusvirus, Nerrivikvirus, Nodensvirus, Noxifervirus, Nylescharonvirus, Obolenskvirus, Otagovirus, Pakpunavirus, Palaemonvirus, Pbunavirus, Peatvirus, Pemunavirus, Petsuvirus, Phabquatrovirus, Phapecoctavirus, Phikzvirus, Pippivirus, Plaisancevirus, Plateaulakevirus, Polybotosvirus, Pontusvirus, Popoffvirus, Punavirus, Qingdaovirus, Rahariannevirus, Radnorvirus, Ripduovirus, Risingsunvirus, Ronodorvirus, Rosemountvirus, Saclayvirus, Saintgironsvirus, Salacisavirus, Salmondvirus, Sarumanvirus, Sasquatchvirus, Schmittlotzvirus, Seoulvirus, Shandongvirus, Sherbrookevirus, Shirahamavirus, Shalavirus, Svunavirus, Tabernariusvirus, Takahashivirus, Tamkungvirus, Taranisvirus, Tefnutvirus, Tegunavirus, Thaumasvirus, Thetisvirus, Thornevirus, Tijeunavirus, Toutatisvirus, Tulanevirus, Vellamovirus, Vhmlvirus, Vibakivirus, Wellingtonvirus, Wifcevirus, Winklervirus, Yokohamavirus, Yoloswagvirus, and/or Yongloolinvirus. In specific aspects, a bacteriophage of the disclosure is a Myoviridae μ-like virus. In specific aspects, a bacteriophage of the disclosure is a Myoviridae P1-like virus. In specific aspects, the Myoviridae family phage is a phage of the subfamily Tevenvirinae (a.k.a. Tequatrovirinae) (i.e., a T4-like virus). In specific aspects, a Myoviridae bacteriophage of the disclosure is ΦER12, ΦER14, ΦER20, or ΦER37. In some aspects, bacteriophage from any one or more of the foregoing bacteriophage genera, or species therein, may be excluded from the compositions and/or methods disclosed herein.

[0105] In specific aspects, a bacteriophage of the disclosure is a phage of the family Podoviridae. In some aspects, the Podoviridae family phage is a phage of the subfamily Beephvirinae, Eekayvirinae, and/or Sepvirinae. In some aspects, the Podoviridae family phage is a phage of the genus Flowerpowervirus, Immanueltrevirus, Manuelvirus, Akonivirus, Tinytimothyvirus, Diegovirus, Oslovirus, Traversvirus, Anjalivirus, Astrithrvirus, Badaztecvirus, Bjornvirus, Bruynoghevirus, Burrovirus, Chopinvirus, Cimandefvirus, Delislevirus, Dybvigvirus, Enhodamvirus, Enquatrovirus, Fipvunavirus, Firingavirus, Gervaisevirus, Giessenvirus, Hollowayvirus, Jasminevirus, Kafunavirus, Kelquatrovirus, Kochitakasuvirus, Kozyakovvirus, Krylovvirus, Kuravirus, Lahexavirus, Lastavirus, Lederbergvirus, Lessievirus, Lightbulbvirus, Myxoctovirus, Pagevirus, Parlovirus, Perisivirus, Privateervirus, Rauchvirus, Ryyoungvirus, Schmidvirus, Sendosyvirus, Skarprettervirus, Sortsnevirus, Uetakevirus, Vicosavirus, Wumpquatrovirus, Wumptrevirus, and/or Xuquatrovirus. In specific aspects, a bacteriophage of the disclosure is a Podoviridae T7-like virus. In specific aspects, a bacteriophage of the disclosure is a Podoviridae P22-like virus. In specific aspects, a Podoviridae bacteriophage of the disclosure is ΦER43 or ΦMM9. In some aspects, bacteriophage from any one or more of the foregoing bacteriophage genera, or species therein, may be excluded from the compositions and/or methods disclosed herein.

[0106] In specific aspects, a bacteriophage of the disclosure is a phage of the family Siphoviridae. In some aspects, the Siphoviridae family phage is a phage of the subfamily Arquatrovirinae, Azeredovirinae, Bclasvirinae, Bronfenbrennervirinae, Chebruvirinae, Dclasvirinae, Deejayvirinae, Dolichocephalovirinae, Gochnauervirinae, Guernseyvirinae, Gutmannvirinae, Hendrixvirinae, Langleyhallvirinae, Mccleskeyvirinae, Mclasvirinae, Nclasvirinae, Nymbaxtervirinae, Pclasvirinae, Queuovirinae, Skryabinvirinae, Trabyvirinae, and/or Tybeckvirinae. In some aspects, the Siphoviridae family phage is a phage of the genus Arquatrovirus, Camvirus, Likavirus, Dubowvirus, Phietavirus, Acadianvirus, Coopervirus, Pregunavirus, Pipefishvirus, Rosebushvirus, Biseptimavirus, Peevelvirus, Brujitavirus, Hawkeyvirus, Plotvirus, Kenoshvirus, Secretariavirus, Tanisvirus, Berteleyvirus, Colossusvirus, Poidextervirus, Spirovirus, Dragolirvirus, Harrisonvirus, Vegavirus, Wandersvirus, Cornelivirus, Jerseyvirus, Kagunavirus, Carmenvirus, Pobcunavirus, Brynievirus, Cauhtlivirus, Kwaitsingvirus, Nochtlivirus, Sainkungvirus, Shamshuipovirus, Wainchavirus, Wongtaivirus, Yautsimvirus, Getalongvirus, Horusvirus, Phystavirus, Limdunavirus, Unaquatrovirus, Bongovirus, Reyvirus, Bettesrvirus, Charlievirus, Redivirus, Baxtervirus, Nymphaduravirus, Bignuzvirus, Fisburnevirus, Phayoncevirus, Amoyvirus, Nipunavirus, Nonagvirus, Seuratvirus, Bambunaquatrovirus, Puchinovirus, Jelitavirus, Slepowrronvirus, Douglasvirus, Lenusvirus, Lideunavirus, Maenadvirus, Abbeymikolonvirus, Abidjanvirus, Agmunavirus, Aguilavirus, Ahduovirus, Alachuavirus, Alegriavirus, Amigovirus, Anatolevirus, Andrewvirus, Andromedavirus, Annadreamyvirus, Appavirus, Apricotvirus, Arawnvirus, Armstrongvirus, Ashduovirus, Attisvirus, Attoomivirus, Audreyjarvisvirus, Austintatiousvirus, Avanivirus, Bantamvirus, Barnyardvirus, Beceayunavirus, Beetrevirus, Behunavirus, Bernalvirus, Betterkatzvirus, Bievrevirus, Bingvirus, Bowservirus, Bridgettevirus, Britbratvirus, Bronvirus, Brussowvirus, Camtrevirus, Casadabanvirus, Cbastvirus, Cecivirus, Ceetrepovirus, Cequinquevirus, Chenonavirus, Cheoctovirus, Chertseyvirus, Chivirus, Chunghsingvirus, (impunavirus, (inunavirus, Coetzeevirus, Colunavirus, Coralvirus, Corndogvirus, Cornievirus, Coventryvirus, Cronusvirus, Cukevirus, Daredevilvirus, Decurrovirus, Delepquintavirus, Demosthenesvirus, Detrevirus, Deurplevirus, Dhillonvirus, Dinavirus, Dismasvirus, Doucettevirus, Edenvirus, Efquatrovirus, Eiauvirus, Eisenstarkvirus, Elerivirus, Emalynvirus, Eyrevirus, Fairfaxidumvirus, Farahnazvirus, Fattrevirus, Feofaniavirus, Fernvirus, Fibralongavirus, Fowlmouthvirus, Franklinbayvirus, Fremauxvirus, Fromanvirus, Gaiavirus, Galaxyvirus, Galunavirus, Gamtrevirus, Gesputvirus, Getseptimavirus, Ghobesvirus, Gilesvirus, Gillianvirus, Gilsonvirus, Glaedevirus, Godonkavirus, Goodmanvirus, Gordonvirus, Gordinkvirus, Gorganvirus, Gorjumvirus, Gustavvirus, Halcyonevirus, Hattifnattvirus, Hedwigvirus, Helsingorvirus, Hiyaavirus, Hnatkovirus, Holosalinivirus, Homburgvirus, Hubeivirus, laduovirus, Ikedavirus, Ilzatvirus, Incheonvirus, Indlulamithivirus, Inhavirus, Jacevirus, Jarrellvirus, Jenstvirus, Jouyvirus, Juiceboxvirus, Junavirus, Kairosalinivirus, Kamchatkavirus, Karimacvirus, Kelleziovirus, Kilunavirus, Klementvirus, Knuthellervirus, Kojivirus, Konstantinevirus, Korravirus, Kostyavirus, Krampusvirus, Kryptosalinivirus, Kuleanavirus, Labanvirus, Lacnuvirus, Lacusarxvirus, Lafunavirus, Lambdavirus, Lambovirus, Lanavirus, Larmunavirus, Laroyevirus, Latrobevirus, Leicestervirus, Lentavirus, Liebevirus, Liefievirus, Lillamyvirus, Lokivirus, Lomovskayavirus, Luckybarnesvirus, Luckytenvirus, Lughvirus, Lwoffvirus, Magadivirus, Majavirus, Manhattanvirus, Mapvirus, Mardecavirus, Marienburgvirus, Marvinvirus, Maxrubnervirus, Mementomorivirus, Metamorphoovirus, Minunavirus, Moineauvirus, Montyvirus, Mudcatvirus, Mufasoctovirus, Muminvirus, Murrayvirus, Nanhaivirus, Nazgulvirus, Neferthenavirus, Nesevirus, Nevevirus, Nickievirus, Nonanavirus, Nyceiraevirus, Oengusvirus, Omegavirus, Oneupvirus, Orchidvirus, Oshimavirus, Pahexavirus, Pamexvirus, Pankowvirus, Papyrusvirus, Patiencevirus, Pepyhexavirus, Phifelvirus, Picardvirus, Pikminvirus, Pleeduovirus, Priunavirus, Psavirus, Psimunavirus, Pleetrevirus, Poushouvirus, Predatorvirus, Pulverervirus, Questintvirus, Quhwahvirus, Radostvirus, Raleighvirus, Ravarandavirus, Ravinvirus, Rerduovirus, Rigallicvirus, Rimavirus, Rockefellervirus, Rockvillevirus, Rogerhendrixvirus, Ronaldovirus, Roufvirus, Rowavirus, Ruthyvirus, Samistivirus, Samunavirus, Samwavirus, Sandinevirus, Sanovirus, Sansavirus, Saphexavirus, Sashavirus, Sasvirus, Saundersvirus, Sawaravirus, Scapunavirus, Schnabeltiervirus, Schubertvirus, Seongbukvirus, Septimatrevirus, Seussvirus, Sextaecvirus, Skunavirus, Slashvirus, Sleepyheadvirus, Smoothievirus, Sonalivirus, Soupsvirus, Sourvirus, Sozzivirus, Sparkyvirus, Spbetavirus, Spizizenvirus, Squashvirus, Squirtyvirus, Stanholtvirus, Steinhofvirus, Sukhumvitvirus, Tandoganvirus, Tankvirus, Tantvirus, Terapinvirus, Teubervirus, Thetabobvirus, Tigunavirus, Timquatrovirus, Tinduovirus, Titanvirus, Tortellinivirus, Triavirus, Trigintaduovirus, Trinavirus, Trinevirus, Triplejayvirus, Unahavirus, Uwajimavirus, Vashvirus, Vedamuthuvirus, Vendettavirus, Vhulanivirus, Vidquintavirus, Vieuvirus, Vividuovirus, Vojvodinavirus, Waukeshavirus, Wbetavirus, Weaselvirus, Whackvirus, Whiteheadvirus, Wildcatvirus, Wilnyevirus, Wizardvirus, Woesvirus, Woodruffvirus, Xiamenvirus, Xipdecavirus, Yangvirus, Yonseivirus, Yuavirus, Yvonnevirus, and/or Zetavirus. In specific aspects, a bacteriophage of the disclosure is a Siphoviridae T1-like virus. In specific aspects, a bacteriophage of the disclosure is a Siphoviridae A-like virus. In specific aspects, a Siphoviridae bacteriophage of the disclosure is ΦER39. In some aspects, bacteriophage from any one or more of the foregoing bacteriophage genera, or species therein, may be excluded from the compositions and/or methods disclosed herein.

[0107] A bacteriophage of the present disclosure may be a phage capable of infecting one or more pathogenic bacteria. A bacteriophage of the present disclosure may co-exist with one or more pathogenic bacteria in the host's gut. A bacteriophage of the present disclosure may be a phage capable of infecting one or more bacteria of the family Enterobacteriaceae. In some aspects, a bacteriophage of the disclosure is a phage capable of infecting Klebsiella, such as Klebsiella pneumoniae (K. pneumoniae), Klebsiella quasipneumoniae (K. quasipneumoniae), and/or Klebsiella variicola (K. variicola). In some aspects, the Klebsiella is multidrug-resistant (MDR) Klebsiella. In some aspects, the Klebsiella is hypervirulent Klebsiella. In some aspects, any one or more of the foregoing Klebsiella strains may be excluded from the compositions and/or methods disclosed herein.

[0108] In some aspects, infection with a bacteriophage of the disclosure can result in capsule depolymerization of a capsule of the pathogenic bacteria and non-capsulated pathogenic bacteria. In addition to simply destroying the capsule, in some aspects, bacteriophage can select for bacteria that mutate capsule synthesis genes in order to evade bacteriophage predation and therefore lose their capsule. Since these mutations are passed on to daughter cells after cell division, the bacteriophage can select for a bacterial population with permanent and heritable capsule loss. Capsules of pathogenic bacteria can protect the bacteria from clearance by the host immune system as a result of the activity of antibodies, phagocytic cells, proteins of the complement cascade, and antimicrobial peptides. Capsules of pathogenic bacteria also cover bacterial lipopolysaccharides (LPS) that are the major outer surface membrane components present in almost all Gram-negative bacteria and that stimulate innate or natural immunity of the host.

[0109] Thus, in some aspects, capsule depolymerization upon infection with a bacteriophage of the disclosure can result in lipopolysaccharide exposure and can promote recognition of the pathogenic bacteria by the host immune system. For example, in some aspects, capsule depolymerization upon infection with a bacteriophage of the disclosure can result in lipopolysaccharide exposure and can promote macrophage engulfment of the pathogenic bacteria to clear the pathogenic bacteria from the host. In some aspects, capsule depolymerization upon infection with a bacteriophage of the disclosure can result in increased susceptibility of the pathogenic bacteria to infection by one or more additional bacteriophage.

[0110] A bacteriophage composition of the disclosure may comprise, for example, one or more bacteriophage capable of infecting a pathogenic bacteria. A bacteriophage composition of the disclosure may comprise, for example, one or more lytic bacteriophage capable of lysing a pathogenic bacteria. A bacteriophage composition of the present disclosure may comprise, consist essentially of, or consist of at least, at most, exactly, or between any two of 1, 2, 3, 4, 5, 6, 7, 8, 9, 10, 11, 12, 13, 14, 15, 16, 17, 18, 19, 20, 21, 22, 23, 24, 25, 26, 27, 28, 29, 30, or more different bacteriophages. In some aspects, a bacteriophage composition of the disclosure comprises one or more of ΦER3, ΦER11, ΦER12, ΦER15, ΦER16, ΦER27, ΦER36, ΦER39, ΦER43, ΦER46, ΦMM7, or ΦMM9, or any combination thereof. In some aspects, any one or more of the foregoing bacteriophage may be excluded from the compositions and/or methods disclosed herein.

[0111] In some aspects, a bacteriophage composition of the disclosure comprises, consists essentially of, or consists of ΦER3. In some aspects, a bacteriophage composition of the disclosure comprises, consists essentially of, or consists of ΦER11. In some aspects, a bacteriophage composition of the disclosure comprises, consists essentially of, or consists of ΦER12. In some aspects, a bacteriophage composition of the disclosure comprises, consists essentially of, or consists of ΦER15. In some aspects, a bacteriophage composition of the disclosure comprises, consists essentially of, or consists of ΦER16. In some aspects, a bacteriophage composition of the disclosure comprises, consists essentially of, or consists of ΦER27. In some aspects, a bacteriophage composition of the disclosure comprises, consists essentially of, or consists of ΦER36. In some aspects, a bacteriophage composition of the disclosure comprises, consists essentially of, or consists of ΦER39. In some aspects, a bacteriophage composition of the disclosure comprises, consists essentially of, or consists of ΦER43. In some aspects, a bacteriophage composition of the disclosure comprises, consists essentially of, or consists of ΦER46. In some aspects, a bacteriophage composition of the disclosure comprises, consists essentially of, or consists of ΦMM7. In some aspects, a bacteriophage composition of the disclosure comprises, consists essentially of, or consists of ΦMM9. In some aspects, a bacteriophage composition comprises, consists essentially of, or consists of two or more of ΦER3, ΦER11, ΦER12, ΦER15, ΦER16, ΦER27, ΦER36, ΦER39, ΦER43, ΦER46, ΦMM7, or ΦMM9. In some aspects, a bacteriophage composition comprises, consists essentially of, or consists of three or more of ΦER3, ΦER11, ΦER12, ΦER15, ΦER16, ΦER27, ΦER36, ΦER39, ΦER43, ΦER46, ΦMM7, or ΦMM9. In some aspects, a bacteriophage composition comprises, consists essentially of, or consists of four or more of ΦER3, ΦER11, ΦER12, ΦER15, ΦER16, ΦER27, ΦER36, ΦER39, ΦER43, ΦER46, ΦMM7, or ΦMM9.

[0112] In some aspects, a bacteriophage composition comprises, consists essentially of, or consists of ΦER12, ΦER15, ΦER16, ΦER39, ΦER46, or any combination thereof. In some aspects, a bacteriophage composition comprises, consists essentially of, or consists of ΦER3, ΦER11, ΦER27, ΦER36, ΦMM9, or any combination thereof. In some aspects, a bacteriophage composition comprises, consists essentially of, or consists of ΦER15, ΦER27, ΦER43, ΦER46, ΦMM7, or any combination thereof.

[0113] In some aspects, a bacteriophage composition comprises, consists essentially of, or consists of one of the bacteriophage combinations provided in Table 1.

TABLE 1
Bacteriophage Combinations

| | ΦER15 | ΦER16 | ΦER39 | ΦER46 |
|---|---|---|---|---|
| ΦER12 | + | | | |
| | + | + | | |
| | + | | + | |
| | + | | | + |
| | + | + | + | |
| | + | + | | + |
| | + | | + | + |
| | + | + | + | + |
| | | + | | |
| | | + | + | |
| | | + | | + |
| | | + | + | + |
| | | | + | |
| | | | + | + |
| | | | | + |

| | ΦER16 | ΦER39 | ΦER46 |
|---|---|---|---|
| ΦER15 | + | | |
| | | + | |
| | | | + |
| | + | + | |
| | + | | + |
| | | + | + |
| | + | + | + |

| | ΦER39 | ΦER46 |
|---|---|---|
| ΦER16 | + | |
| | | + |
| | + | + |

| | | ΦER46 | | |
|---|---|---|---|---|
| | ΦER39 | + | | |
| | ΦER11 | ΦER27 | ΦER36 | ΦMM9 |
| ΦER3 | + | | | |
| | + | + | | |
| | + | | + | |
| | + | | | + |
| | + | + | + | |
| | + | + | | + |
| | + | | + | + |
| | + | + | + | + |
| | | + | | |
| | | + | + | |
| | | + | | + |
| | | + | + | |
| | | | + | |
| | | | + | + |
| | | | | + |

| | ΦER27 | ΦER36 | ΦMM9 |
|---|---|---|---|
| ΦER11 | + | | |
| | | + | |
| | | | + |
| | + | + | |
| | + | | + |
| | | + | + |
| | + | + | + |

| | ΦER36 | ΦMM9 |
|---|---|---|
| ΦER27 | + | |
| | | + |
| | + | + |

| | | | ΦMM9 | |
|---|---|---|---|---|
| | ΦER36 | | + | |
| | ΦER27 | ΦER43 | ΦER46 | ΦMM7 |
| ΦER15 | + | | | |
| | + | + | | |
| | + | | + | |
| | + | | | + |
| | + | + | + | |
| | + | + | | + |
| | + | | + | + |
| | + | + | + | + |
| | | + | | |
| | | + | + | |
| | | + | | + |
| | | + | + | + |
| | | | + | |
| | | | + | + |
| | | | | + |

| | ΦER43 | ΦER46 | ΦMM9 |
|---|---|---|---|
| ΦER27 | + | | |
| | | + | |
| | | | + |
| | + | + | |
| | + | | + |
| | | + | + |
| | + | + | + |

| | ΦER46 | ΦMM9 |
|---|---|---|
| ΦER43 | + | |
| | | + |
| | + | + |

| | ΦMM9 |
|---|---|
| ΦER46 | + |

[0114] A bacteriophage composition comprising two or more different bacteriophages may comprise various amounts of each bacteriophage. For example, a composition may comprise substantially the same amount of each bacteriophage. Alternatively, a composition may comprise substantially different amounts of each bacteriophage.

[0115] A bacteriophage composition may comprise at least, at most, exactly, between any two of, or about 10³, 10⁴, 10⁵, 10⁶, 10⁷, 10⁸, 10⁹, 10¹⁰, 10¹¹, or 10¹² plaque forming units (PFU) of each of the one or more bacteriophage in the composition, or more. In some aspects, a bacteriophage composition comprises at least, at most, exactly, between any two of, or about 10³, 10⁴, 10⁵, 10⁶, 10⁷, 10⁸, 10⁹, 10¹⁰, 10¹¹, or 10¹² PFU of ΦER3. In some aspects, a bacteriophage composition comprises at least, at most, exactly, between any two of, or about 10³, 10⁴, 10⁵, 10⁶, 10⁷, 10⁸, 10⁹, 10¹⁰, 10¹¹, or 10¹² PFU of ΦER11. In some aspects, a bacteriophage composition comprises at least, at most, exactly, between any two of, or about 10³, 10⁴, 10⁵, 10⁶, 10⁷, 10⁸, 10⁹, 10¹⁰, 10¹¹, or 10¹² PFU of ΦER12. In some aspects, a bacteriophage composition comprises at least, at most, exactly, between any two of, or about 10³, 10⁴, 10⁵, 10⁶, 10⁷, 10⁸, 10⁹, 10¹⁰, 10¹¹, or 10¹² PFU of ΦER15. In some aspects, a bacteriophage composition comprises at least, at most, exactly, between any two of, or about 10³, 10⁴, 10⁵, 10⁶, 10⁷, 10⁸, 10⁹, 10¹⁰, 10¹¹, or 10¹² PFU of ΦER16. In some aspects, a bacteriophage composition comprises at least, at most, exactly, between any two of, or about 10³, 10⁴, 10⁵, 10⁶, 10⁷, 10⁸, 10⁹, 10¹⁰, 10¹¹, or 10¹² PFU of ΦER27. In some aspects, a bacteriophage composition comprises at least, at most, exactly, between any two of, or about 10³, 10⁴, 10⁵, 10⁶, 10⁷, 10⁸, 10⁹, 10¹⁰, 10¹¹, or 10¹² PFU of ΦER36. In some aspects, a bacteriophage composition comprises at least, at most, exactly, between any two of, or about 10³, 10⁴, 10⁵, 10⁶, 10⁷, 10⁸, 10⁹, 10¹⁰, 10¹¹, or 10¹² PFU of ΦER39. In some aspects, a bacteriophage composition comprises at least, at most, exactly, between any two of, or about 10³, 10⁴, 10⁵, 10⁶, 10⁷, 10⁸, 10⁹, 10¹⁰, 10¹¹, or 10¹² PFU of ΦER43. In some aspects, a bacteriophage composition comprises at least, at most, exactly, between any two of, or about 10³, 10⁴, 10⁵, 10⁶, 10⁷, 10⁸, 10⁹, 10¹⁰, 10¹¹, or 10¹² PFU of ΦER46. In some aspects, a bacteriophage composition comprises at least, at most, exactly, between any two of, or about 10³, 10⁴, 10⁵, 10⁶, 10⁷, 10⁸, 10⁹, 10¹⁰, 10¹¹, or 10¹² PFU of ΦMM7. In some aspects, a bacteriophage composition comprises at least, at most, exactly, between any two of, or about 10³, 10⁴, 10⁵, 10⁶, 10⁷, 10⁸, 10⁹, 10¹⁰, 10¹¹, or 10¹² PFU of ΦMM9.

[0116] In some aspects, a bacteriophage composition of the disclosure may comprise, in addition to one or more bacteriophages, one or more metals. The one or more metals may include, for example, calcium, magnesium, iron, sodium, and/or potassium. In some aspects, any one or more of the foregoing metals may be excluded from the compositions and/or methods disclosed herein.

[0117] Aspects of the present disclosure comprise, consist essentially of, or consist of bacteriophage compositions, kits, and devices comprising 1, 2, 3, 4, 5, 6, 7, 8, 9, 10, 11, 12, 13, 14, 15, 16, 17, 18, 19, 20, 21, 22, 23, 24, 25, 26, 27, 28, 29, 30, 31, 32, 33, 34, 35, 36, 37, 38, 39, 40, 41, 42, 43, 44, 45, 46, 47, 48, 49, 50, 51, 52, 53, 54, 55, 56, 57, 58, 59, 60, 61, 62, 63, 64, 65, 66, 67, 68, 69, 70, 71, 72, 73, 74, or more bacteriophage, and methods for use. Aspects of the present disclosure comprise, consist essentially of, or consist of bacteriophage compositions, kits, and devices comprising ΦER3, ΦER11, ΦER12, ΦER15, ΦER16, ΦER27, ΦER36, ΦER39, ΦER43, ΦER46, ΦMM7, and/or ΦMM9, and methods for use. Bacteriophage genomes can be provided as bacteriophage sequences. The term “bacteriophage sequence” refers to a sequence from bacteriophage and does not include a nucleotide sequence greater than 20 contiguous nucleotides that is not from bacteriophage. Such non-bacteriophage sequences would be heterologous, and in aspects of the disclosure, they could be used to purify, select, and/or provide additional functionality to the bacteriophage. For example, in some aspects, heterologous sequences include, but are not limited to, capsule depolymerases that might expand or alter the host range of a bacteriophage, biofilm-degrading enzymes, antimicrobial proteins and/or peptides, or CRISPR-Cas systems and/or DNA-degrading enzymes. In some aspects, the heterologous sequence encodes a peptide or polypeptide.

[0118] In some aspects, a composition may comprise an isolated bacteriophage, wherein the bacteriophage were evolved to improve lytic capacity, reduce lysogenic capacity, reduce antibiotic resistance gene obtainment capacity, reduce bacterial virulence gene obtainment capacity, and/or increase the number of bacterial strains subject to lysis by the isolated bacteriophage lytic. Thus, variants or evolved bacteriophage sequences are also contemplated as aspects of the methods and compositions disclosed herein.

### A. Bacteriophage ER3

[0119] Aspects of the present disclosure comprise, consist essentially of, or consist of bacteriophage ER3 (also “ΦER3,” used synonymously herein), compositions, kits, and devices comprising ΦER3, and methods for use. A ΦER3 genome is described by GENBANK® Accession Number ______, which is noted as 48,293 bp in length, and the sequence of which is incorporated herein by reference as SEQ ID NO:8 or SEQ ID NO:32. Comparing SEQ ID NO:8 to SEQ ID NO:32, SEQ ID NO:32 is a reorganization of the phage genome encoded by SEQ ID NO: 8, including a different start site and excluding assembly artifacts.

[0120] In some aspects, a bacteriophage or composition thereof may comprise an isolated bacteriophage comprising ΦER3 (SEQ ID NO:8 or SEQ ID NO:32). In some aspects, a bacteriophage or composition thereof may comprise an isolated bacteriophage consisting essentially of ΦER3 (SEQ ID NO:8 or SEQ ID NO:32). In some aspects, a bacteriophage or composition thereof may comprise an isolated bacteriophage consisting of ΦER3 (SEQ ID NO: 8 or SEQ ID NO:32).

[0121] In some aspects, a bacteriophage may include at least, at most, or exactly 1, 2, 3, 4, 5, 6, 7, 8, 9, 10, 11, 12, 13, 14, 15, 16, 17, 18, 19, 20, 21, 22, 23, 24, 25, 26, 27, 28, 29, 30, 31, 32, 33, 34, 35, 36, 37, 38, 39, 40, 41, 42, 43, 44, 45, 46, 47, 48, 49, or 50 or more nucleotide substitutions to the genomic sequence of ΦER3 (SEQ ID NO:8 or SEQ ID NO:32). In some aspects, a bacteriophage may be at least, at most, exactly, or between any two of 60%, 61%, 62%, 63%, 64%, 65%, 66%, 67%, 68%, 69%, 70%, 71%, 72%, 73%, 74%, 75%, 76%, 77%, 78%, 79%, 80%, 81%, 82%, 83%, 84%, 85%, 86%, 87%, 88%, 89%, 90%, 91%, 92%, 93%, 94%, 95%, 96%, 97%, 98%, 99%, 99.01%, 99.02%, 99.03%, 99.04%, 99.05%, 99.06%, 99.07%, 99.08%, 99.09%, 99.1%, 99.11%, 99.12%, 99.13%, 99.14%, 99.15%, 99.16%, 99.17%, 99.18%, 99.19%, 99.2%, 99.21%, 99.22%, 99.23%, 99.24%, 99.25%, 99.26%, 99.27%, 99.28%, 99.29%, 99.3%, 99.31%, 99.32%, 99.33%, 99.34%, 99.35%, 99.36%, 99.37%, 99.38%, 99.39%, 99.4%, 99.41%, 99.42%, 99.43%, 99.44%, 99.45%, 99.46%, 99.47%, 99.48%, 99.49%, 99.5%, 99.51%, 99.52%, 99.53%, 99.54%, 99.55%, 99.56%, 99.57%, 99.58%, 99.59%, 99.6%, 99.61%, 99.62%, 99.63%, 99.64%, 99.65%, 99.66%, 99.67%, 99.68%, 99.69%, 99.7%, 99.71%, 99.72%, 99.73%, 99.74%, 99.75%, 99.76%, 99.77%, 99.78%, 99.79%, 99.8%, 99.81%, 99.82%, 99.83%, 99.84%, 99.85%, 99.86%, 99.87%, 99.88%, 99.89%, 99.9%, 99.91%, 99.92%, 99.93%, 99.94%, 99.95%, 99.96%, 99.97%, 99.98%, 99.99%, or 100% (or any derivable range therein) similar, identical, or homologous with the genomic sequence of ΦER3 (SEQ ID NO:8 or SEQ ID NO:32).

[0122] In some aspects, a bacteriophage or composition thereof may comprise an isolated bacteriophage with greater than 95%, 96%, 97%, 98%, 99%, 99.1%, 99.2%, 99.3%, 99.4%, 99.5%, 99.6%, 99.7%, 99.8%, 99.9%, or 99.95% genomic sequence identity to the genomic sequence of ΦER3 (SEQ ID NO:8 or SEQ ID NO:32).

[0123] Variants or evolved bacteriophage derived from ΦER3 having a genome comprising, consisting, or consisting essentially of SEQ ID NO:8 or SEQ ID NO:32 are also contemplated as aspects of the methods and compositions disclosed herein.

### B. Bacteriophage ER11

[0124] Aspects of the present disclosure comprise, consist essentially of, or consist of bacteriophage ER11 (also “ΦER11,” used synonymously herein), compositions, kits, and devices comprising ΦER11, and methods for use. A ΦER11 genome is described by GENBANK® Accession Number ______, which is noted as 164,356 bp in length, and the sequence of which is incorporated herein by reference as SEQ ID NO:14 or SEQ ID NO:36. Comparing SEQ ID NO: 14 to SEQ ID NO:36, SEQ ID NO:36 is a reorganization of the phage genome encoded by SEQ ID NO:14, including a different start site and excluding assembly artifacts.

[0125] In some aspects, a bacteriophage or composition thereof may comprise an isolated bacteriophage comprising ΦER11 (SEQ ID NO:14 or SEQ ID NO:36). In some aspects, a bacteriophage or composition thereof may comprise an isolated bacteriophage consisting essentially of ΦER11 (SEQ ID NO:14 or SEQ ID NO:36). In some aspects, a bacteriophage or composition thereof may comprise an isolated bacteriophage consisting of ΦER11 (SEQ ID NO: 14 or SEQ ID NO:36).

[0126] In some aspects, a bacteriophage may include at least, at most, or exactly 1, 2, 3, 4, 5, 6, 7, 8, 9, 10, 11, 12, 13, 14, 15, 16, 17, 18, 19, 20, 21, 22, 23, 24, 25, 26, 27, 28, 29, 30, 31, 32, 33, 34, 35, 36, 37, 38, 39, 40, 41, 42, 43, 44, 45, 46, 47, 48, 49, or 50 or more nucleotide substitutions to the genomic sequence of ΦER11 (SEQ ID NO:14 or SEQ ID NO:36). In some aspects, a bacteriophage may be at least, at most, exactly, or between any two of 60%, 61%, 62%, 63%, 64%, 65%, 66%, 67%, 68%, 69%, 70%, 71%, 72%, 73%, 74%, 75%, 76%, 77%, 78%, 79%, 80%, 81%, 82%, 83%, 84%, 85%, 86%, 87%, 88%, 89%, 90%, 91%, 92%, 93%, 94%, 95%, 96%, 97%, 98%, 99%, 99.01%, 99.02%, 99.03%, 99.04%, 99.05%, 99.06%, 99.07%, 99.08%, 99.09%, 99.1%, 99.11%, 99.12%, 99.13%, 99.14%, 99.15%, 99.16%, 99.17%, 99.18%, 99.19%, 99.2%, 99.21%, 99.22%, 99.23%, 99.24%, 99.25%, 99.26%, 99.27%, 99.28%, 99.29%, 99.3%, 99.31%, 99.32%, 99.33%, 99.34%, 99.35%, 99.36%, 99.37%, 99.38%, 99.39%, 99.4%, 99.41%, 99.42%, 99.43%, 99.44%, 99.45%, 99.46%, 99.47%, 99.48%, 99.49%, 99.5%, 99.51%, 99.52%, 99.53%, 99.54%, 99.55%, 99.56%, 99.57%, 99.58%, 99.59%, 99.6%, 99.61%, 99.62%, 99.63%, 99.64%, 99.65%, 99.66%, 99.67%, 99.68%, 99.69%, 99.7%, 99.71%, 99.72%, 99.73%, 99.74%, 99.75%, 99.76%, 99.77%, 99.78%, 99.79%, 99.8%, 99.81%, 99.82%, 99.83%, 99.84%, 99.85%, 99.86%, 99.87%, 99.88%, 99.89%, 99.9%, 99.91%, 99.92%, 99.93%, 99.94%, 99.95%, 99.96%, 99.97%, 99.98%, 99.99%, or 100% (or any derivable range therein) similar, identical, or homologous with the genomic sequence of ΦER11 (SEQ ID NO:14 or SEQ ID NO:36).

[0127] In some aspects, a bacteriophage or composition thereof may comprise an isolated bacteriophage with greater than 95%, 96%, 97%, 98%, 99%, 99.1%, 99.2%, 99.3%, 99.4%, 99.5%, 99.6%, 99.7%, 99.8%, 99.9%, or 99.95% genomic sequence identity to the genomic sequence of ΦER11 (SEQ ID NO:14 or SEQ ID NO:36).

[0128] Variants or evolved bacteriophage derived from ΦER11 having a genome comprising, consisting, or consisting essentially of SEQ ID NO:14 or SEQ ID NO:36 are also contemplated as aspects of the methods and compositions disclosed herein.

### C. Bacteriophage ER12

[0129] Aspects of the present disclosure comprise, consist essentially of, or consist of bacteriophage ER12 (also “ΦER12,” used synonymously herein), compositions, kits, and devices comprising ΦER12, and methods for use. A ΦER12 genome is described by GENBANK® Accession Number ______, which is noted as 157,838 bp in length, the sequence of which is incorporated herein by reference as SEQ ID NO:1, and GENBANK® Accession Number ______, which is noted as 157,764 bp in length, the sequence of which is incorporated herein by reference as SEQ ID NO:37. Comparing SEQ ID NO: 1 to SEQ ID NO:37, SEQ ID NO: 37 is a reorganization of the phage genome encoded by SEQ ID NO: 1, including a different start site and excluding assembly artifacts.

[0130] In some aspects, a bacteriophage or composition thereof may comprise an isolated bacteriophage comprising ΦER12 (SEQ ID NO:1 or SEQ ID NO:37). In some aspects, a bacteriophage or composition thereof may comprise an isolated bacteriophage consisting essentially of ΦER12 (SEQ ID NO:1 or SEQ ID NO:37). In some aspects, a bacteriophage or composition thereof may comprise an isolated bacteriophage consisting of ΦER12 (SEQ ID NO: 1 or SEQ ID NO:37).

[0131] In some aspects, a bacteriophage may include at least, at most, or exactly 1, 2, 3, 4, 5, 6, 7, 8, 9, 10, 11, 12, 13, 14, 15, 16, 17, 18, 19, 20, 21, 22, 23, 24, 25, 26, 27, 28, 29, 30, 31, 32, 33, 34, 35, 36, 37, 38, 39, 40, 41, 42, 43, 44, 45, 46, 47, 48, 49, or 50 or more nucleotide substitutions to the genomic sequence of ΦER12 (SEQ ID NO:1 or SEQ ID NO:37). In some aspects, a bacteriophage may be at least, at most, exactly, or between any two of 60%, 61%, 62%, 63%, 64%, 65%, 66%, 67%, 68%, 69%, 70%, 71%, 72%, 73%, 74%, 75%, 76%, 77%, 78%, 79%, 80%, 81%, 82%, 83%, 84%, 85%, 86%, 87%, 88%, 89%, 90%, 91%, 92%, 93%, 94%, 95%, 96%, 97%, 98%, 99%, 99.01%, 99.02%, 99.03%, 99.04%, 99.05%, 99.06%, 99.07%, 99.08%, 99.09%, 99.1%, 99.11%, 99.12%, 99.13%, 99.14%, 99.15%, 99.16%, 99.17%, 99.18%, 99.19%, 99.2%, 99.21%, 99.22%, 99.23%, 99.24%, 99.25%, 99.26%, 99.27%, 99.28%, 99.29%, 99.3%, 99.31%, 99.32%, 99.33%, 99.34%, 99.35%, 99.36%, 99.37%, 99.38%, 99.39%, 99.4%, 99.41%, 99.42%, 99.43%, 99.44%, 99.45%, 99.46%, 99.47%, 99.48%, 99.49%, 99.5%, 99.51%, 99.52%, 99.53%, 99.54%, 99.55%, 99.56%, 99.57%, 99.58%, 99.59%, 99.6%, 99.61%, 99.62%, 99.63%, 99.64%, 99.65%, 99.66%, 99.67%, 99.68%, 99.69%, 99.7%, 99.71%, 99.72%, 99.73%, 99.74%, 99.75%, 99.76%, 99.77%, 99.78%, 99.79%, 99.8%, 99.81%, 99.82%, 99.83%, 99.84%, 99.85%, 99.86%, 99.87%, 99.88%, 99.89%, 99.9%, 99.91%, 99.92%, 99.93%, 99.94%, 99.95%, 99.96%, 99.97%, 99.98%, 99.99%, or 100% (or any derivable range therein) similar, identical, or homologous with the genomic sequence of ΦER12 (SEQ ID NO:1 or SEQ ID NO:37).

[0132] In some aspects, a bacteriophage or composition thereof may comprise an isolated bacteriophage with greater than 95%, 96%, 97%, 98%, 99%, 99.1%, 99.2%, 99.3%, 99.4%, 99.5%, 99.6%, 99.7%, 99.8%, 99.9%, or 99.95% genomic sequence identity to the genomic sequence of ΦER12 (SEQ ID NO:1 or SEQ ID NO:37).

[0133] Variants or evolved bacteriophage derived from ΦER12 having a genome comprising, consisting, or consisting essentially of SEQ ID NO:1 or SEQ ID NO:37 are also contemplated as aspects of the methods and compositions disclosed herein.

### D. Bacteriophage ER15

[0134] Aspects of the present disclosure comprise, consist essentially of, or consist of bacteriophage ER15 (also “ΦER15,” used synonymously herein), compositions, kits, and devices comprising ΦER15, and methods for use. A ΦER15 genome is described by GENBANK® Accession Number ______, which is noted as 165,661 bp in length, the sequence of which is incorporated herein by reference as SEQ ID NO:2, and GENBANK® Accession Number ______, which is noted as 165,587 bp in length, the sequence of which is incorporated herein by reference as SEQ ID NO:40. Comparing SEQ ID NO:2 to SEQ ID NO:40, SEQ ID NO: 40 is a reorganization of the phage genome encoded by SEQ ID NO:2, including a different start site and excluding assembly artifacts.

[0135] In some aspects, a bacteriophage or composition thereof may comprise an isolated bacteriophage comprising ΦER15 (SEQ ID NO:2 or SEQ ID NO:40). In some aspects, a bacteriophage or composition thereof may comprise an isolated bacteriophage consisting essentially of ΦER15 (SEQ ID NO:2 or SEQ ID NO:40). In some aspects, a bacteriophage or composition thereof may comprise an isolated bacteriophage consisting of ΦER15 (SEQ ID NO: 2 or SEQ ID NO:40).

[0136] In some aspects, a bacteriophage may include at least, at most, or exactly 1, 2, 3, 4, 5, 6, 7, 8, 9, 10, 11, 12, 13, 14, 15, 16, 17, 18, 19, 20, 21, 22, 23, 24, 25, 26, 27, 28, 29, 30, 31, 32, 33, 34, 35, 36, 37, 38, 39, 40, 41, 42, 43, 44, 45, 46, 47, 48, 49, or 50 or more nucleotide substitutions to the genomic sequence of ΦER15 (SEQ ID NO:2 or SEQ ID NO:40). In some aspects, a bacteriophage may be at least, at most, exactly, or between any two of 60%, 61%, 62%, 63%, 64%, 65%, 66%, 67%, 68%, 69%, 70%, 71%, 72%, 73%, 74%, 75%, 76%, 77%, 78%, 79%, 80%, 81%, 82%, 83%, 84%, 85%, 86%, 87%, 88%, 89%, 90%, 91%, 92%, 93%, 94%, 95%, 96%, 97%, 98%, 99%, 99.01%, 99.02%, 99.03%, 99.04%, 99.05%, 99.06%, 99.07%, 99.08%, 99.09%, 99.1%, 99.11%, 99.12%, 99.13%, 99.14%, 99.15%, 99.16%, 99.17%, 99.18%, 99.19%, 99.2%, 99.21%, 99.22%, 99.23%, 99.24%, 99.25%, 99.26%, 99.27%, 99.28%, 99.29%, 99.3%, 99.31%, 99.32%, 99.33%, 99.34%, 99.35%, 99.36%, 99.37%, 99.38%, 99.39%, 99.4%, 99.41%, 99.42%, 99.43%, 99.44%, 99.45%, 99.46%, 99.47%, 99.48%, 99.49%, 99.5%, 99.51%, 99.52%, 99.53%, 99.54%, 99.55%, 99.56%, 99.57%, 99.58%, 99.59%, 99.6%, 99.61%, 99.62%, 99.63%, 99.64%, 99.65%, 99.66%, 99.67%, 99.68%, 99.69%, 99.7%, 99.71%, 99.72%, 99.73%, 99.74%, 99.75%, 99.76%, 99.77%, 99.78%, 99.79%, 99.8%, 99.81%, 99.82%, 99.83%, 99.84%, 99.85%, 99.86%, 99.87%, 99.88%, 99.89%, 99.9%, 99.91%, 99.92%, 99.93%, 99.94%, 99.95%, 99.96%, 99.97%, 99.98%, 99.99%, or 100% (or any derivable range therein) similar, identical, or homologous with the genomic sequence of ΦER15 (SEQ ID NO:2 or SEQ ID NO:40).

[0137] In some aspects, a bacteriophage or composition thereof may comprise an isolated bacteriophage with greater than 95%, 96%, 97%, 98%, 99%, 99.1%, 99.2%, 99.3%, 99.4%, 99.5%, 99.6%, 99.7%, 99.8%, 99.9%, or 99.95% genomic sequence identity to the genomic sequence of ER15 (SEQ ID NO:2 or SEQ ID NO:40).

[0138] Variants or evolved bacteriophage derived from ΦER15 having a genome comprising, consisting, or consisting essentially of SEQ ID NO:2 or SEQ ID NO:40 are also contemplated as aspects of the methods and compositions disclosed herein.

### E. Bacteriophage ER16

[0139] Aspects of the present disclosure comprise, consist essentially of, or consist of bacteriophage ER16 (also “ΦER16,” used synonymously herein), compositions, kits, and devices comprising ΦER16, and methods for use. A ΦER16 genome is described by GENBANK® Accession Number ______, which is noted as 175,688 bp in length, the sequence of which is incorporated herein by reference as SEQ ID NO:3, and GENBANK® Accession Number ______, which is noted as 175,617 bp in length, the sequence of which is incorporated herein by reference as SEQ ID NO:41. Comparing SEQ ID NO:3 to SEQ ID NO:41, SEQ ID NO: 41 is a reorganization of the phage genome encoded by SEQ ID NO:3, including a different start site and excluding assembly artifacts.

[0140] In some aspects, a bacteriophage or composition thereof may comprise an isolated bacteriophage comprising ΦER16 (SEQ ID NO:3 or SEQ ID NO:41). In some aspects, a bacteriophage or composition thereof may comprise an isolated bacteriophage consisting essentially of ΦER16 (SEQ ID NO:3 or SEQ ID NO:41). In some aspects, a bacteriophage or composition thereof may comprise an isolated bacteriophage consisting of ΦER16 (SEQ ID NO: 3 or SEQ ID NO:41).

[0141] In some aspects, a bacteriophage may include at least, at most, or exactly 1, 2, 3, 4, 5, 6, 7, 8, 9, 10, 11, 12, 13, 14, 15, 16, 17, 18, 19, 20, 21, 22, 23, 24, 25, 26, 27, 28, 29, 30, 31, 32, 33, 34, 35, 36, 37, 38, 39, 40, 41, 42, 43, 44, 45, 46, 47, 48, 49, or 50 or more nucleotide substitutions to the genomic sequence of ΦER16 (SEQ ID NO:3 or SEQ ID NO:41). In some aspects, a bacteriophage may be at least, at most, exactly, or between any two of 60%, 61%, 62%, 63%, 64%, 65%, 66%, 67%, 68%, 69%, 70%, 71%, 72%, 73%, 74%, 75%, 76%, 77%, 78%, 79%, 80%, 81%, 82%, 83%, 84%, 85%, 86%, 87%, 88%, 89%, 90%, 91%, 92%, 93%, 94%, 95%, 96%, 97%, 98%, 99%, 99.01%, 99.02%, 99.03%, 99.04%, 99.05%, 99.06%, 99.07%, 99.08%, 99.09%, 99.1%, 99.11%, 99.12%, 99.13%, 99.14%, 99.15%, 99.16%, 99.17%, 99.18%, 99.19%, 99.2%, 99.21%, 99.22%, 99.23%, 99.24%, 99.25%, 99.26%, 99.27%, 99.28%, 99.29%, 99.3%, 99.31%, 99.32%, 99.33%, 99.34%, 99.35%, 99.36%, 99.37%, 99.38%, 99.39%, 99.4%, 99.41%, 99.42%, 99.43%, 99.44%, 99.45%, 99.46%, 99.47%, 99.48%, 99.49%, 99.5%, 99.51%, 99.52%, 99.53%, 99.54%, 99.55%, 99.56%, 99.57%, 99.58%, 99.59%, 99.6%, 99.61%, 99.62%, 99.63%, 99.64%, 99.65%, 99.66%, 99.67%, 99.68%, 99.69%, 99.7%, 99.71%, 99.72%, 99.73%, 99.74%, 99.75%, 99.76%, 99.77%, 99.78%, 99.79%, 99.8%, 99.81%, 99.82%, 99.83%, 99.84%, 99.85%, 99.86%, 99.87%, 99.88%, 99.89%, 99.9%, 99.91%, 99.92%, 99.93%, 99.94%, 99.95%, 99.96%, 99.97%, 99.98%, 99.99%, or 100% (or any derivable range therein) similar, identical, or homologous with the genomic sequence of ΦER16 (SEQ ID NO:3 or SEQ ID NO:41).

[0142] In some aspects, a bacteriophage or composition thereof may comprise an isolated bacteriophage with greater than 95%, 96%, 97%, 98%, 99%, 99.1%, 99.2%, 99.3%, 99.4%, 99.5%, 99.6%, 99.7%, 99.8%, 99.9%, or 99.95% genomic sequence identity to the genomic sequence of ΦER16 (SEQ ID NO:3 or SEQ ID NO:41).

[0143] Variants or evolved bacteriophage derived from ΦER16 having a genome comprising, consisting, or consisting essentially of SEQ ID NO:3 or SEQ ID NO:41 are also contemplated as aspects of the methods and compositions disclosed herein.

### F. Bacteriophage ER27

[0144] Aspects of the present disclosure comprise, consist essentially of, or consist of bacteriophage ER27 (also “ΦER27,” used synonymously herein), compositions, kits, and devices comprising ΦER27, and methods for use. A ΦER27 genome is described by GENBANK® Accession Number ______, which is noted as 176,860 bp in length, and the sequence of which is incorporated herein by reference as SEQ ID NO:20 or SEQ ID NO:47. Comparing SEQ ID NO:20 to SEQ ID NO:47, SEQ ID NO:47 is a reorganization of the phage genome encoded by SEQ ID NO:20, including a different start site and excluding assembly artifacts.

[0145] In some aspects, a bacteriophage or composition thereof may comprise an isolated bacteriophage comprising ΦER27 (SEQ ID NO:20 or SEQ ID NO:47). In some aspects, a bacteriophage or composition thereof may comprise an isolated bacteriophage consisting essentially of ΦER27 (SEQ ID NO:20 or SEQ ID NO:47). In some aspects, a bacteriophage or composition thereof may comprise an isolated bacteriophage consisting of ΦER27 (SEQ ID NO: 20 or SEQ ID NO:47).

[0146] In some aspects, a bacteriophage may include at least, at most, or exactly 1, 2, 3, 4, 5, 6, 7, 8, 9, 10, 11, 12, 13, 14, 15, 16, 17, 18, 19, 20, 21, 22, 23, 24, 25, 26, 27, 28, 29, 30, 31, 32, 33, 34, 35, 36, 37, 38, 39, 40, 41, 42, 43, 44, 45, 46, 47, 48, 49, or 50 or more variant nucleotide substitutions to the genomic sequence of ΦER27 (SEQ ID NO:20 or SEQ ID NO: 47). In some aspects, a bacteriophage may be at least, at most, exactly, or between any two of 60%, 61%, 62%, 63%, 64%, 65%, 66%, 67%, 68%, 69%, 70%, 71%, 72%, 73%, 74%, 75%, 76%, 77%, 78%, 79%, 80%, 81%, 82%, 83%, 84%, 85%, 86%, 87%, 88%, 89%, 90%, 91%, 92%, 93%, 94%, 95%, 96%, 97%, 98%, 99%, 99.01%, 99.02%, 99.03%, 99.04%, 99.05%, 99.06%, 99.07%, 99.08%, 99.09%, 99.1%, 99.11%, 99.12%, 99.13%, 99.14%, 99.15%, 99.16%, 99.17%, 99.18%, 99.19%, 99.2%, 99.21%, 99.22%, 99.23%, 99.24%, 99.25%, 99.26%, 99.27%, 99.28%, 99.29%, 99.3%, 99.31%, 99.32%, 99.33%, 99.34%, 99.35%, 99.36%, 99.37%, 99.38%, 99.39%, 99.4%, 99.41%, 99.42%, 99.43%, 99.44%, 99.45%, 99.46%, 99.47%, 99.48%, 99.49%, 99.5%, 99.51%, 99.52%, 99.53%, 99.54%, 99.55%, 99.56%, 99.57%, 99.58%, 99.59%, 99.6%, 99.61%, 99.62%, 99.63%, 99.64%, 99.65%, 99.66%, 99.67%, 99.68%, 99.69%, 99.7%, 99.71%, 99.72%, 99.73%, 99.74%, 99.75%, 99.76%, 99.77%, 99.78%, 99.79%, 99.8%, 99.81%, 99.82%, 99.83%, 99.84%, 99.85%, 99.86%, 99.87%, 99.88%, 99.89%, 99.9%, 99.91%, 99.92%, 99.93%, 99.94%, 99.95%, 99.96%, 99.97%, 99.98%, 99.99%, or 100% (or any derivable range therein) similar, identical, or homologous with the genomic sequence of ΦER27 (SEQ ID NO:20 or SEQ ID NO:47).

[0147] In some aspects, a bacteriophage or composition thereof may comprise an isolated bacteriophage with greater than 95%, 96%, 97%, 98%, 99%, 99.1%, 99.2%, 99.3%, 99.4%, 99.5%, 99.6%, 99.7%, 99.8%, 99.9%, or 99.95% genomic sequence identity to the genomic sequence of ΦER27 (SEQ ID NO:20 or SEQ ID NO:47).

[0148] Variants or evolved bacteriophage derived from ΦER27 having a genome comprising, consisting, or consisting essentially of SEQ ID NO:20 or SEQ ID NO:47 are also contemplated as aspects of the methods and compositions disclosed herein.

### G. Bacteriophage ER36

[0149] Aspects of the present disclosure comprise, consist essentially of, or consist of bacteriophage ER36 (also “ΦER36,” used synonymously herein), compositions, kits, and devices comprising ΦER36, and methods for use. A ΦER36 genome is described by GENBANK® Accession Number ______, which is noted as 176,466 bp in length, and the sequence of which is incorporated herein by reference as SEQ ID NO:22 or SEQ ID NO:49. Comparing SEQ ID NO:22 to SEQ ID NO:49, SEQ ID NO:49 is a reorganization of the phage genome encoded by SEQ ID NO:22, including a different start site and excluding assembly artifacts.

[0150] In some aspects, a bacteriophage or composition thereof may comprise an isolated bacteriophage comprising ΦER36 (SEQ ID NO:22 or SEQ ID NO:49). In some aspects, a bacteriophage or composition thereof may comprise an isolated bacteriophage consisting essentially of ΦER36 (SEQ ID NO:22 or SEQ ID NO:49). In some aspects, a bacteriophage or composition thereof may comprise an isolated bacteriophage consisting of ΦER36 (SEQ ID NO: 22 or SEQ ID NO:49).

[0151] In some aspects, a bacteriophage may include at least, at most, or exactly 1, 2, 3, 4, 5, 6, 7, 8, 9, 10, 11, 12, 13, 14, 15, 16, 17, 18, 19, 20, 21, 22, 23, 24, 25, 26, 27, 28, 29, 30, 31, 32, 33, 34, 35, 36, 37, 38, 39, 40, 41, 42, 43, 44, 45, 46, 47, 48, 49, or 50 or more variant nucleotide substitutions to the genomic sequence of ER36 (SEQ ID NO:22 or SEQ ID NO: 49). In some aspects, a bacteriophage may be at least, at most, exactly, or between any two of 60%, 61%, 62%, 63%, 64%, 65%, 66%, 67%, 68%, 69%, 70%, 71%, 72%, 73%, 74%, 75%, 76%, 77%, 78%, 79%, 80%, 81%, 82%, 83%, 84%, 85%, 86%, 87%, 88%, 89%, 90%, 91%, 92%, 93%, 94%, 95%, 96%, 97%, 98%, 99%, 99.01%, 99.02%, 99.03%, 99.04%, 99.05%, 99.06%, 99.07%, 99.08%, 99.09%, 99.1%, 99.11%, 99.12%, 99.13%, 99.14%, 99.15%, 99.16%, 99.17%, 99.18%, 99.19%, 99.2%, 99.21%, 99.22%, 99.23%, 99.24%, 99.25%, 99.26%, 99.27%, 99.28%, 99.29%, 99.3%, 99.31%, 99.32%, 99.33%, 99.34%, 99.35%, 99.36%, 99.37%, 99.38%, 99.39%, 99.4%, 99.41%, 99.42%, 99.43%, 99.44%, 99.45%, 99.46%, 99.47%, 99.48%, 99.49%, 99.5%, 99.51%, 99.52%, 99.53%, 99.54%, 99.55%, 99.56%, 99.57%, 99.58%, 99.59%, 99.6%, 99.61%, 99.62%, 99.63%, 99.64%, 99.65%, 99.66%, 99.67%, 99.68%, 99.69%, 99.7%, 99.71%, 99.72%, 99.73%, 99.74%, 99.75%, 99.76%, 99.77%, 99.78%, 99.79%, 99.8%, 99.81%, 99.82%, 99.83%, 99.84%, 99.85%, 99.86%, 99.87%, 99.88%, 99.89%, 99.9%, 99.91%, 99.92%, 99.93%, 99.94%, 99.95%, 99.96%, 99.97%, 99.98%, 99.99%, or 100% (or any derivable range therein) similar, identical, or homologous with the genomic sequence of ΦER36 (SEQ ID NO:22 or SEQ ID NO:49).

[0152] In some aspects, a bacteriophage or composition thereof may comprise an isolated bacteriophage with greater than 95%, 96%, 97%, 98%, 99%, 99.1%, 99.2%, 99.3%, 99.4%, 99.5%, 99.6%, 99.7%, 99.8%, 99.9%, or 99.95% genomic sequence identity to the genomic sequence of ΦER36 (SEQ ID NO:22 or SEQ ID NO:49).

[0153] Variants or evolved bacteriophage derived from ΦER36 having a genome comprising, consisting, or consisting essentially of SEQ ID NO:22 or SEQ ID NO:49 are also contemplated as aspects of the methods and compositions disclosed herein.

### H. Bacteriophage ER39

[0154] Aspects of the present disclosure comprise, consist essentially of, or consist of bacteriophage ER39 (also “ΦER39,” used synonymously herein), compositions, kits, and devices comprising ΦER39, and methods for use. A ΦER39 genome is described by GENBANK® Accession Number ______, which is noted as 48, 196 bp in length, the sequence of which is incorporated herein by reference as SEQ ID NO:4, and GENBANK® Accession Number ______, which is noted as 48,149 bp in length, the sequence of which is incorporated herein by reference as SEQ ID NO:52. Comparing SEQ ID NO:4 to SEQ ID NO:39, SEQ ID NO: 39 is a reorganization of the phage genome encoded by SEQ ID NO:4, including a different start site and excluding assembly artifacts.

[0155] In some aspects, a bacteriophage or composition thereof may comprise an isolated bacteriophage comprising ΦER39 (SEQ ID NO:4 or SEQ ID NO:52). In some aspects, a bacteriophage or composition thereof may comprise an isolated bacteriophage consisting essentially of ΦER39 (SEQ ID NO:4 or SEQ ID NO:52). In some aspects, a bacteriophage or composition thereof may comprise an isolated bacteriophage consisting of ΦER39 (SEQ ID NO: 4 or SEQ ID NO:52).

[0156] In some aspects, a bacteriophage may include at least, at most, or exactly 1, 2, 3, 4, 5, 6, 7, 8, 9, 10, 11, 12, 13, 14, 15, 16, 17, 18, 19, 20, 21, 22, 23, 24, 25, 26, 27, 28, 29, 30, 31, 32, 33, 34, 35, 36, 37, 38, 39, 40, 41, 42, 43, 44, 45, 46, 47, 48, 49, or 50 or more variant nucleotide substitutions to the genomic sequence of ΦER39 (SEQ ID NO:4 or SEQ ID NO:52). In some aspects, a bacteriophage may be at least, at most, exactly, or between any two of 60%, 61%, 62%, 63%, 64%, 65%, 66%, 67%, 68%, 69%, 70%, 71%, 72%, 73%, 74%, 75%, 76%, 77%, 78%, 79%, 80%, 81%, 82%, 83%, 84%, 85%, 86%, 87%, 88%, 89%, 90%, 91%, 92%, 93%, 94%, 95%, 96%, 97%, 98%, 99%, 99.01%, 99.02%, 99.03%, 99.04%, 99.05%, 99.06%, 99.07%, 99.08%, 99.09%, 99.1%, 99.11%, 99.12%, 99.13%, 99.14%, 99.15%, 99.16%, 99.17%, 99.18%, 99.19%, 99.2%, 99.21%, 99.22%, 99.23%, 99.24%, 99.25%, 99.26%, 99.27%, 99.28%, 99.29%, 99.3%, 99.31%, 99.32%, 99.33%, 99.34%, 99.35%, 99.36%, 99.37%, 99.38%, 99.39%, 99.4%, 99.41%, 99.42%, 99.43%, 99.44%, 99.45%, 99.46%, 99.47%, 99.48%, 99.49%, 99.5%, 99.51%, 99.52%, 99.53%, 99.54%, 99.55%, 99.56%, 99.57%, 99.58%, 99.59%, 99.6%, 99.61%, 99.62%, 99.63%, 99.64%, 99.65%, 99.66%, 99.67%, 99.68%, 99.69%, 99.7%, 99.71%, 99.72%, 99.73%, 99.74%, 99.75%, 99.76%, 99.77%, 99.78%, 99.79%, 99.8%, 99.81%, 99.82%, 99.83%, 99.84%, 99.85%, 99.86%, 99.87%, 99.88%, 99.89%, 99.9%, 99.91%, 99.92%, 99.93%, 99.94%, 99.95%, 99.96%, 99.97%, 99.98%, 99.99%, or 100% (or any derivable range therein) similar, identical, or homologous with the genomic sequence of ΦER39 (SEQ ID NO:4 or SEQ ID NO:52).

[0157] In some aspects, a bacteriophage or composition thereof may comprise an isolated bacteriophage with greater than 95%, 96%, 97%, 98%, 99%, 99.1%, 99.2%, 99.3%, 99.4%, 99.5%, 99.6%, 99.7%, 99.8%, 99.9%, or 99.95% genomic sequence identity to the genomic sequence of ΦER39 (SEQ ID NO:4 or SEQ ID NO:52).

[0158] Variants or evolved bacteriophage derived from ΦER39 having a genome comprising, consisting, or consisting essentially of SEQ ID NO:4 or SEQ ID NO:52 are also contemplated as aspects of the methods and compositions disclosed herein.

### I. Bacteriophage ER43

[0159] Aspects of the present disclosure comprise, consist essentially of, or consist of bacteriophage ER43 (also “ΦER43,” used synonymously herein), compositions, kits, and devices comprising ΦER43, and methods for use. A ER43 genome is described by GENBANK® Accession Number ______, which is noted as 40,418 bp in length, and the sequence of which is incorporated herein by reference as SEQ ID NO:25 or SEQ ID NO:53. Comparing SEQ ID NO:25 to SEQ ID NO:53, SEQ ID NO:53 is a reorganization of the phage genome encoded by SEQ ID NO:25, including a different start site and excluding assembly artifacts.

[0160] In some aspects, a bacteriophage or composition thereof may comprise an isolated bacteriophage comprising ΦER43 (SEQ ID NO:25 or SEQ ID NO:53). In some aspects, a bacteriophage or composition thereof may comprise an isolated bacteriophage consisting essentially of ΦER43 (SEQ ID NO:25 or SEQ ID NO:53). In some aspects, a bacteriophage or composition thereof may comprise an isolated bacteriophage consisting of ΦER43 (SEQ ID NO: 25 or SEQ ID NO:53).

[0161] In some aspects, a bacteriophage may include at least, at most, or exactly 1, 2, 3, 4, 5, 6, 7, 8, 9, 10, 11, 12, 13, 14, 15, 16, 17, 18, 19, 20, 21, 22, 23, 24, 25, 26, 27, 28, 29, 30, 31, 32, 33, 34, 35, 36, 37, 38, 39, 40, 41, 42, 43, 44, 45, 46, 47, 48, 49, or 50 or more variant nucleotide substitutions to the genomic sequence of ΦER43 (SEQ ID NO:25 or SEQ ID NO: 53). In some aspects, a bacteriophage may be at least, at most, exactly, or between any two of 60%, 61%, 62%, 63%, 64%, 65%, 66%, 67%, 68%, 69%, 70%, 71%, 72%, 73%, 74%, 75%, 76%, 77%, 78%, 79%, 80%, 81%, 82%, 83%, 84%, 85%, 86%, 87%, 88%, 89%, 90%, 91%, 92%, 93%, 94%, 95%, 96%, 97%, 98%, 99%, 99.01%, 99.02%, 99.03%, 99.04%, 99.05%, 99.06%, 99.07%, 99.08%, 99.09%, 99.1%, 99.11%, 99.12%, 99.13%, 99.14%, 99.15%, 99.16%, 99.17%, 99.18%, 99.19%, 99.2%, 99.21%, 99.22%, 99.23%, 99.24%, 99.25%, 99.26%, 99.27%, 99.28%, 99.29%, 99.3%, 99.31%, 99.32%, 99.33%, 99.34%, 99.35%, 99.36%, 99.37%, 99.38%, 99.39%, 99.4%, 99.41%, 99.42%, 99.43%, 99.44%, 99.45%, 99.46%, 99.47%, 99.48%, 99.49%, 99.5%, 99.51%, 99.52%, 99.53%, 99.54%, 99.55%, 99.56%, 99.57%, 99.58%, 99.59%, 99.6%, 99.61%, 99.62%, 99.63%, 99.64%, 99.65%, 99.66%, 99.67%, 99.68%, 99.69%, 99.7%, 99.71%, 99.72%, 99.73%, 99.74%, 99.75%, 99.76%, 99.77%, 99.78%, 99.79%, 99.8%, 99.81%, 99.82%, 99.83%, 99.84%, 99.85%, 99.86%, 99.87%, 99.88%, 99.89%, 99.9%, 99.91%, 99.92%, 99.93%, 99.94%, 99.95%, 99.96%, 99.97%, 99.98%, 99.99%, or 100% (or any derivable range therein) similar, identical, or homologous with the genomic sequence of ΦER43 (SEQ ID NO:25 or SEQ ID NO:53).

[0162] In some aspects, a bacteriophage or composition thereof may comprise an isolated bacteriophage with greater than 95%, 96%, 97%, 98%, 99%, 99.1%, 99.2%, 99.3%, 99.4%, 99.5%, 99.6%, 99.7%, 99.8%, 99.9%, or 99.95% genomic sequence identity to the genomic sequence of ΦER43 (SEQ ID NO:25 or SEQ ID NO:53).

[0163] Variants or evolved bacteriophage derived from ΦER43 having a genome comprising, consisting, or consisting essentially of SEQ ID NO:25 or SEQ ID NO:53 are also contemplated as aspects of the methods and compositions disclosed herein.

### J. Bacteriophage ER46

[0164] Aspects of the present disclosure comprise, consist essentially of, or consist of bacteriophage ER46 (also “ΦER46,” used synonymously herein), compositions, kits, and devices comprising ΦER46, and methods for use. A ΦER46 genome is described by GENBANK® Accession Number ______, which is noted as 112,942 bp in length, the sequence of which is incorporated herein by reference as SEQ ID NO:5, and GENBANK® Accession Number ______, which is noted as 112,865 bp in length, the sequence of which is incorporated herein by reference as SEQ ID NO:56. Comparing SEQ ID NO:5 to SEQ ID NO:56, SEQ ID NO: 56 is a reorganization of the phage genome encoded by SEQ ID NO:5, including a different start site and excluding assembly artifacts.

[0165] In some aspects, a bacteriophage or composition thereof may comprise an isolated bacteriophage comprising ΦER46 (SEQ ID NO:5 or SEQ ID NO:56). In some aspects, a bacteriophage or composition thereof may comprise an isolated bacteriophage consisting essentially of ΦER46 (SEQ ID NO:5 or SEQ ID NO:56). In some aspects, a bacteriophage or composition thereof may comprise an isolated bacteriophage consisting of ΦER46 (SEQ ID NO: 5 or SEQ ID NO:56).

[0166] In some aspects, a bacteriophage may include at least, at most, or exactly 1, 2, 3, 4, 5, 6, 7, 8, 9, 10, 11, 12, 13, 14, 15, 16, 17, 18, 19, 20, 21, 22, 23, 24, 25, 26, 27, 28, 29, 30, 31, 32, 33, 34, 35, 36, 37, 38, 39, 40, 41, 42, 43, 44, 45, 46, 47, 48, 49, or 50 or more variant nucleotide substitutions to the genomic sequence of ΦER46 (SEQ ID NO:5 or SEQ ID NO:56). In some aspects, a bacteriophage may be at least, at most, exactly, or between any two of 60%, 61%, 62%, 63%, 64%, 65%, 66%, 67%, 68%, 69%, 70%, 71%, 72%, 73%, 74%, 75%, 76%, 77%, 78%, 79%, 80%, 81%, 82%, 83%, 84%, 85%, 86%, 87%, 88%, 89%, 90%, 91%, 92%, 93%, 94%, 95%, 96%, 97%, 98%, 99%, 99.01%, 99.02%, 99.03%, 99.04%, 99.05%, 99.06%, 99.07%, 99.08%, 99.09%, 99.1%, 99.11%, 99.12%, 99.13%, 99.14%, 99.15%, 99.16%, 99.17%, 99.18%, 99.19%, 99.2%, 99.21%, 99.22%, 99.23%, 99.24%, 99.25%, 99.26%, 99.27%, 99.28%, 99.29%, 99.3%, 99.31%, 99.32%, 99.33%, 99.34%, 99.35%, 99.36%, 99.37%, 99.38%, 99.39%, 99.4%, 99.41%, 99.42%, 99.43%, 99.44%, 99.45%, 99.46%, 99.47%, 99.48%, 99.49%, 99.5%, 99.51%, 99.52%, 99.53%, 99.54%, 99.55%, 99.56%, 99.57%, 99.58%, 99.59%, 99.6%, 99.61%, 99.62%, 99.63%, 99.64%, 99.65%, 99.66%, 99.67%, 99.68%, 99.69%, 99.7%, 99.71%, 99.72%, 99.73%, 99.74%, 99.75%, 99.76%, 99.77%, 99.78%, 99.79%, 99.8%, 99.81%, 99.82%, 99.83%, 99.84%, 99.85%, 99.86%, 99.87%, 99.88%, 99.89%, 99.9%, 99.91%, 99.92%, 99.93%, 99.94%, 99.95%, 99.96%, 99.97%, 99.98%, 99.99%, or 100% (or any derivable range therein) similar, identical, or homologous with the genomic sequence of ΦER46 (SEQ ID NO:5 or SEQ ID NO:56).

[0167] In some aspects, a bacteriophage or composition thereof may comprise an isolated bacteriophage with greater than 95%, 96%, 97%, 98%, 99%, 99.1%, 99.2%, 99.3%, 99.4%, 99.5%, 99.6%, 99.7%, 99.8%, 99.9%, or 99.95% genomic sequence identity to the genomic sequence of ΦER46 (SEQ ID NO:5 or SEQ ID NO:56).

[0168] Variants or evolved bacteriophage derived from ΦER46 having a genome comprising, consisting, or consisting essentially of SEQ ID NO:5 or SEQ ID NO:56 are also contemplated as aspects of the methods and compositions disclosed herein.

### K. Bacteriophage MM7

[0169] Aspects of the present disclosure comprise, consist essentially of, or consist of bacteriophage MM7 (also “ΦMM7,” used synonymously herein), compositions, kits, and devices comprising ΦMM7, and methods for use. A ΦMM7 genome is described by GENBANK® Accession Number ______, which is noted as 47,608 bp in length, and the sequence of which is incorporated herein by reference as SEQ ID NO:72.

[0170] In some aspects, a bacteriophage or composition thereof may comprise an isolated bacteriophage comprising ΦMM7 (SEQ ID NO:72). In some aspects, a bacteriophage or composition thereof may comprise an isolated bacteriophage consisting essentially of ΦMM7 (SEQ ID NO:72). In some aspects, a bacteriophage or composition thereof may comprise an isolated bacteriophage consisting of ΦMM7 (SEQ ID NO:72).

[0171] In some aspects, a bacteriophage may include at least, at most, or exactly 1, 2, 3, 4, 5, 6, 7, 8, 9, 10, 11, 12, 13, 14, 15, 16, 17, 18, 19, 20, 21, 22, 23, 24, 25, 26, 27, 28, 29, 30, 31, 32, 33, 34, 35, 36, 37, 38, 39, 40, 41, 42, 43, 44, 45, 46, 47, 48, 49, or 50 or more variant nucleotide substitutions to the genomic sequence of ΦMM7 (SEQ ID NO:72). In some aspects, a bacteriophage may be at least, at most, exactly, or between any two of 60%, 61%, 62%, 63%, 64%, 65%, 66%, 67%, 68%, 69%, 70%, 71%, 72%, 73%, 74%, 75%, 76%, 77%, 78%, 79%, 80%, 81%, 82%, 83%, 84%, 85%, 86%, 87%, 88%, 89%, 90%, 91%, 92%, 93%, 94%, 95%, 96%, 97%, 98%, 99%, 99.01%, 99.02%, 99.03%, 99.04%, 99.05%, 99.06%, 99.07%, 99.08%, 99.09%, 99.1%, 99.11%, 99.12%, 99.13%, 99.14%, 99.15%, 99.16%, 99.17%, 99.18%, 99.19%, 99.2%, 99.21%, 99.22%, 99.23%, 99.24%, 99.25%, 99.26%, 99.27%, 99.28%, 99.29%, 99.3%, 99.31%, 99.32%, 99.33%, 99.34%, 99.35%, 99.36%, 99.37%, 99.38%, 99.39%, 99.4%, 99.41%, 99.42%, 99.43%, 99.44%, 99.45%, 99.46%, 99.47%, 99.48%, 99.49%, 99.5%, 99.51%, 99.52%, 99.53%, 99.54%, 99.55%, 99.56%, 99.57%, 99.58%, 99.59%, 99.6%, 99.61%, 99.62%, 99.63%, 99.64%, 99.65%, 99.66%, 99.67%, 99.68%, 99.69%, 99.7%, 99.71%, 99.72%, 99.73%, 99.74%, 99.75%, 99.76%, 99.77%, 99.78%, 99.79%, 99.8%, 99.81%, 99.82%, 99.83%, 99.84%, 99.85%, 99.86%, 99.87%, 99.88%, 99.89%, 99.9%, 99.91%, 99.92%, 99.93%, 99.94%, 99.95%, 99.96%, 99.97%, 99.98%, 99.99%, or 100% (or any derivable range therein) similar, identical, or homologous with the genomic sequence of ΦMM7 (SEQ ID NO:72).

[0172] In some aspects, a bacteriophage or composition thereof may comprise an isolated bacteriophage with greater than 95%, 96%, 97%, 98%, 99%, 99.1%, 99.2%, 99.3%, 99.4%, 99.5%, 99.6%, 99.7%, 99.8%, 99.9%, or 99.95% genomic sequence identity to the genomic sequence of ΦMM7 (SEQ ID NO:72).

[0173] Variants or evolved bacteriophage derived from ΦMM7 having a genome comprising, consisting, or consisting essentially of SEQ ID NO:72 are also contemplated as aspects of the methods and compositions disclosed herein.

### L. Bacteriophage MM9

[0174] Aspects of the present disclosure comprise, consist essentially of, or consist of bacteriophage MM9 (also “ΦMM9,” used synonymously herein), compositions, kits, and devices comprising ΦMM9, and methods for use. A ΦMM9 genome is described by GENBANK® Accession Number ______, which is noted as 41,508 bp in length, and the sequence of which is incorporated herein by reference as SEQ ID NO:74.

[0175] In some aspects, a bacteriophage or composition thereof may comprise an isolated bacteriophage comprising ΦMM9 (SEQ ID NO:74). In some aspects, a bacteriophage or composition thereof may comprise an isolated bacteriophage consisting essentially of ΦMM9 (SEQ ID NO:74). In some aspects, a bacteriophage or composition thereof may comprise an isolated bacteriophage consisting of ΦMM9 (SEQ ID NO:74).

[0176] In some aspects, a bacteriophage may include at least, at most, or exactly 1, 2, 3, 4, 5, 6, 7, 8, 9, 10, 11, 12, 13, 14, 15, 16, 17, 18, 19, 20, 21, 22, 23, 24, 25, 26, 27, 28, 29, 30, 31, 32, 33, 34, 35, 36, 37, 38, 39, 40, 41, 42, 43, 44, 45, 46, 47, 48, 49, or 50 or more variant nucleotide substitutions to the genomic sequence of ΦMM9 (SEQ ID NO:74). In some aspects, a bacteriophage may be at least, at most, exactly, or between any two of 60%, 61%, 62%, 63%, 64%, 65%, 66%, 67%, 68%, 69%, 70%, 71%, 72%, 73%, 74%, 75%, 76%, 77%, 78%, 79%, 80%, 81%, 82%, 83%, 84%, 85%, 86%, 87%, 88%, 89%, 90%, 91%, 92%, 93%, 94%, 95%, 96%, 97%, 98%, 99%, 99.01%, 99.02%, 99.03%, 99.04%, 99.05%, 99.06%, 99.07%, 99.08%, 99.09%, 99.1%, 99.11%, 99.12%, 99.13%, 99.14%, 99.15%, 99.16%, 99.17%, 99.18%, 99.19%, 99.2%, 99.21%, 99.22%, 99.23%, 99.24%, 99.25%, 99.26%, 99.27%, 99.28%, 99.29%, 99.3%, 99.31%, 99.32%, 99.33%, 99.34%, 99.35%, 99.36%, 99.37%, 99.38%, 99.39%, 99.4%, 99.41%, 99.42%, 99.43%, 99.44%, 99.45%, 99.46%, 99.47%, 99.48%, 99.49%, 99.5%, 99.51%, 99.52%, 99.53%, 99.54%, 99.55%, 99.56%, 99.57%, 99.58%, 99.59%, 99.6%, 99.61%, 99.62%, 99.63%, 99.64%, 99.65%, 99.66%, 99.67%, 99.68%, 99.69%, 99.7%, 99.71%, 99.72%, 99.73%, 99.74%, 99.75%, 99.76%, 99.77%, 99.78%, 99.79%, 99.8%, 99.81%, 99.82%, 99.83%, 99.84%, 99.85%, 99.86%, 99.87%, 99.88%, 99.89%, 99.9%, 99.91%, 99.92%, 99.93%, 99.94%, 99.95%, 99.96%, 99.97%, 99.98%, 99.99%, or 100% (or any derivable range therein) similar, identical, or homologous with the genomic sequence of ΦMM9 (SEQ ID NO:74).

[0177] In some aspects, a bacteriophage or composition thereof may comprise an isolated bacteriophage with greater than 95%, 96%, 97%, 98%, 99%, 99.1%, 99.2%, 99.3%, 99.4%, 99.5%, 99.6%, 99.7%, 99.8%, 99.9%, or 99.95% genomic sequence identity to the genomic sequence of ΦMM9 (SEQ ID NO:74).

[0178] Variants or evolved bacteriophage derived from ΦMM9 having a genome comprising, consisting, or consisting essentially of SEQ ID NO:74 are also contemplated as aspects of the methods and compositions disclosed herein.

### M. Other Bacteriophages

[0179] A bacteriophage composition of the disclosure may comprise, in addition to one or more of ΦER3, ΦER11, ΦER12, ΦER15, ΦER16, ΦER27, ΦER36, ΦER39, ΦER43, ΦER46, ΦMM7, and ΦMM9, one or more additional bacteriophage (e.g., additional bacteriophage capable of infecting and/or lysing pathogenic Klebsiella, Staphylococcus, E. coli, Pseudomonas, etc.).

[0180] Aspects of the present disclosure can comprise additional bacteriophage ΦER1 (SEQ ID NO:6, SEQ ID NO:30), ΦER2 (SEQ ID NO:7, SEQ ID NO:31), ΦER4 (SEQ ID NO: 9, SEQ ID NO:33), ΦER5 (SEQ ID NO: 10), ΦER6 (SEQ ID NO:11), ΦER7/ΦER10 (SEQ ID NO: 12, SEQ ID NO:35), ΦER8 (SEQ ID NO: 13, SEQ ID NO:34), ΦER13 (SEQ ID NO: 15, SEQ ID NO:38), ΦER14 (SEQ ID NO:16, SEQ ID NO:39), ΦER18 (SEQ ID NO:17, SEQ ID NO: 42), ΦER20 (SEQ ID NO: 18, SEQ ID NO:43), ΦER21 (SEQ ID NO:44), ΦER22 (SEQ ID NO: 19, SEQ ID NO:45), ΦER23 (SEQ ID NO:46), ΦER32 (SEQ ID NO:21, SEQ ID NO: 48), ΦER37 (SEQ ID NO:23, SEQ ID NO:50), ΦER38 (SEQ ID NO:24, SEQ ID NO:51), ΦER44 (SEQ ID NO:26, SEQ ID NO:54), ΦER45 (SEQ ID NO:27, SEQ ID NO:55), ΦER47 (SEQ ID NO:57), ΦER48 (SEQ ID NO:58), ΦER49 (SEQ ID NO:28, SEQ ID NO:59), ΦER50 (SEQ ID NO:29, SEQ ID NO:60), ΦER51 (SEQ ID NO:61), ER52 (SEQ ID NO:62), ΦER53 (SEQ ID NO:63), ΦER54 (SEQ ID NO:64), ΦER55 (SEQ ID NO:65), ΦMM1 (SEQ ID NO: 66), ΦMM2 (SEQ ID NO:67), ΦMM3 (SEQ ID NO:68), ΦMM4 (SEQ ID NO:69), ΦMM5 (SEQ ID NO:70), ΦMM6 (SEQ ID NO:71), and ΦMM8 (SEQ ID NO:73), having genomes described by GENBANK® Accession Numbers respectively. Compositions, kits, and devices can comprise bacteriophage ΦER1 (SEQ ID NO:6, SEQ ID NO:30), ΦER2 (SEQ ID NO: 7, SEQ ID NO:31), ΦER4 (SEQ ID NO:9, SEQ ID NO:33), ΦER5 (SEQ ID NO:10), ΦER6 (SEQ ID NO:11), ΦER7/ΦER10 (SEQ ID NO:12, SEQ ID NO:35), ΦER8 (SEQ ID NO: 13, SEQ ID NO:34), ΦER13 (SEQ ID NO: 15, SEQ ID NO:38), ΦER14 (SEQ ID NO: 16, SEQ ID NO:39), ΦER18 (SEQ ID NO: 17, SEQ ID NO:42), ΦER20 (SEQ ID NO: 18, SEQ ID NO: 43), ΦER21 (SEQ ID NO:44), ΦER22 (SEQ ID NO: 19, SEQ ID NO:45), ΦER23 (SEQ ID NO: 46), ER32 (SEQ ID NO:21, SEQ ID NO:48), ΦER37 (SEQ ID NO:23, SEQ ID NO: 50), ΦER38 (SEQ ID NO:24, SEQ ID NO:51), ΦER44 (SEQ ID NO:26, SEQ ID NO:54), ΦER45 (SEQ ID NO:27, SEQ ID NO:55), ΦER47 (SEQ ID NO:57), ΦER48 (SEQ ID NO:58), ΦER49 (SEQ ID NO:28, SEQ ID NO:59), ΦER50 (SEQ ID NO:29, SEQ ID NO:60), ER51 (SEQ ID NO:61), ΦER52 (SEQ ID NO:62), ΦER53 (SEQ ID NO:63), ΦER54 (SEQ ID NO: 64), ER55 (SEQ ID NO:65), ΦMM1 (SEQ ID NO:66), ΦMM2 (SEQ ID NO:67), ΦMM3 (SEQ ID NO:68), ΦMM4 (SEQ ID NO:69), ΦMM5 (SEQ ID NO:70), ΦMM6 (SEQ ID NO: 71), and ΦMM8 (SEQ ID NO:73), having genomes described by GENBANK® Accession Numbers ______, respectively, and methods for use. In some aspects, any one or more of the foregoing bacteriophage may be excluded from the compositions and/or methods disclosed herein.

[0181] In some aspects, a bacteriophage or composition thereof may comprise an isolated bacteriophage comprising a genome provided any one of SEQ ID NOs: 6, 7, 9-13, 15-19, 21, 23, 24, 26-29, 30, 31, 33-35, 38, 39, 42-46, 48, 50, 51, 54, 55, 57-71, or 73. In some aspects, a bacteriophage or composition thereof may comprise an isolated bacteriophage consisting essentially of a genome provided any one of SEQ ID NOs: 6, 7, 9-13, 15-19, 21, 23, 24, 26-29, 30, 31, 33-35, 38, 39, 42-46, 48, 50, 51, 54, 55, 57-71, or 73. In some aspects, a bacteriophage or composition thereof may comprise an isolated bacteriophage consisting of a genome provided any one of SEQ ID NOs: 6, 7, 9-13, 15-19, 21, 23, 24, 26-29, 30, 31, 33-35, 38, 39, 42-46, 48, 50, 51, 54, 55, 57-71, or 73.

[0182] In some aspects, a bacteriophage may include at least, at most, or exactly 1, 2, 3, 4, 5, 6, 7, 8, 9, 10, 11, 12, 13, 14, 15, 16, 17, 18, 19, 20, 21, 22, 23, 24, 25, 26, 27, 28, 29, 30, 31, 32, 33, 34, 35, 36, 37, 38, 39, 40, 41, 42, 43, 44, 45, 46, 47, 48, 49, or 50 or more variant nucleotide substitutions to the genomic sequence of any one of SEQ ID NOs: 6, 7, 9-13, 15-19, 21, 23, 24, 26-29, 30, 31, 33-35, 38, 39, 42-46, 48, 50, 51, 54, 55, 57-71, or 73. In some aspects, a bacteriophage may be at least, at most, exactly, or between any two of 60%, 61%, 62%, 63%, 64%, 65%, 66%, 67%, 68%, 69%, 70%, 71%, 72%, 73%, 74%, 75%, 76%, 77%, 78%, 79%, 80%, 81%, 82%, 83%, 84%, 85%, 86%, 87%, 88%, 89%, 90%, 91%, 92%, 93%, 94%, 95%, 96%, 97%, 98%, 99%, 99.01%, 99.02%, 99.03%, 99.04%, 99.05%, 99.06%, 99.07%, 99.08%, 99.09%, 99.1%, 99.11%, 99.12%, 99.13%, 99.14%, 99.15%, 99.16%, 99.17%, 99.18%, 99.19%, 99.2%, 99.21%, 99.22%, 99.23%, 99.24%, 99.25%, 99.26%, 99.27%, 99.28%, 99.29%, 99.3%, 99.31%, 99.32%, 99.33%, 99.34%, 99.35%, 99.36%, 99.37%, 99.38%, 99.39%, 99.4%, 99.41%, 99.42%, 99.43%, 99.44%, 99.45%, 99.46%, 99.47%, 99.48%, 99.49%, 99.5%, 99.51%, 99.52%, 99.53%, 99.54%, 99.55%, 99.56%, 99.57%, 99.58%, 99.59%, 99.6%, 99.61%, 99.62%, 99.63%, 99.64%, 99.65%, 99.66%, 99.67%, 99.68%, 99.69%, 99.7%, 99.71%, 99.72%, 99.73%, 99.74%, 99.75%, 99.76%, 99.77%, 99.78%, 99.79%, 99.8%, 99.81%, 99.82%, 99.83%, 99.84%, 99.85%, 99.86%, 99.87%, 99.88%, 99.89%, 99.9%, 99.91%, 99.92%, 99.93%, 99.94%, 99.95%, 99.96%, 99.97%, 99.98%, 99.99%, or 100% (or any derivable range therein) similar, identical, or homologous with the genomic sequence of any one of SEQ ID NOs: 6, 7, 9-13, 15-19, 21, 23, 24, 26-29, 30, 31, 33-35, 38, 39, 42-46, 48, 50, 51, 54, 55, 57-71, or 73.

[0183] In some aspects, a bacteriophage or composition thereof may comprise an isolated bacteriophage with greater than 95%, 96%, 97%, 98%, 99%, 99.1%, 99.2%, 99.3%, 99.4%, 99.5%, 99.6%, 99.7%, 99.8%, 99.9%, or 99.95% genomic sequence identity to the genomic sequence of any one of SEQ ID NOs: 6, 7, 9-13, 15-19, 21, 23, 24, 26-29, 30, 31, 33-35, 38, 39, 42-46, 48, 50, 51, 54, 55, 57-71, or 73.

[0184] Variants or evolved bacteriophage derived from, e.g., ΦER1, ΦER2, ΦER4, ΦER5, ΦER6, ΦER7/ΦER10, ΦER8, ΦER13, ΦER14, ER18, ΦER20, ΦER21, ER22, ΦER23, ΦER32, ΦER37, ΦER38, ΦER44, ΦER45, ΦER47, ΦER48, ΦER49, ΦER50, ΦER51, ΦER52, ΦER53, ΦER54, ΦER55, ΦMM1, ΦMM2, ΦMM3, ΦMM4, ΦMM5, ΦMM6, and ΦMM8, having genomes comprising, consisting, or consisting essentially of any one or more of SEQ ID NOs: 6, 7, 9-13, 15-19, 21, 23, 24, 26-29, 30, 31, 33-35, 38, 39, 42-46, 48, 50, 51, 54, 55, 57-71, or 73, are also contemplated as aspects of the methods and compositions disclosed herein.

[0185] Aspects of methods and compositions the present disclosure can include at least, at most, or exactly 1, 2, 3, 4, 5, 6, 7, 8, 9, 10, 11, 12, 13, 14, 15, 16, 17, 18, 19, 20, 21, 22, 23, 24, 25, 26, 27, 28, 29, 30, 31, 32, 33, 34, 35, 36, 37, 38, 39, 40, 41, 42, 43, 44, 45, 46, 47, 48, 49, 50, 51, 52, 53, 54, 55, 56, 57, 58, 59, 60, 61, 62, 63, 64, 65, 66, 67, 68, 69, 70, 71, 72, 73, or 74 of the following bacteriophage having genomes comprising, consisting essentially of, or consisting of any of SEQ ID NOs: 1-74: ΦER1, ΦER2, ΦER3, ΦER4, ΦER5, ΦER6, ΦER7/ΦER10, ΦER8, ΦER11, ΦER12, ΦER13, ΦER14, ΦER15, ΦER16, ΦER18, ΦER20, ΦER21, ΦER22, ΦER23, ΦER27, ΦER32, ΦER36, ΦER37, ΦER38, ΦER39, ΦER43, ΦER44, ΦER45, ΦER46, ΦER47, ΦER48, ΦER49, ΦER50, ΦER51, ΦER52, ΦER53, ΦER54, ΦER55, ΦMM1, ΦMM2, ΦMM3, ΦMM4, ΦMM5, ΦMM6, ΦMM7, ΦMM8, and/or ΦMM9. It is contemplated that 1, 2, 3, 4, 5, 6, 7, 8, 9, 10, or more additional bacteriophage not included in list could be included in further aspects of additional compositions and methods.

[0186] Further bacteriophage contemplated herein include, but are not limited to, bacteriophages described in, e.g., Herridge W. P. et al., “Bacteriophages of Klebsiella spp., their diversity and potential therapeutic uses,” J. Med. Microbiol. 2020 February; 69 (2): 176-194, and bacteriophages EC1, CF2, ES12, ES21, ES26, HP3, and ES17 described in, e.g., Gibson S. B. et al. “Constructing and Characterizing Bacteriophage Libraries for Phage Therapy of Human Infections,” Front. Microbiol. 2019; 10:2537, each of which are incorporated herein by reference in their entirety.

### II. Treatment and Prevention of Bacterial Infection

[0187] Aspects of the present disclosure are directed to methods for treatment and prevention of a bacterial infection in an individual. In some aspects, disclosed are methods for treatment or prevention of a Klebsiella infection in an individual. In some aspects, disclosed are methods for treatment or prevention of a Klebsiella pneumoniae (K. pneumoniae) infection in an individual. In some aspects, disclosed are methods for treatment or prevention of a Klebsiella quasipneumoniae (K. quasipneumoniae) infection in an individual. In some aspects, disclosed are methods for treatment or prevention of a Klebsiella variicola (K. variicola) infection in an individual. In some aspects, disclosed are methods for treatment or prevention of a multidrug-resistant (MDR) Klebsiella infection in an individual. In some aspects, disclosed are methods for treatment or prevention of a hypervirulent Klebsiella infection in an individual. In particular aspects, the present disclosure provides methods for treatment or prevention of a Klebsiella infection in an individual comprising administering to the individual an effective amount of one or more bacteriophage, including bacteriophage disclosed herein.

[0188] Bacteriophage useful for such treatment methods include those described herein, e.g., ΦER1, ΦER2, ΦER3, ΦER4, ΦER5, ΦER6, ΦER7/ΦER10, ΦER8, ΦER11, ΦER12, ΦER13, ΦER14, ΦER15, ΦER16, ΦER18, ΦER20, ΦER21, ΦER22, ΦER23, ΦER27, ΦER32, ΦER36, ΦER37, ΦER38, ΦER39, ΦER43, ΦER44, ER45, ΦER46, ΦER47, ΦER48, ΦER49, ΦER50, ΦER51, ΦER52, ΦER53, ΦER54, ΦER55, ΦMM1, ΦMM2, ΦMM3, ΦMM4, ΦMM5, ΦMM6, ΦMM7, ΦMM8, and/or ΦMM9. In some aspects, any one or more of the foregoing bacteriophage can be excluded from a treatment method disclosed herein. In some aspects, ΦER3, ΦER11, ΦER12, ΦER15, ΦER16, ΦER27, ER36, ΦER39, ΦER43, ΦER46, ΦMM7, and/or ΦMM9 are useful for such treatment methods. In specific aspects, In some aspects, bacteriophage useful for such treatment methods include ΦER12, ΦER15, ΦER16, ΦER39, and ΦER46, or any combination thereof. Any one or more of the foregoing bacteriophage can be excluded from a treatment method disclosed herein. In some aspects, bacteriophage useful for such treatment methods include ΦER3, ΦER11, ΦER27, ΦER36, and ΦMM9, or any combination thereof. Any one or more of the foregoing bacteriophage can be excluded from a treatment method disclosed herein. In some aspects, bacteriophage useful for such treatment methods include ΦER15, ΦER27, ΦER43, ΦER46, and ΦMM7, or any combination thereof. Any one or more of the foregoing bacteriophage can be excluded from a treatment method disclosed herein.

[0189] In certain aspects, compositions and/or methods described herein are utilized to reduce Klebsiella carriage by an individual and/or in an environment (e.g., reducing the level of one or more drug-resistant, hypervirulent, and/or pathogenic Klebsiella strains in an individual and/or in an environment). In certain aspects, reduction of Klebsiella carriage is an infection preventative measure.

[0190] Accordingly, in some aspects, disclosed herein is a method for treatment or prevention of a Klebsiella infection in an individual comprising administering to the individual an effective amount of any one or more of ΦER1, ΦER2, ΦER3, ΦER4, ΦER5, ΦER6, ΦER7/ΦER10, ΦER8, ΦER11, ΦER12, ΦER13, ΦER14, ΦER15, ΦER16, ΦER18, ΦER20, ΦER21, ΦER22, ΦER23, ΦER27, ΦER32, ΦER36, ΦER37, ΦER38, ΦER39, ΦER43, ΦER44, ΦER45, ΦER46, ΦER47, ΦER48, ΦER49, ΦER50, ΦER51, ΦER52, ΦER53, ΦER54, ΦER55, ΦMM1, ΦMM2, ΦMM3, ΦMM4, ΦMM5, ΦMM6, ΦMM7, ΦMM8, and/or ΦMM9. In some aspects, disclosed herein is a method for treatment or prevention of a Klebsiella infection in an individual comprising administering to the individual an effective amount of ΦER3, ER11, ΦER12, ΦER15, ΦER16, ΦER27, ΦER36, ΦER39, ΦER43, ΦER46, ΦMM7, and/or ΦMM9, or one or more compositions thereof. Any one or more of the foregoing bacteriophage can be excluded from a method for treatment or prevention of a Klebsiella infection disclosed herein.

[0191] In specific aspects, a method for treatment or prevention of a Klebsiella infection in an individual comprises administering to the individual an effective amount of any one or more of ΦER3, ΦER11, ΦER12, ΦER15, ΦER16, ΦER27, ER36, ΦER39, ΦER43, ΦER46, ΦMM7, and/or ΦMM9, or one or more compositions thereof. In some aspects, the method comprises administering ΦER3 or a composition thereof. In some aspects, the method comprises administering ΦER11 or a composition thereof. In some aspects, the method comprises administering ΦER12 or a composition thereof. In some aspects, the method comprises administering ΦER15 or a composition thereof. In some aspects, the method comprises administering ΦER16 or a composition thereof. In some aspects, the method comprises administering ΦER27 or a composition thereof. In some aspects, the method comprises administering ΦER36 or a composition thereof. In some aspects, the method comprises administering ΦER39 or a composition thereof. In some aspects, the method comprises administering ΦER43 or a composition thereof. In some aspects, the method comprises administering ΦER46 or a composition thereof. In some aspects, the method comprises administering ΦER49 or a composition thereof. In some aspects, the method comprises administering ΦMM7 or a composition thereof. In some aspects, the method comprises administering ΦMM9 or a composition thereof.

[0192] In some aspects, the method comprises administering two or more of ΦER3, ΦER11, ΦER12, ΦER15, ΦER16, ΦER27, ΦER36, ΦER39, ΦER43, ΦER46, MM7, and/or ΦMM9, or one or more compositions thereof. In some aspects, the method comprises administering three or more of ΦER3, ΦER11, ΦER12, ΦER15, ΦER16, ΦER27, ΦER36, ΦER39, ΦER43, ΦER46, ΦMM7, and/or ΦMM9, or one or more compositions thereof. In some aspects, the method comprises administering four or more of ΦER3, ΦER11, ΦER12, ΦER15, ΦER16, ΦER27, ΦER36, ΦER39, ΦER43, ΦER46, ΦMM7, and/or ΦMM9, or one or more compositions thereof.

[0193] In some aspects, the method comprises administering two or more of ΦER12, ΦER15, ΦER16, ΦER39, ΦER46, or any combination thereof, or one or more compositions thereof. In some aspects, the method comprises administering three or more of ΦER12, ΦER15, ΦER16, ΦER39, ΦER46, or any combination thereof, or one or more compositions thereof. In some aspects, the method comprises administering four or more of ΦER12, ΦER15, ΦER16, ΦER39, ΦER46, or any combination thereof, or one or more compositions thereof.

[0194] In some aspects, the method comprises administering two or more of ΦER3, ΦER11, ΦER27, ΦER36, ΦMM9, or any combination thereof, or one or more compositions thereof. In some aspects, the method comprises administering three or more of ΦER3, ΦER11, ΦER27, ΦER36, ΦMM9, or any combination thereof, or one or more compositions thereof. In some aspects, the method comprises administering four or more of ΦER3, ΦER11, ΦER27, ΦER36, ΦMM9, or any combination thereof, or one or more compositions thereof.

[0195] In some aspects, the method comprises administering two or more of ΦER15, ΦER27, ΦER43, ΦER46, ΦMM7, or any combination thereof, or one or more compositions thereof. In some aspects, the method comprises administering three or more of ΦER15, ΦER27, ΦER43, ΦER46, ΦMM7, or any combination thereof, or one or more compositions thereof. In some aspects, the method comprises administering four or more of ΦER15, ΦER27, ΦER43, ΦER46, ΦMM7, or any combination thereof, or one or more compositions thereof.

[0196] In some aspects, the method comprises administering one of the bacteriophage combinations of Table 1, other bacteriophage combinations completed herein, or one or more compositions thereof.

[0197] In some aspects, multiple bacteriophage (e.g., two or more of ΦER3, ΦER11, ΦER12, ΦER15, ΦER16, ΦER27, ΦER36, ΦER39, ΦER43, ΦER46, ΦMM7, and/or ΦMM9) are administered to an individual in the same formulation. Alternatively, multiple bacteriophage may be administered to an individual in different formulations (e.g., 2, 3, 4, 5, or more formulations). Multiple bacteriophage may be administered to an individual at the same time or may be administered at different times.

[0198] Multiple bacteriophage may be administered to an individual substantially simultaneously, for example via a single composition. For example, any two or more of ΦER3, ΦER11, ΦER12, ΦER15, ΦER16, ΦER27, ΦER36, ΦER39, ΦER43, ΦER46, ΦMM7, and/or ΦMM9, may be administered to an individual having a pathogenic Klebsiella infection at the same time, as a single composition. Any one or more of the foregoing bacteriophage can be excluded from a single composition disclosed herein.

[0199] Multiple bacteriophage may be administered to an individual sequentially in any order. For example, an individual having a pathogenic Klebsiella infection may be administered any two or more of ΦER3, ΦER11, ΦER12, ΦER15, ΦER16, ΦER27, ΦER36, ΦER39, ΦER43, ΦER46, ΦMM7, and/or ΦMM9, in any order.

[0200] Example administration sequences for ΦER12, ΦER15, ΦER16, ΦER39, and/or ΦER46 include: ΦER12 and ΦER15; ΦER15 and ΦER12; ΦER12 and ΦER16; ΦER16 and ΦER12; ΦER12 and ΦER39; ΦER39 and ΦER12; ΦER12 and ΦER46; ΦER46 and ΦER12; ΦER12, ΦER15, and ΦER16; ΦER12, ΦER16, and ΦER15; ΦER15, ΦER12, and ΦER16; ΦER15, ΦER16, and ΦER12; ΦER16, ΦER12, and ΦER15; ΦER16, ΦER15, and ΦER12; ΦER12, ΦER15, and 39; ΦER12, ΦER39, and ΦER15; ΦER15, ΦER12, and ΦER39; ΦER15, ΦER39, and ΦER12; ΦER39, ΦER12, and ΦER15; ΦER39, ΦER15, and ΦER12; ΦER12, ΦER15, and 46; ΦER12, ΦER46, and ΦER15; ΦER15, ΦER12, and ΦER46; ΦER15, ΦER46, and ΦER12; ΦER46, ΦER12, and ΦER15; ΦER46, ΦER15, and ER12; ΦER12, ΦER16, and 39; ΦER12, ΦER39, and ΦER16; ΦER16, ΦER12, and ΦER39; ΦER16, ΦER39, and ΦER12; ΦER39, ΦER12, and ΦER16; ΦER39, ΦER16, and ΦER12; ΦER12, ΦER16, and 46; ΦER12, ΦER46, and ΦER16; ΦER16, ΦER12, and ΦER46; ΦER16, ΦER46, and ΦER12; ΦER46, ΦER12, and ΦER16; ΦER46, ΦER16, and ΦER12; ΦER12, ΦER36, and 46; ΦER12, ΦER46, and ΦER36; ΦER36, ΦER12, and ΦER46; ΦER36, ΦER46, and ΦER12; ΦER46, ΦER12, and ΦER36; ΦER46, ΦER36, and ΦER12; ΦER12, ΦER15, ΦER16, and ΦER39; ΦER12, ΦER15, ΦER39, and ΦER16; ΦER12, ΦER16, ΦER39, and ΦER15; ΦER12, ΦER16, ΦER15, and ΦER39; ΦER12, ΦER39, ΦER15, and ΦER16; ΦER12, ΦER39, ΦER16, and ΦER15; ΦER15, ΦER12, ΦER16, and ΦER39; ΦER15, ΦER12, ΦER39, and ΦER16; ΦER15, ΦER16, ΦER39, and ΦER12; ΦER15, ΦER16, ΦER12, and ΦER39; ΦER15, ΦER39, ΦER11, and ΦER16; ΦER15, ΦER39, ΦER16, and ΦER12; ΦER16, ΦER15, ΦER12, and ΦER39; ΦER16, ΦER15, ΦER39, and ΦER12; ΦER16, ΦER12, ΦER39, and ΦER15; ΦER16, ΦER12, ΦER15, and ΦER39; ΦER16, ΦER39, ΦER15, and ΦER12; ΦER16, ΦER39, ΦER12, and ΦER15; ΦER39, ΦER15, ΦER16, and ΦER12; ΦER39, ΦER15, ΦER12, and ΦER16; ΦER39, ΦER16, ΦER12, and ΦER15; ΦER39, ΦER16, ΦER15, and ΦER12; ΦER39, ΦER12, ΦER15, and ΦER16; ΦER39, ΦER12, ΦER16, and ΦER15; ΦER12, ΦER15, ΦER16, and ΦER46; ΦER12, ΦER15, ΦER46, and ΦER16; ΦER12, ΦER16, ΦER46, and ΦER15; ΦER12, ΦER16, ΦER15, and ΦER46; ΦER12, ΦER46, ΦER15, and ΦER16; ΦER12, ΦER46, ΦER16, and ΦER15; ΦER15, ΦER12, ΦER16, and ΦER46; ΦER15, ΦER12, ΦER46, and ΦER16; ΦER15, ΦER16, ΦER46, and ΦER12; ΦER15, ΦER16, ΦER12, and ΦER46; ΦER15, ΦER46, ΦER11, and ΦER16; ΦER15, ΦER46, ΦER16, and ΦER12; ΦER16, ΦER15, ΦER12, and ΦER46; ΦER16, ΦER15, ΦER46, and ΦER12; ΦER16, ΦER12, ΦER46, and ΦER15; ΦER16, ΦER12, ΦER15, and ΦER46; ΦER16, ΦER46, ΦER15, and ΦER12; ΦER16, ΦER46, ΦER12, and ΦER15; ΦER46, ΦER15, ΦER16, and ΦER12; ΦER46, ΦER15, ΦER12, and ΦER16; ΦER46, ΦER16, ΦER12, and ΦER15; ΦER46, ΦER16, ΦER15, and ΦER12; ΦER46, ΦER12, ΦER15, and ΦER16; ΦER46, ΦER12, ΦER16, and ΦER15; ΦER12, ΦER15, ΦER39, and ΦER46; ΦER12, ΦER15, ΦER46, and ΦER39; ΦER12, ΦER39, ΦER46, and ΦER15; ΦER12, ΦER39, ΦER15, and ΦER46; ΦER12, ΦER46, ΦER15, and ΦER39; ΦER12, ΦER46, ΦER39, and ΦER15; ΦER15, ΦER12, ΦER39, and ΦER46; ΦER15, ΦER12, ΦER46, and ΦER39; ΦER15, ΦER39, ΦER46, and ΦER12; ΦER15, ΦER39, ΦER12, and ΦER46; ΦER15, ΦER46, ΦER11, and ΦER39; ΦER15, ΦER46, ΦER39, and ΦER12; ΦER39, ΦER15, ΦER12, and ΦER46; ΦER39, ΦER15, ΦER46, and ΦER12; ΦER39, ΦER12, ΦER46, and ΦER15; ΦER39, ΦER12, ΦER15, and ΦER46; ΦER39, ΦER46, ΦER15, and ΦER12; ΦER39, ΦER46, ΦER12, and ΦER15; ΦER46, ΦER15, ΦER39, and ΦER12; ΦER46, ΦER15, ΦER12, and ΦER39; ΦER46, ΦER39, ΦER12, and ΦER15; ΦER46, ΦER39, ΦER15, and ΦER12; ΦER46, ΦER12, ΦER15, and ΦER39; ΦER46, ΦER12, ΦER39, and ΦER15; ΦER12, ΦER16, ΦER39, and ΦER46; ΦER12, ΦER16, ΦER46, and ΦER39; ΦER12, ΦER39, ΦER46, and ΦER16; ΦER12, ΦER39, ΦER16, and ΦER46; ΦER12, ΦER46, ΦER16, and ΦER39; ΦER12, ΦER46, ΦER39, and ΦER16; ΦER16, ΦER12, ΦER39, and ΦER46; ΦER16, ΦER12, ΦER46, and ΦER39; ΦER16, ΦER39, ΦER46, and ΦER12; ΦER16, ΦER39, ΦER12, and ΦER46; ΦER16, ΦER46, ΦER11, and ΦER39; ΦER16, ΦER46, ΦER39, and ΦER12; ΦER39, ΦER16, ΦER12, and ΦER46; ΦER39, ΦER16, ΦER46, and ΦER12; ΦER39, ΦER12, ΦER46, and ΦER16; ΦER39, ΦER12, ΦER16, and ΦER46; ΦER39, ΦER46, ΦER16, and ΦER12; ΦER39, ΦER46, ΦER12, and ΦER16; ΦER46, ΦER16, ΦER39, and ΦER12; ΦER46, ΦER16, ΦER12, and ΦER39; ΦER46, ΦER39, ΦER12, and ΦER16; ΦER46, ΦER39, ΦER16, and ΦER12; ΦER46, ΦER12, ΦER16, and ΦER39; ΦER46, ΦER12, ΦER39, and ΦER16; ΦER12, ΦER15, ΦER16, ΦER39, and ΦER46; ΦER12, ΦER16, ΦER39, ΦER46, and ΦER15; ΦER12, ΦER39, ΦER46, ΦER15, and ΦER16; ΦER12, ΦER46, ΦER15, ΦER16, and ΦER39; ΦER12, ΦER16, ΦER15, ΦER39, and ΦER46; ΦER12, ΦER15, ΦER39, ΦER46, and ΦER16; ΦER12, ΦER39, ΦER46, ΦER16, and ΦER15; ΦER12, ΦER46, ΦER16, ΦER15, and ΦER39; ΦER12, ΦER39, ΦER16, ΦER15, and ΦER46; ΦER12, ΦER16, ΦER15, ΦER46, and ΦER39; ΦER12, ΦER15, ΦER46, ΦER39, and ΦER16; ΦER12, ΦER46, ΦER39, ΦER16, and ΦER15; ΦER12, ΦER46, ΦER16, ΦER39, and ΦER15; ΦER12, ΦER16, ΦER39, ΦER15, and ΦER46; ΦER12, ΦER39, ΦER15, ΦER46, and ΦER16; ΦER12, ΦER15, ΦER46, ΦER16, and ΦER39; ΦER12, ΦER15, ΦER39, ΦER16, and ΦER46; ΦER12, ΦER39, ΦER16, ΦER46, and ΦER15; ΦER12, ΦER16, ΦER46, ΦER15, and ΦER39; ΦER12, ΦER46, ΦER15, ΦER39, and ΦER16; ΦER12, ΦER15, ΦER46, ΦER39, and ΦER16; ΦER12, ΦER46, ΦER39, ΦER16, and ΦER15; ΦER12, ΦER39, ΦER16, ΦER15, and ΦER46; ΦER12, ΦER16, ΦER15, ΦER46, and ΦER39; ΦER12, ΦER15, ΦER16, ΦER46, and ΦER39; ΦER12, ΦER16, ΦER46, ΦER39, and ΦER15; ΦER12, ΦER46, ΦER39, ΦER15, and ΦER16; ΦER12, ΦER39, ΦER15, ΦER16, and ΦER46; ΦER15, ΦER12, ΦER16, ΦER39, and ΦER46; ΦER15, ΦER16, ΦER39, ΦER46, and ΦER12; ΦER15, ΦER39, ΦER46, ΦER12, and ΦER16; ΦER15, ΦER46, ΦER12, ΦER16, and ΦER39; ΦER15, ΦER16, ΦER12, ΦER39, and ΦER46; ΦER15, ΦER12, ΦER39, ΦER46, and ΦER16; ΦER15, ΦER39, ΦER46, ΦER16, and ΦER12; ΦER15, ΦER46, ΦER16, ΦER12, and ΦER39; ΦER15, ΦER39, ΦER16, ΦER12, and ΦER46; ΦER15, ΦER16, ΦER12, ΦER46, and ΦER39; ΦER15, ΦER12, ΦER46, ΦER39, and ΦER16; ΦER15, ΦER46, ΦER39, ΦER16, and ΦER12; ΦER15, ΦER46, ΦER16, ΦER39, and ΦER12; ΦER15, ΦER16, ΦER39, ΦER12, and ΦER46; ΦER15, ΦER39, ΦER12, ΦER46, and ΦER16; ΦER15, ΦER12, ΦER46, ΦER16, and ΦER39; ΦER15, ΦER12, ΦER39, ΦER16, and ΦER46; ΦER15, ΦER39, ΦER16, ΦER46, and ΦER12; ΦER15, ΦER16, ΦER46, ΦER12, and ΦER39; ΦER15, ΦER46, ΦER12, ΦER39, and ΦER16; ΦER15, ΦER12, ΦER46, ΦER39, and ΦER16; ΦER15, ΦER46, ΦER39, ΦER16, and ΦER12; ΦER15, ΦER39, ΦER16, ΦER12, and ΦER46; ΦER15, ΦER16, ΦER12, ΦER46, and ΦER39; ΦER15, ΦER12, ΦER16, ΦER46, and ΦER39; ΦER15, ΦER16, ΦER46, ΦER39, and ΦER12; ΦER15, ΦER46, ΦER39, ΦER12, and ΦER16; ΦER15, ΦER39, ΦER12, ΦER16, and ΦER46; ΦER16, ΦER15, ΦER12, ΦER39, and ΦER46; ΦER16, ΦER12, ΦER39, ΦER46, and ΦER15; ΦER16, ΦER39, ΦER46, ΦER15, and ΦER12; ΦER16, ΦER46, ΦER15, ΦER12, and ΦER39; ΦER16, ΦER12, ΦER15, ΦER39, and ΦER46; ΦER16, ΦER15, ΦER39, ΦER46, and ΦER12; ΦER16, ΦER39, ΦER46, ΦER12, and ΦER15; ΦER16, ΦER46, ΦER12, ΦER15, and ΦER39; ΦER16, ΦER39, ΦER12, ΦER15, and ΦER46; ΦER16, ΦER12, ΦER15, ΦER46, and ΦER39; ΦER16, ΦER15, ΦER46, ΦER39, and ΦER12; ΦER16, ΦER46, ΦER39, ΦER12, and ΦER15; ΦER16, ΦER46, ΦER12, ΦER39, and ΦER15; ΦER16, ΦER12, ΦER39, ΦER15, and ΦER46; ΦER16, ΦER39, ΦER15, ΦER46, and ΦER12; ΦER16, ΦER15, ΦER46, ΦER12, and ΦER39; ΦER16, ΦER15, ΦER39, ΦER12, and ΦER46; ΦER16, ΦER39, ΦER12, ΦER46, and ΦER15; ΦER16, ΦER12, ΦER46, ΦER15, and ΦER39; ΦER16, ΦER46, ΦER15, ΦER39, and ΦER12; ΦER16, ΦER15, ΦER46, ΦER39, and ΦER12; ΦER16, ΦER46, ΦER39, ΦER12, and ΦER15; ΦER16, ΦER39, ΦER12, ΦER15, and ΦER46; ΦER16, ΦER12, ΦER15, ΦER46, and ΦER39; ΦER16, ΦER15, ΦER12, ΦER46, and ΦER39; ΦER16, ΦER12, ΦER46, ΦER39, and ΦER15; ΦER16, ΦER46, ΦER39, ΦER15, and ΦER12; ΦER16, ΦER39, ΦER15, ΦER12, and ΦER46; ΦER39, ΦER15, ΦER16, ΦER12, and ΦER46; ΦER39, ΦER16, ΦER12, ΦER46, and ΦER15; ΦER39, ΦER12, ΦER46, ΦER15, and ΦER16; ΦER39, ΦER46, ΦER15, ΦER16, and ΦER12; ΦER39, ΦER16, ΦER15, ΦER12, and ΦER46; ΦER39, ΦER15, ΦER12, ΦER46, and ΦER16; ΦER39, ΦER12, ΦER46, ΦER16, and ΦER15; ΦER39, ΦER46, ΦER16, ΦER15, and ΦER12; ΦER39, ΦER12, ΦER16, ΦER15, and ΦER46; ΦER39, ΦER16, ΦER15, ΦER46, and ΦER12; ΦER39, ΦER15, ΦER46, ΦER12, and ΦER16; ΦER39, ΦER46, ΦER12, ΦER16, and ΦER15; ΦER39, ΦER46, ΦER16, ER12, and ΦER15; ΦER39, ΦER16, ΦER12, ΦER15, and ΦER46; ΦER39, ΦER12, ΦER15, ΦER46, and ΦER16; ΦER39, ΦER15, ΦER46, ΦER16, and ΦER12; ΦER39, ΦER15, ΦER12, ΦER16, and ΦER46; ΦER39, ΦER12, ΦER16, ΦER46, and ΦER15; ΦER39, ΦER16, ΦER46, ΦER15, and ΦER12; ΦER39, ΦER46, ΦER15, ΦER12, and ΦER16; ΦER39, ΦER15, ΦER46, ΦER12, and ΦER16; ΦER39, ΦER46, ΦER12, ΦER16, and ΦER15; ΦER39, ΦER12, ΦER16, ΦER15, and ΦER46; ΦER39, ΦER16, ΦER15, ΦER46, and ΦER12; ΦER39, ΦER15, ΦER16, ΦER46, and ΦER12; ΦER39, ΦER16, ΦER46, ΦER12, and ΦER15; ΦER39, ΦER46, ΦER12, ΦER15, and ΦER16; ΦER39, ΦER12, ΦER15, ΦER16, and ΦER46; ΦER46, ΦER15, ΦER16, ΦER39, and ΦER12; ΦER46, ΦER16, ΦER39, ΦER12, and ΦER15; ΦER46, ΦER39, ΦER12, ΦER15, and ΦER16; ΦER46, ΦER12, ΦER15, ΦER16, and ΦER39; ΦER46, ΦER16, ΦER15, ΦER39, and ΦER12; ΦER46, ΦER15, ΦER39, ΦER12, and ΦER16; ΦER46, ΦER39, ΦER12, ΦER16, and ΦER15; ΦER46, ΦER12, ΦER16, ΦER15, and ΦER39; ΦER46, ΦER39, ΦER16, ΦER15, and ΦER12; ΦER46, ΦER16, ΦER15, ΦER12, and ΦER39; ΦER46, ΦER15, ΦER12, ΦER39, and ΦER16; ΦER46, ΦER12, ΦER39, ΦER16, and ΦER15; ΦER46, ΦER12, ΦER16, ΦER39, and ΦER15; ΦER46, ΦER16, ΦER39, ΦER15, and ΦER12; ΦER46, ΦER39, ΦER15, ΦER12, and ΦER16; ΦER46, ΦER15, ΦER12, ΦER16, and ΦER39; ΦER46, ΦER15, ΦER39, ΦER16, and ΦER12; ΦER46, ΦER39, ΦER16, ΦER12, and ΦER15; ΦER46, ΦER16, ΦER12, ΦER15, and ΦER39; ΦER46, ΦER12, ΦER15, ΦER39, and ΦER16; ΦER46, ΦER15, ΦER12, ΦER39, and ΦER16; ΦER46, ΦER12, ΦER39, ΦER16, and ΦER15; ΦER46, ΦER39, ΦER16, ΦER15, and ΦER12; ΦER46, ΦER16, ΦER15, ΦER12, and ΦER39; ΦER46, ΦER15, ΦER16, ΦER12, and ΦER39; ΦER46, ΦER16, ΦER12, ΦER39, and ΦER15; ΦER46, ΦER12, ΦER39, ΦER15, and ΦER16; ΦER46, ΦER39, ΦER15, ΦER16, and ΦER12. One or more of the preceding administration sequences may be excluded from aspects of the disclosure.

[0201] Example administration sequences for ΦER3, ΦER11, ΦER27, ΦER36, and/or ΦMM9 include: ΦER3 and ΦER11; PERIl and ΦER3; ΦER3 and ΦER27; ΦER27 and ΦER3; ΦER3 and ΦER36; ΦER36 and ΦER3; ΦER3 and ΦMM9; ΦMM9 and ΦER3; ΦER3, ΦER11, and ΦER27; ΦER3, ΦER27, and ΦER11; ΦER11, ΦER3, and ΦER27; ΦER11, ΦER27, and ΦER3; ΦER27, ΦER3, and ΦER11; ΦER27, ΦER11, and ΦER3; ΦER3, ΦER11, and 39; ΦER3, ΦER36, and ΦER11; ΦER11, ΦER3, and ΦER36; ΦER11, ΦER36, and ΦER3; ΦER36, ΦER3, and ΦER11; ΦER36, ΦER11, and ΦER3; ΦER3, ΦER11, and 46; ΦER3, ΦMM9, and ΦER11; ΦER11, ΦER3, and ΦMM9; ΦER11, ΦMM9, and ΦER3; ΦMM9, ΦER3, and ΦER11; ΦMM9, ΦER11, and ΦER3; ΦER3, ΦER27, and 39; ΦER3, ΦER36, and ΦER27; ΦER27, ΦER3, and ΦER36; ΦER27, ΦER36, and ΦER3; ΦER36, ΦER3, and ΦER27; ΦER36, ΦER27, and ΦER3; ΦER3, ΦER27, and 46; ΦER3, ΦMM9, and ΦER27; ΦER27, ΦER3, and ΦMM9; ΦER27, ΦMM9, and ΦER3; ΦMM9, ΦER3, and ΦER27; ΦMM9, ΦER27, and ΦER3; ΦER3, ΦER36, and 46; ΦER3, ΦMM9, and ΦER36; ΦER36, ΦER3, and ΦMM9; ΦER36, ΦMM9, and ΦER3; ΦMM9, ΦER3, and ΦER36; ΦMM9, ΦER36, and ΦER3; ΦER3, ΦER11, ΦER27, and ΦER36; ΦER3, ΦER11, ΦER36, and ΦER27; ΦER3, ΦER27, ΦER36, and ΦER11; ΦER3, ΦER27, ΦER11, and ΦER36; ΦER3, ΦER36, ΦER11, and ΦER27; ΦER3, ΦER36, ΦER27, and ΦER11; ΦER11, ΦER3, ΦER27, and ΦER36; ΦER11, ΦER3, ΦER36, and ΦER27; ΦER11, ΦER27, ΦER36, and ΦER3; ΦER11, ΦER27, ΦER3, and ΦER36; ΦER11, ΦER36, ΦER11, and ΦER27; ΦER11, ΦER36, ΦER27, and ΦER3; ΦER27, ΦER11, ΦER3, and ΦER36; ΦER27, ΦER11, ΦER36, and ΦER3; ΦER27, ΦER3, ΦER36, and ΦER11; ΦER27, ΦER3, ΦER11, and ΦER36; ΦER27, ΦER36, ΦER11, and ΦER3; ΦER27, ΦER36, ΦER3, and ΦER11; ΦER36, ΦER11, ΦER27, and ΦER3; ΦER36, ΦER11, ΦER3, and ΦER27; ΦER36, ΦER27, ΦER3, and ΦER11; ΦER36, ΦER27, ΦER11, and ΦER3; ΦER36, ΦER3, ΦER11, and ΦER27; ΦER36, ΦER3, ΦER27, and DER11; ΦER3, ΦER11, ΦER27, and ΦMM9; ΦER3, ΦER11, ΦMM9, and ΦER27; ΦER3, ΦER27, ΦMM9, and ΦER11; ΦER3, ΦER27, ΦER11, and ΦMM9; ΦER3, ΦMM9, ΦER11, and ΦER27; ΦER3, ΦMM9, ΦER27, and ΦER11; ΦER11, ΦER3, ΦER27, and ΦMM9; ΦER11, ΦER3, ΦMM9, and ΦER27; ΦER11, ΦER27, ΦMM9, and ΦER3; ΦER11, ΦER27, ΦER3, and ΦMM9; ΦER11, ΦMM9, ΦER11, and ΦER27; ΦER11, ΦMM9, ΦER27, and ΦER3; ΦER27, ΦER11, ΦER3, and ΦMM9; ΦER27, ΦER11, ΦMM9, and ΦER3; ΦER27, ΦER3, ΦMM9, and ΦER11; ΦER27, ΦER3, ΦER11, and ΦMM9; ΦER27, ΦMM9, ΦER11, and ΦER3; ΦER27, ΦMM9, ΦER3, and ΦER11; ΦMM9, ΦER11, ΦER27, and ΦER3; ΦMM9, ΦER11, ΦER3, and ΦER27; ΦMM9, ΦER27, ΦER3, and ΦER11; ΦMM9, ΦER27, ΦER11, and ΦER3; ΦMM9, ΦER3, ΦER11, and ΦER27; ΦMM9, ΦER3, ΦER27, and ΦER11; ΦER3, ΦER11, ΦER36, and ΦMM9; ΦER3, ΦER11, ΦMM9, and ΦER36; ΦER3, ΦER36, ΦMM9, and ΦER11; ΦER3, ΦER36, ΦER11, and ΦMM9; ΦER3, ΦMM9, ΦER11, and ΦER36; ΦER3, ΦMM9, ΦER36, and ΦER11; ΦER11, ΦER3, ΦER36, and ΦMM9; ΦER11, ΦER3, ΦMM9, and ΦER36; ΦER11, ΦER36, ΦMM9, and ΦER3; ΦER11, ΦER36, ΦER3, and ΦMM9; ΦER11, ΦMM9, ΦER11, and ΦER36; ΦER11, ΦMM9, ΦER36, and ΦER3; ΦER36, ΦER11, ΦER3, and ΦMM9; ΦER36, ΦER11, ΦMM9, and ΦER3; ΦER36, ΦER3, ΦMM9, and ΦER11; ΦER36, ΦER3, ΦER11, and ΦMM9; ΦER36, ΦMM9, ΦER11, and ΦER3; ΦER36, ΦMM9, ΦER3, and ΦER11; ΦMM9, ΦER11, ΦER36, and ΦER3; ΦMM9, ΦER11, ΦER3, and ΦER36; ΦMM9, ΦER36, ΦER3, and ΦER11; ΦMM9, ΦER36, ΦER11, and ΦER3; ΦMM9, ΦER3, ΦER11, and ΦER36; ΦMM9, ΦER3, ΦER36, and ΦER11; ΦER3, ΦER27, ΦER36, and ΦMM9; ΦER3, ΦER27, ΦMM9, and ΦER36; ΦER3, ΦER36, ΦMM9, and ΦER27; ΦER3, ΦER36, ΦER27, and ΦMM9; ΦER3, ΦMM9, ΦER27, and ΦER36; ΦER3, ΦMM9, ΦER36, and ΦER27; ΦER27, ΦER3, ΦER36, and ΦMM9; ΦER27, ΦER3, ΦMM9, and ΦER36; ΦER27, ΦER36, ΦMM9, and ΦER3; ΦER27, ΦER36, ΦER3, and ΦMM9; ΦER27, ΦMM9, ΦER11, and ΦER36; ΦER27, ΦMM9, ΦER36, and ΦER3; ΦER36, ΦER27, ΦER3, and ΦMM9; ΦER36, ΦER27, ΦMM9, and ΦER3; ΦER36, ΦER3, ΦMM9, and ΦER27; ΦER36, ΦER3, ΦER27, and ΦMM9; ΦER36, ΦMM9, ΦER27, and ΦER3; ΦER36, ΦMM9, ΦER3, and ΦER27; ΦMM9, ΦER27, ΦER36, and ΦER3; ΦMM9, ΦER27, ΦER3, and ΦER36; ΦMM9, ΦER36, ΦER3, and ΦER27; ΦMM9, ΦER36, ΦER27, and ΦER3; ΦMM9, ΦER3, ΦER27, and ΦER36; ΦMM9, ΦER3, ΦER36, and ΦER27; ΦER3, ΦER11, ΦER27, ΦER36, and ΦMM9; ΦER3, ΦER27, ΦER36, ΦMM9, and ΦER11; ΦER3, ΦER36, ΦMM9, ΦER11, and ΦER27; ΦER3, ΦMM9, ΦER11, ΦER27, and ΦER36; ΦER3, ΦER27, ΦER11, ER36, and ΦMM9; ΦER3, ΦER11, ER36, ΦMM9, and ΦER27; ΦER3, ΦER36, ΦMM9, ΦER27, and ΦER11; ΦER3, ΦMM9, ΦER27, ΦER11, and ΦER36; ΦER3, ΦER36, ΦER27, ΦER11, and ΦMM9; ΦER3, ΦER27, ΦER11, ΦMM9, and ΦER36; ΦER3, ΦER11, ΦMM9, ΦER36, and ΦER27; ΦER3, ΦMM9, ΦER36, ΦER27, and ΦER11; ΦER3, ΦMM9, ΦER27, ΦER36, and ΦER11; ΦER3, ΦER27, ΦER36, ΦER11, and ΦMM9; ΦER3, ΦER36, ΦER11, ΦMM9, and ΦER27; ΦER3, ΦER11, ΦMM9, ΦER27, and ΦER36; ΦER3, ΦER11, ΦER36, ΦER27, and ΦMM9; ΦER3, ΦER36, ΦER27, ΦMM9, and ΦER11; ΦER3, ΦER27, ΦMM9, ΦER11, and ΦER36; ΦER3, ΦMM9, ΦER11, ΦER36, and ΦER27; ΦER3, ΦER11, ΦMM9, ΦER36, and ΦER27; ΦER3, ΦMM9, ΦER36, ΦER27, and ΦER11; ΦER3, ΦER36, ΦER27, ΦER11, and ΦMM9; ΦER3, ΦER27, ΦER11, ΦMM9, and ΦER36; ΦER3, ΦER11, ΦER27, ΦMM9, and ΦER36; ΦER3, ΦER27, ΦMM9, ΦER36, and ΦER11; ΦER3, ΦMM9, ΦER36, ΦER11, and ΦER27; ΦER3, ΦER36, ΦER11, ΦER27, and ΦMM9; ΦER11, ΦER3, ΦER27, ΦER36, and ΦMM9; ΦER11, ΦER27, ΦER36, ΦMM9, and ΦER3; ΦER11, ΦER36, ΦMM9, ΦER3, and ΦER27; ΦER11, ΦMM9, ΦER3, ΦER27, and ΦER36; ΦER11, ΦER27, ΦER3, ΦER36, and ΦMM9; ΦER11, ΦER3, ΦER36, ΦMM9, and ΦER27; ΦER11, ΦER36, ΦMM9, ΦER27, and ΦER3; ΦER11, ΦMM9, ΦER27, ΦER3, and ΦER36; ΦER11, ΦER36, ΦER27, ΦER3, and ΦMM9; ΦER11, ΦER27, ΦER3, ΦMM9, and ΦER36; ΦER11, ΦER3, ΦMM9, ΦER36, and ΦER27; ΦER11, ΦMM9, ΦER36, ΦER27, and ΦER3; ΦER11, ΦMM9, ΦER27, ΦER36, and ΦER3; ΦER11, ΦER27, ΦER36, ΦER3, and ΦMM9; ΦER11, ΦER36, ΦER3, ΦMM9, and ΦER27; ΦER11, ΦER3, ΦMM9, ΦER27, and ΦER36; ΦER11, ΦER3, ΦER36, ΦER27, and ΦMM9; ΦER11, ΦER36, ΦER27, ΦMM9, and ΦER3; ΦER11, ΦER27, ΦMM9, ΦER3, and ΦER36; ΦER11, ΦMM9, ΦER3, ΦER36, and ΦER27; ΦER11, ΦER3, ΦMM9, ΦER36, and ΦER27; ΦER11, ΦMM9, ΦER36, ΦER27, and ΦER3; ΦER11, ΦER36, ΦER27, ΦER3, and ΦMM9; ΦER11, ΦER27, ΦER3, ΦMM9, and ΦER36; ΦER11, ΦER3, ΦER27, ΦMM9, and ΦER36; ΦER11, ΦER27, ΦMM9, ΦER36, and ΦER3; ΦER11, ΦMM9, ΦER36, ΦER3, and ΦER27; ΦER11, ΦER36, ΦER3, ΦER27, and ΦMM9; ΦER27, ΦER11, ΦER3, ΦER36, and ΦMM9; ΦER27, ΦER3, ΦER36, ΦMM9, and ΦER11; ΦER27, ΦER36, ΦMM9, ΦER11, and ΦER3; ΦER27, ΦMM9, ΦER11, ΦER3, and ΦER36; ΦER27, ΦER3, ΦER11, ΦER36, and ΦMM9; ΦER27, ΦER11, ΦER36, ΦMM9, and ΦER3; ΦER27, ΦER36, ΦMM9, ΦER3, and ΦER11; ΦER27, ΦMM9, ΦER3, ΦER11, and ΦER36; ΦER27, ΦER36, ΦER3, ΦER11, and ΦMM9; ΦER27, ΦER3, ΦER11, ΦMM9, and ΦER36; ΦER27, ΦER11, ΦMM9, ΦER36, and ΦER3; ΦER27, ΦMM9, ΦER36, ΦER3, and ΦER11; ΦER27, ΦMM9, ΦER3, ΦER36, and ΦER11; ΦER27, ΦER3, ΦER36, ΦER11, and ΦMM9; ΦER27, ΦER36, ΦER11, ΦMM9, and ΦER3; ΦER27, ΦER11, ΦMM9, ΦER3, and ΦER36; ΦER27, ΦER11, ΦER36, ΦER3, and ΦMM9; ΦER27, ΦER36, ΦER3, ΦMM9, and ΦER11; ΦER27, ΦER3, ΦMM9, ΦER11, and ΦER36; ΦER27, ΦMM9, ΦER11, ΦER36, and ΦER3; ΦER27, ΦER11, ΦMM9, ΦER36, and ΦER3; ΦER27, ΦMM9, ΦER36, ΦER3, and ΦER11; ΦER27, ΦER36, ΦER3, ΦER11, and ΦMM9; ΦER27, ΦER3, ΦER11, ΦMM9, and ΦER36; ΦER27, ΦER11, ΦER3, ΦMM9, and ΦER36; ΦER27, ΦER3, ΦMM9, ΦER36, and ΦER11; ΦER27, ΦMM9, ΦER36, ΦER11, and ΦER3; ΦER27, ΦER36, ΦER11, ΦER3, and ΦMM9; ΦER36, ΦER11, ΦER27, ΦER3, and ΦMM9; ΦER36, ΦER27, ΦER3, ΦMM9, and ΦER11; ΦER36, ΦER3, ΦMM9, ΦER11, and ΦER27; ΦER36, ΦMM9, ΦER11, ΦER27, and ΦER3; ΦER36, ΦER27, ΦER11, ΦER3, and ΦMM9; ΦER36, ΦER11, ΦER3, ΦMM9, and ΦER27; ΦER36, ΦER3, ΦMM9, ΦER27, and ΦER11; ΦER36, ΦMM9, ΦER27, ΦER11, and ΦER3; ΦER36, ΦER3, ΦER27, ΦER11, and ΦMM9; ΦER36, ΦER27, ΦER11, ΦMM9, and ΦER3; ΦER36, ΦER11, ΦMM9, ΦER3, and ΦER27; ΦER36, ΦMM9, ΦER3, ΦER27, and ΦER11; ΦER36, ΦMM9, ΦER27, ΦER3, and ΦER11; ΦER36, ΦER27, ΦER3, ΦER11, and ΦMM9; ΦER36, ΦER3, ΦER11, ΦMM9, and ΦER27; ΦER36, ΦER11, ΦMM9, ΦER27, and ΦER3; ΦER36, ΦER11, ΦER3, ΦER27, and ΦMM9; ΦER36, ΦER3, ΦER27, ΦMM9, and ΦER11; ΦER36, ΦER27, ΦMM9, ΦER11, and ΦER3; ΦER36, ΦMM9, ΦER11, ΦER3, and ΦER27; ΦER36, ΦER11, ΦMM9, ΦER3, and ΦER27; ΦER36, ΦMM9, ΦER3, ΦER27, and ΦER11; ΦER36, ΦER3, ΦER27, ΦER11, and ΦMM9; ΦER36, ΦER27, ΦER11, ΦMM9, and ΦER3; ΦER36, ΦER11, ΦER27, ΦMM9, and ΦER3; ΦER36, ΦER27, ΦMM9, ΦER3, and ΦER11; ΦER36, ΦMM9, ΦER3, ΦER11, and ΦER27; ΦER36, ΦER3, ΦER11, ΦER27, and ΦMM9; ΦMM9, ΦER11, ΦER27, ΦER36, and ΦER3; ΦMM9, ΦER27, ΦER36, ΦER3, and ΦER11; ΦMM9, ΦER36, ΦER3, ΦER11, and ΦER27; ΦMM9, ΦER3, ΦER11, ΦER27, and ΦER36; ΦMM9, ΦER27, ΦER11, ΦER36, and ΦER3; ΦMM9, ΦER11, ΦER36, ΦER3, and ΦER27; ΦMM9, ΦER36, ΦER3, ΦER27, and ΦER11; ΦMM9, ΦER3, ΦER27, ΦER11, and ΦER36; ΦMM9, ΦER36, ΦER27, ΦER11, and ΦER3; ΦMM9, ΦER27, ΦER11, ΦER3, and ΦER36; ΦMM9, ΦER11, ΦER3, ΦER36, and ΦER27; ΦMM9, ΦER3, ΦER36, ΦER27, and ΦER11; ΦMM9, ΦER3, ΦER27, ΦER36, and ΦER11; ΦMM9, ΦER27, ΦER36, ΦER11, and ΦER3; ΦMM9, ΦER36, ΦER11, ΦER3, and ΦER27; ΦMM9, ΦER11, ΦER3, ΦER27, and ΦER36; ΦMM9, ΦER11, ΦER36, ΦER27, and ΦER3; ΦMM9, ΦER36, ΦER27, ΦER3, and ΦER11; ΦMM9, ΦER27, ΦER3, ΦER11, and ΦER36; ΦMM9, ΦER3, ΦER11, ΦER36, and ΦER27; ΦMM9, ΦER11, ΦER3, ΦER36, and ΦER27; ΦMM9, ΦER3, ΦER36, ΦER27, and ΦER11; ΦMM9, ΦER36, ΦER27, ΦER11, and ΦER3; ΦMM9, ΦER27, ΦER11, ΦER3, and ΦER36; ΦMM9, ΦER11, ΦER27, ΦER3, and ΦER36; ΦMM9, ΦER27, ΦER3, ΦER36, and ΦER11; ΦMM9, ΦER3, ΦER36, ΦER11, and ΦER27; ΦMM9, ΦER36, ΦER11, ΦER27, and ΦER3. One or more of the preceding administration sequences may be excluded from aspects of the disclosure.

[0202] Example administration sequences for ΦER15, ΦER43, ΦER27, ΦER46, and/or ΦMM7 include: ΦER15 and ΦER43; ΦER43 and ΦER15; ΦER15 and ΦER27; ΦER27 and ΦER15; ΦER15 and ΦER46; ΦER46 and ΦER15; ΦER15 and ΦMM7; ΦMM7 and ΦER15; ΦER15, ΦER43, and ΦER27; ΦER15, ΦER27, and ΦER43; ΦER43, ΦER15, and ΦER27; ΦER43, ΦER27, and ΦER15; ΦER27, ΦER15, and ΦER43; ΦER27, ΦER43, and ΦER15; ΦER15, ΦER43, and 39; ΦER15, ΦER46, and ΦER43; ΦER43, ΦER15, and ΦER46; ΦER43, ΦER46, and ΦER15; ΦER46, ΦER15, and ΦER43; ΦER46, ΦER43, and ΦER15; ΦER15, ΦER43, and 46; ΦER15, ΦMM7, and ΦER43; ΦER43, ΦER15, and ΦMM7; ΦER43, ΦMM7, and ΦER15; ΦMM7, ΦER15, and ΦER43; ΦMM7, ΦER43, and ΦER15; ΦER15, ΦER27, and 39; ΦER15, ΦER46, and ΦER27; ΦER27, ΦER15, and ΦER46; ΦER27, ΦER46, and ΦER15; ΦER46, ΦER15, and ΦER27; ΦER46, ΦER27, and ΦER15; ΦER15, ΦER27, and 46; ΦER15, ΦMM7, and ΦER27; ΦER27, ΦER15, and ΦMM7; ΦER27, ΦMM7, and ΦER15; ΦMM7, ΦER15, and ΦER27; ΦMM7, ΦER27, and ΦER15; ΦER15, ΦER46, and 46; ΦER15, ΦMM7, and ΦER46; ΦER46, ΦER15, and ΦMM7; ΦER46, ΦMM7, and ΦER15; ΦMM7, ΦER15, and ΦER46; ΦMM7, ΦER46, and ΦER15; ΦER15, ΦER43, ΦER27, and ΦER46; ΦER15, ΦER43, ΦER46, and ΦER27; ΦER15, ΦER27, ΦER46, and ΦER43; ΦER15, ΦER27, ΦER43, and ΦER46; ΦER15, ΦER46, ΦER43, and ΦER27; ΦER15, ΦER46, ΦER27, and ΦER43; ΦER43, ΦER15, ΦER27, and ΦER46; ΦER43, ΦER15, ΦER46, and ΦER27; ΦER43, ΦER27, ΦER46, and ΦER15; ΦER43, ΦER27, ΦER15, and ΦER46; ΦER43, ΦER46, ΦER43, and ΦER27; ΦER43, ΦER46, ΦER27, and ΦER15; ΦER27, ΦER43, ΦER15, and ΦER46; ΦER27, ΦER43, ΦER46, and ΦER15; ΦER27, ΦER15, ΦER46, and ΦER43; ΦER27, ΦER15, ΦER43, and ΦER46; ΦER27, ΦER46, ΦER43, and ΦER15; ΦER27, ΦER46, ΦER15, and ΦER43; ΦER46, ΦER43, ΦER27, and ΦER15; ΦER46, ΦER43, ΦER15, and ΦER27; ΦER46, ΦER27, ΦER15, and ΦER43; ΦER46, ΦER27, ΦER43, and ΦER15; ΦER46, ΦER15, ΦER43, and ΦER27; ΦER46, ΦER15, ΦER27, and ΦER43; ΦER15, ΦER43, ΦER27, and ΦMM7; ΦER15, ΦER43, ΦMM7, and ΦER27; ΦER15, ΦER27, ΦMM7, and ΦER43; ΦER15, ΦER27, ΦER43, and ΦMM7; ΦER15, ΦMM7, ΦER43, and ΦER27; ΦER15, ΦMM7, ΦER27, and ΦER43; ΦER43, ΦER15, ΦER27, and ΦMM7; ΦER43, ΦER15, ΦMM7, and ΦER27; ΦER43, ΦER27, ΦMM7, and ΦER15; ΦER43, ΦER27, ΦER15, and ΦMM7; ΦER43, ΦMM7, ΦER43, and ΦER27; ΦER43, ΦMM7, ΦER27, and ΦER15; ΦER27, ΦER43, ΦER15, and ΦMM7; ΦER27, ΦER43, ΦMM7, and ΦER15; ΦER27, ΦER15, ΦMM7, and ΦER43; ΦER27, ΦER15, ΦER43, and ΦMM7; ΦER27, ΦMM7, ΦER43, and ΦER15; ΦER27, ΦMM7, ΦER15, and ΦER43; ΦMM7, ΦER43, ΦER27, and ΦER15; ΦMM7, ER43, ΦER15, and ΦER27; ΦMM7, ΦER27, ΦER15, and ΦER43; ΦMM7, ΦER27, ΦER43, and ΦER15; ΦMM7, ΦER15, ΦER43, and ΦER27; ΦMM7, ΦER15, ΦER27, and ΦER43; ΦER15, ΦER43, ΦER46, and ΦMM7; ΦER15, ΦER43, ΦMM7, and ΦER46; ΦER15, ΦER46, ΦMM7, and ΦER43; ΦER15, ΦER46, ΦER43, and ΦMM7; ΦER15, ΦMM7, ΦER43, and ΦER46; ΦER15, ΦMM7, ΦER46, and ΦER43; ΦER43, ΦER15, ΦER46, and ΦMM7; ΦER43, ΦER15, ΦMM7, and ΦER46; ΦER43, ΦER46, ΦMM7, and ΦER15; ΦER43, ΦER46, ΦER15, and ΦMM7; ΦER43, ΦMM7, ΦER43, and ΦER46; ΦER43, ΦMM7, ΦER46, and ΦER15; ΦER46, ΦER43, ΦER15, and ΦMM7; ΦER46, ΦER43, ΦMM7, and ΦER15; ΦER46, ΦER15, ΦMM7, and ΦER43; ΦER46, ΦER15, ΦER43, and ΦMM7; ΦER46, ΦMM7, ΦER43, and ΦER15; ΦER46, ΦMM7, ΦER15, and ΦER43; ΦMM7, ΦER43, ΦER46, and ΦER15; ΦMM7, ΦER43, ΦER15, and ΦER46; ΦMM7, ΦER46, ΦER15, and ΦER43; ΦMM7, ΦER46, ΦER43, and ΦER15; ΦMM7, ΦER15, ΦER43, and ΦER46; ΦMM7, ΦER15, ΦER46, and ΦER43; ΦER15, ΦER27, ΦER46, and ΦMM7; ΦER15, ΦER27, ΦMM7, and ΦER46; ΦER15, ΦER46, ΦMM7, and ΦER27; ΦER15, ΦER46, ΦER27, and ΦMM7; ΦER15, ΦMM7, ΦER27, and ΦER46; ΦER15, ΦMM7, ΦER46, and ΦER27; ΦER27, ΦER15, ΦER46, and ΦMM7; ΦER27, ΦER15, ΦMM7, and ΦER46; ΦER27, ΦER46, ΦMM7, and ΦER15; ΦER27, ΦER46, ΦER15, and ΦMM7; ΦER27, ΦMM7, ΦER43, and ΦER46; ΦER27, ΦMM7, ΦER46, and ΦER15; ΦER46, ΦER27, ΦER15, and ΦMM7; ΦER46, ΦER27, ΦMM7, and ΦER15; ΦER46, ΦER15, ΦMM7, and ΦER27; ΦER46, ΦER15, ΦER27, and ΦMM7; ΦER46, ΦMM7, ΦER27, and ΦER15; ΦER46, ΦMM7, ΦER15, and ΦER27; ΦMM7, ΦER27, ΦER46, and ΦER15; ΦMM7, ΦER27, ΦER15, and ΦER46; ΦMM7, ΦER46, ΦER15, and ΦER27; ΦMM7, ΦER46, ΦER27, and ΦER15; ΦMM7, ΦER15, ΦER27, and ΦER46; ΦMM7, ΦER15, ΦER46, and ΦER27; ΦER15, ΦER43, ΦER27, ΦER46, and ΦMM7; ΦER15, ΦER27, ΦER46, ΦMM7, and ΦER43; ΦER15, ΦER46, ΦMM7, ΦER43, and ΦER27; ΦER15, ΦMM7, ΦER43, ΦER27, and ΦER46; ΦER15, ΦER27, ΦER43, ΦER46, and ΦMM7; ΦER15, ΦER43, ΦER46, ΦMM7, and ΦER27; ΦER15, ΦER46, ΦMM7, ΦER27, and ΦER43; ΦER15, ΦMM7, ΦER27, ΦER43, and ΦER46; ΦER15, ΦER46, ΦER27, ΦER43, and ΦMM7; ΦER15, ΦER27, ΦER43, ΦMM7, and ΦER46; ΦER15, ΦER43, ΦMM7, ΦER46, and ΦER27; ΦER15, ΦMM7, ΦER46, ΦER27, and ΦER43; ΦER15, ΦMM7, ΦER27, ΦER46, and ΦER43; ΦER15, ΦER27, ΦER46, ΦER43, and ΦMM7; ΦER15, ΦER46, ΦER43, ΦMM7, and ΦER27; ΦER15, ΦER43, ΦMM7, ΦER27, and ΦER46; ΦER15, ΦER43, ΦER46, ΦER27, and ΦMM7; ΦER15, ΦER46, ΦER27, ΦMM7, and ΦER43; ΦER15, ΦER27, ΦMM7, ΦER43, and ΦER46; ΦER15, ΦMM7, ΦER43, ΦER46, and ΦER27; ΦER15, ΦER43, ΦMM7, ΦER46, and ΦER27; ΦER15, ΦMM7, ΦER46, ΦER27, and ΦER43; ΦER15, ΦER46, ΦER27, ΦER43, and ΦMM7; ΦER15, ΦER27, ΦER43, ΦMM7, and ΦER46; ΦER15, ΦER43, ΦER27, ΦMM7, and ΦER46; ΦER15, ΦER27, ΦMM7, ΦER46, and ΦER43; ΦER15, ΦMM7, ΦER46, ΦER43, and ΦER27; ΦER15, ΦER46, ΦER43, ΦER27, and ΦMM7; ΦER43, ΦER15, ΦER27, ΦER46, and ΦMM7; ΦER43, ΦER27, ΦER46, ΦMM7, and ΦER15; ΦER43, ΦER46, ΦMM7, ΦER15, and ΦER27; ΦER43, ΦMM7, ΦER15, ΦER27, and ΦER46; ΦER43, ΦER27, ΦER15, ΦER46, and ΦMM7; ΦER43, ΦER15, ΦER46, ΦMM7, and ΦER27; ΦER43, ΦER46, ΦMM7, ΦER27, and ΦER15; ΦER43, ΦMM7, ΦER27, ΦER15, and ΦER46; ΦER43, ΦER46, ΦER27, ΦER15, and ΦMM7; ΦER43, ΦER27, ΦER15, ΦMM7, and ΦER46; ΦER43, ΦER15, ΦMM7, ΦER46, and ΦER27; ΦER43, ΦMM7, ΦER46, ΦER27, and ΦER15; ΦER43, ΦMM7, ΦER27, ΦER46, and ΦER15; ΦER43, ΦER27, ΦER46, ΦER15, and ΦMM7; ΦER43, ΦER46, ΦER15, ΦMM7, and ΦER27; ΦER43, ΦER15, ΦMM7, ΦER27, and ΦER46; ΦER43, ΦER15, ΦER46, ΦER27, and ΦMM7; ΦER43, ΦER46, ΦER27, ΦMM7, and ΦER15; ΦER43, ΦER27, ΦMM7, ΦER15, and ΦER46; ΦER43, ΦMM7, ΦER15, ΦER46, and ΦER27; ΦER43, ΦER15, ΦMM7, ΦER46, and ΦER27; ΦER43, ΦMM7, ΦER46, ΦER27, and ΦER15; ΦER43, ΦER46, ΦER27, PER 15, and ΦMM7; ΦER43, ΦER27, ΦER15, ΦMM7, and ΦER46; ΦER43, ΦER15, ΦER27, ΦMM7, and ΦER46; ΦER43, ΦER27, ΦMM7, ΦER46, and ΦER15; ΦER43, ΦMM7, ΦER46, ΦER15, and ΦER27; ΦER43, ΦER46, ΦER15, ΦER27, and ΦMM7; ΦER27, ΦER43, ΦER15, ΦER46, and ΦMM7; ΦER27, ΦER15, ΦER46, ΦMM7, and ΦER43; ΦER27, ΦER46, ΦMM7, ΦER43, and ΦER15; ΦER27, ΦMM7, ΦER43, ΦER15, and ΦER46; ΦER27, ΦER15, ΦER43, ΦER46, and ΦMM7; ΦER27, ΦER43, ΦER46, ΦMM7, and ΦER15; ΦER27, ΦER46, ΦMM7, ΦER15, and ΦER43; ΦER27, ΦMM7, ΦER15, ΦER43, and ΦER46; ΦER27, ΦER46, ΦER15, ΦER43, and ΦMM7; ΦER27, ΦER15, ΦER43, ΦMM7, and ΦER46; ΦER27, ΦER43, ΦMM7, ΦER46, and ΦER15; ΦER27, ΦMM7, ΦER46, ΦER15, and ΦER43; ΦER27, ΦMM7, ΦER15, ΦER46, and ΦER43; ΦER27, ΦER15, ΦER46, ΦER43, and ΦMM7; ΦER27, ΦER46, ΦER43, ΦMM7, and ΦER15; ΦER27, ΦER43, ΦMM7, ΦER15, and ΦER46; ΦER27, ΦER43, ΦER46, ΦER15, and ΦMM7; ΦER27, ΦER46, ΦER15, ΦMM7, and ΦER43; ΦER27, ΦER15, ΦMM7, ΦER43, and ΦER46; ΦER27, ΦMM7, ΦER43, ΦER46, and ΦER15; ΦER27, ΦER43, ΦMM7, ΦER46, and ΦER15; ΦER27, ΦMM7, ΦER46, ΦER15, and ΦER43; ΦER27, ΦER46, ΦER15, ΦER43, and ΦMM7; ΦER27, ΦER15, ΦER43, ΦMM7, and ΦER46; ΦER27, ΦER43, ΦER15, ΦMM7, and ΦER46; ΦER27, ΦER15, ΦMM7, ΦER46, and ΦER43; ΦER27, ΦMM7, ΦER46, ΦER43, and ΦER15; ΦER27, ΦER46, ΦER43, ΦER15, and ΦMM7; ΦER46, ΦER43, ΦER27, ΦER15, and ΦMM7; ΦER46, ΦER27, ΦER15, ΦMM7, and ΦER43; ΦER46, ΦER15, ΦMM7, ΦER43, and ΦER27; ΦER46, ΦMM7, ΦER43, ΦER27, and ΦER15; ΦER46, ΦER27, ΦER43, ΦER15, and ΦMM7; ΦER46, ΦER43, ΦER15, ΦMM7, and ΦER27; ΦER46, ΦER15, ΦMM7, ΦER27, and ΦER43; ΦER46, ΦMM7, ΦER27, ΦER43, and ΦER15; ΦER46, ΦER15, ΦER27, ΦER43, and ΦMM7; ΦER46, ΦER27, ΦER43, ΦMM7, and ΦER15; ΦER46, ΦER43, ΦMM7, ΦER15, and ΦER27; ΦER46, ΦMM7, ΦER15, ΦER27, and ΦER43; ΦER46, ΦMM7, ΦER27, PER 15, and ΦER43; ΦER46, ΦER27, ΦER15, ΦER43, and ΦMM7; ΦER46, ΦER15, ΦER43, ΦMM7, and ΦER27; ΦER46, ΦER43, ΦMM7, ΦER27, and ΦER15; ΦER46, ΦER43, ΦER15, ΦER27, and ΦMM7; ΦER46, ΦER15, ΦER27, ΦMM7, and ΦER43; ΦER46, ΦER27, ΦMM7, ΦER43, and ΦER15; ΦER46, ΦMM7, ΦER43, ΦER15, and ΦER27; ΦER46, ΦER43, ΦMM7, ΦER15, and ΦER27; ΦER46, ΦMM7, ΦER15, ΦER27, and ΦER43; ΦER46, ΦER15, ΦER27, ΦER43, and ΦMM7; ΦER46, ΦER27, ΦER43, ΦMM7, and ΦER15; ΦER46, ΦER43, ΦER27, ΦMM7, and ΦER15; ΦER46, ΦER27, ΦMM7, ΦER15, and ΦER43; ΦER46, ΦMM7, ΦER15, ΦER43, and ΦER27; ΦER46, ΦER15, ΦER43, ΦER27, and ΦMM7; ΦMM7, ΦER43, ΦER27, ΦER46, and ΦER15; ΦMM7, ΦER27, ΦER46, ΦER15, and ΦER43; ΦMM7, ΦER46, ΦER15, ΦER43, and ΦER27; ΦMM7, ΦER15, ΦER43, ΦER27, and ΦER46; ΦMM7, ΦER27, ΦER43, ΦER46, and ΦER15; ΦMM7, ΦER43, ΦER46, ΦER15, and ΦER27; ΦMM7, ΦER46, ΦER15, ΦER27, and ΦER43; ΦMM7, ΦER15, ΦER27, ΦER43, and ΦER46; ΦMM7, ΦER46, ΦER27, ΦER43, and ΦER15; ΦMM7, ΦER27, ΦER43, ΦER15, and ΦER46; ΦMM7, ΦER43, ΦER15, ΦER46, and ΦER27; ΦMM7, ΦER15, ΦER46, ΦER27, and ΦER43; ΦMM7, ΦER15, ΦER27, ΦER46, and ΦER43; ΦMM7, ΦER27, ΦER46, ΦER43, and ΦER15; ΦMM7, ΦER46, ΦER43, ΦER15, and ΦER27; ΦMM7, ΦER43, ΦER15, ΦER27, and ΦER46; ΦMM7, ΦER43, ΦER46, ΦER27, and ΦER15; ΦMM7, ΦER46, ΦER27, ΦER15, and ΦER43; ΦMM7, ΦER27, ΦER15, ΦER43, and ΦER46; ΦMM7, ΦER15, ΦER43, ΦER46, and ΦER27; ΦMM7, ER43, ΦER15, ΦER46, and ΦER27; ΦMM7, ΦER15, ΦER46, ΦER27, and ΦER43; ΦMM7, ΦER46, ΦER27, ΦER43, and ΦER15; ΦMM7, ΦER27, ΦER43, ΦER15, and ΦER46; ΦMM7, ER43, ΦER27, ΦER15, and ΦER46; ΦMM7, ΦER27, ΦER15, ΦER46, and ΦER43; ΦMM7, ΦER15, ΦER46, ΦER43, and ΦER27; ΦMM7, ΦER46, ΦER43, ΦER27, and ΦER15. One or more of the preceding administration sequences may be excluded from aspects of the disclosure.

[0203] Additionally, an individual having a pathogenic Klebsiella infection may be administered any two or more ΦER1, ΦER2, ΦER3, ΦER4, ΦER5, ΦER6, ΦER7/ER10, ΦER8, ΦER11, ΦER12, ΦER13, ΦER14, ΦER15, ΦER16, ΦER18, ΦER20, ΦER21, ΦER22, ΦER23, ΦER27, ΦER32, ΦER36, ΦER37, ΦER38, ΦER39, ΦER43, ΦER44, ΦER45, ΦER46, ΦER47, ΦER48, ΦER49, ΦER50, ΦER51, ΦER52, ΦER53, ΦER54, ΦER55, ΦMM1, ΦMM2, ΦMM3, ΦMM4, ΦMM5, ΦMM6, ΦMM7, ΦMM8, and/or ΦMM9. In some aspects, an individual having a pathogenic Klebsiella infection may be administered ΦER3, ΦER11, ΦER12, ΦER15, ΦER16, ΦER27, ΦER36, ΦER39, ΦER43, ΦER46, ΦMM7, and/or ΦMM9, or one or more compositions thereof, in any order. In some aspects, an individual having a pathogenic Klebsiella infection may be administered ΦER12, ΦER15, ΦER16, ΦER39, ΦER46, or any combination thereof, in any order. In some aspects, an individual having a pathogenic Klebsiella infection may be administered ΦER3, ΦER11, ΦER27, ΦER36, ΦMM9, or any combination thereof, in any order. In some aspects, an individual having a pathogenic Klebsiella infection may be administered ΦER15, ΦER27, ΦER43, ΦER46, ΦMM7, or any combination thereof, in any order.

[0204] Bacteriophages of the disclosure may be administered to an individual once, or may be administered multiple times (e.g., 2, 3, 4, 5, 6, 7, 8, 9, 10, 11, 12, 13, 14, 15, or more times). Bacteriophages may be administered via an appropriate treatment regimen for an appropriate length of time, e.g., for effective treatment or prevention of a pathogenic Klebsiella infection. For example, a bacteriophage composition may be administered to an individual 1, 2, 3, or 4 times per day (or more); 1, 2, 3, 4, 5, 6, or 7 times per week (or more); or 1, 2, 3, 4, 5, 6, 7, 8, 9, 10, 11, 12, 13, 14, 15, 16, 17, 18, 19, or 20 times per month (or more). A bacteriophage composition may be administered for at least, at most, exactly, or between any two of 1, 2, 3, 4, 5, 6, 7, 8, 9, 10, 11, 12, 13, or 14 days (or more); 1, 2, 3, 4, 5, 6, 7, 8, 9, 10, 11, 12, 13, 14, 15, 16, 17, 18, 19, 20, or 21 weeks (or more); or 1, 2, 3, 4, 5, 6, 7, 8, 9, 10, 11, or 12 months (or more). In some aspects, a bacteriophage is administered twice per week for between 6 and 12 weeks.

[0205] An individual receiving a treatment of the disclosure may have or be at risk of having a pathogenic infection. An individual receiving a treatment of the disclosure may have or be at risk of having an infection in, for example, one or more of a urinary tract, blood, gut, abdomen, stomach, lungs, skin, wound (e.g., burns, scratches, surgical wounds, etc.), eyes, ears, mouth, nose, kidneys, prostate, bladder, brain, vaginal tract, heart, liver, and spleen. In some aspects, an individual has or is at risk of having a lung infection. In some aspects, an individual has or is at risk of having a bloodstream infection. In some aspects, an individual has or is at risk of having a urinary tract infection. In some aspects, an individual has or is at risk of having an infection of the urinary tract, blood, gut, abdomen, stomach, lungs, skin, wound (e.g., burns, scratches, surgical wounds, etc.), eyes, ears, mouth, nose, kidneys, prostate, bladder, brain, vaginal tract, heart, liver, and/or spleen that is associated with a catheter, drive line, syringe, tube, implant, defibrillator, artificial joint, pacemaker, screw, rod, disc, intrauterine device, pin, plate, stent, dental device, eye lens, shunt, valve, neurological or neurosurgical device, gastrointestinal device, genitourinary device, catheter cuff, vascular access device, and wound drain. In some aspects, the infection of the urinary tract, blood, gut, abdomen, stomach, lungs, skin, wound (e.g., burns, scratches, surgical wounds, etc.), eyes, ears, mouth, nose, kidneys, prostate, bladder, brain, vaginal tract, heart, liver, and/or spleen is caused by a pathogen (e.g., Klebsiella). An individual may have or be at risk of having one or more of a urinary tract infection, a blood-stream infection, pneumonia, sepsis, a surgical wound infection, a skin infection, a respiratory tract infection, a prostate infection, meningitis, pyogenic liver abscess, intra-abdominal infection, and a vaginal infection.

[0206] An individual may have one or more symptoms of a pathogenic infection (e.g., a Klebsiella infection), for example, fever, chills, coughing, shortness of breath, chest pain, yellow or bloody mucus, redness, swelling, pain, fatigue, wounds, ulcers, headache, diarrhea, stomach cramping, nausea, and/or vomiting. In some aspects, an individual does not have any symptoms of a pathogenic infection (e.g., a Klebsiella infection). Accordingly, any one or more bacteriophage of the disclosure (e.g., ΦER1, ΦER2, ΦER3, ΦER4, ΦER5, ΦER6, ΦER7/ΦER10, ΦER8, ΦER11, ΦER12, ΦER13, ΦER14, ΦER15, ΦER16, ΦER18, ΦER20, ΦER21, ΦER22, ΦER23, ΦER27, ΦER32, ΦER36, ΦER37, ΦER38, ΦER39, ΦER43, ΦER44, ΦER45, ΦER46, ΦER47, ΦER48, ΦER49, ΦER50, ΦER51, ΦER52, ΦER53, ΦER54, ΦER55, ΦMM1, ΦMM2, ΦMM3, ΦMM4, ΦMM5, ΦMM6, ΦMM7, ΦMM8, and/or ΦMM9) may be administered to treat or prevent one or more symptoms of a pathogenic infection (e.g., a Klebsiella infection). In some aspects, ΦER3, ΦER11, ΦER12, ΦER15, ΦER16, ΦER27, ΦER36, ΦER39, ΦER43, ΦER46, ΦMM7, and/or ΦMM9) may be administered to treat or prevent one or more symptoms of a pathogenic infection (e.g., a Klebsiella infection). In some aspects, a ΦER12, ER15, ΦER16, ΦER39, ΦER46, or any combination thereof, may be administered to treat or prevent one or more symptoms of a pathogenic infection (e.g., a Klebsiella infection). In some aspects, ΦER3, ΦER11, ΦER27, ΦER36, ΦMM9, or any combination thereof, may be administered to treat or prevent one or more symptoms of a pathogenic infection (e.g., a Klebsiella infection). In some aspects ΦER15, ΦER27, ΦER43, ΦER46, ΦMM7, or any combination thereof, may be administered to treat or prevent one or more symptoms of a pathogenic infection (e.g., a Klebsiella infection). Any one or more of the preceding bacteriophage(s) may be excluded from administration to treat or prevent one or more symptoms of a pathogenic infection (e.g., a Klebsiella infection).

[0207] In some aspects, an individual receiving a treatment of the disclosure has a Klebsiella infection. In some aspects, an individual has been diagnosed with a Klebsiella infection. In some aspects, an individual has one or more symptoms of a Klebsiella infection (including, e.g., diarrhea, stomach cramping, nausea, and/or vomiting). In some aspects, the individual does not have any symptoms of a Klebsiella infection. In some aspects, the Klebsiella is multidrug-resistant (i.e., is a multidrug-resistant a Klebsiella). In some aspects, the Klebsiella is hypervirulent Klebsiella. In some aspects, the Klebsiella is Klebsiella pneumoniae (K. pneumoniae). In some aspects, the Klebsiella is Klebsiella quasipneumoniae (K. quasipneumoniae). In some aspects, the Klebsiella is Klebsiella variicola (K. variicola). An individual may have received a Klebsiella infection from various sources. For example, in some aspects, the Klebsiella was from a beverage, comestible (e.g., undercooked meat, unpasteurized milk, apple juice or cider; or soft cheese made from raw milk), another individual, or an environment (e.g., ground or surface water, water used to irrigate crops, a public water system, a hospital, a school, a nursing home, a petting zoo, a cruise ship, a train, or an airplane).

[0208] An individual may have one or more risk factors for contracting a pathogenic infection (e.g., a Klebsiella infection), for example, age, antibiotic use, corticosteroid use, hospitalization, ventilation, use of an i.v. or urinary catheter, surgery, wounds, diabetes, alcohol use, COPD, chronic liver disease, lung disease, kidney failure, dialysis, solid-organ transplantation, cancer, and/or chemotherapy. In some aspects, an individual does not have any risk factors for contracting a pathogenic infection (e.g., a Klebsiella infection). Accordingly, in certain aspects, bacteriophages of the disclosure may be administered to an individual before, during, and/or after the individual develops one or more risk factors for contracting a pathogenic infection (e.g., a Klebsiella infection). For example, any one or more bacteriophage of the disclosure (e.g., ΦER1, ΦER2, ΦER3, ΦER4, ΦER5, ΦER6, ΦER7/ΦER10, ΦER8, ΦER11, ΦER12, ΦER13, ΦER14, ΦER15, ΦER16, ΦER18, ΦER20, ΦER21, ΦER22, ΦER23, ΦER27, ΦER32, ΦER36, ΦER37, ΦER38, ΦER39, ΦER43, ΦER44, ΦER45, ΦER46, ΦER47, ΦER48, ΦER49, ΦER50, ΦER51, ΦER52, ΦER53, ΦER54, ΦER55, ΦMM1, ΦMM2, ΦMM3, ΦMM4, ΦMM5, ΦMM6, ΦMM7, ΦMM8, and/or ΦMM9. In some aspects, ΦER3, ΦER11, ΦER12, ΦER15, ΦER16, ΦER27, ΦER36, ΦER39, ΦER43, ΦER46, ΦMM7, and/or ΦMM9) may be administered to an individual before, during, and/or after insertion of an i.v. or urinary catheter, thereby treating or preventing a pathogenic infection (e.g., a Klebsiella infection).

[0209] An individual receiving a treatment of the disclosure may be an immunosuppressed individual. An immunosuppressed individual may be an individual having, for example, an immune cell defect, asplenia, impaired splenic function, nephrotic syndrome, or an autoimmune condition. An immunosuppressed individual may be an individual subject to immunosuppressive conditions, for example chemotherapeutic agents or immunosuppressant agents (e.g., a glucocorticoid, a calcineurin inhibitor, an antimetabolite, a medication to reduce stomach acid such as a proton pump inhibitor, or an antibody therapy). Accordingly, in certain aspects, bacteriophages of the disclosure may be administered to an individual before, during, and/or after subjecting the individual to immunosuppressive conditions. For example, any one or more bacteriophage of the disclosure (e.g., ΦER1, ER2, ΦER3, ΦER4, ΦER5, ΦER6, ΦER7/ΦER10, ΦER8, ΦER11, ΦER12, ΦER13, ΦER14, ΦER15, ΦER16, ΦER18, ΦER20, ΦER21, ΦER22, ΦER23, ΦER27, ΦER32, ΦER36, ΦER37, ΦER38, ΦER39, ΦER43, ΦER44, ER45, ΦER46, ΦER47, ΦER48, ΦER49, ΦER50, ΦER51, ΦER52, ΦER53, ΦER54, ΦER55, ΦMM1, ΦMM2, ΦMM3, ΦMM4, ΦMM5, ΦMM6, ΦMM7, ΦMM8, and/or ΦMM9. In some aspects, ΦER3, ΦER11, ΦER12, ΦER15, ΦER16, ΦER27, ΦER36, ΦER39, ΦER43, ΦER46, ΦMM7, and/or ΦMM9) may be administered to an individual having cancer during treatment with chemotherapy, thereby treating or preventing a pathogenic Klebsiella infection.

[0210] The bacteriophage of the disclosure may be administered with one or more other treatments for Klebsiella infection, for example, cephalosporins (e.g., cefotaxime, ceftriaxone), quinolones, carbapenems (e.g., imipenem, cilastatin), minoglycosides (e.g., gentamicin, amikacin), ceftazidime/avibactam, ceftolozane/tazobactam, meropenem/vaborbactam, aztreonam, ampicillin/sulbactam, piperacillin/tazobactam, ticarcillin/clavulanate, ceftazidime, cefepime, levofloxacin, norfloxacin, moxifloxacin, meropenem, ertapenem, or a combination thereof. The bacteriophage and treatment(s) for Klebsiella infection may be administered in any order (e.g., simultaneously or sequentially). The bacteriophage and treatment(s) for Klebsiella infection may be comprised in the same or different compositions.

### III. Pharmaceutical Compositions

[0211] In certain aspects, the compositions or agents for use in the disclosed methods include 1, 2, 3, 4, 5, 6, 7, 8, 9, 10, or more bacteriophage(s). In certain aspects, the compositions or agents for use in the disclosed methods include ΦER1, ΦER2, ΦER3, ΦER4, ΦER5, ΦER6, ΦER7/ΦER10, ΦER8, ΦER11, ΦER12, ΦER13, ΦER14, ΦER15, ΦER16, ΦER18, ΦER20, ΦER21, ΦER22, ΦER23, ΦER27, ΦER32, ΦER36, ΦER37, ER38, ΦER39, ΦER43, ΦER44, ER45, ΦER46, ΦER47, ΦER48, ER49, ΦER50, ΦER51, ΦER52, ΦER53, ΦER54, ΦER55, ΦMM1, ΦMM2, ΦMM3, ΦMM4, ΦMM5, ΦMM6, ΦMM7, ΦMM8, and/or ΦMM9. Any one or more of the foregoing bacteriophage may be excluded from a composition or as an agent for use in the methods disclosed herein.

[0212] In some aspects, ΦER3, ΦER11, ΦER12, ΦER15, ΦER16, ΦER27, ΦER36, ΦER39, ΦER43, ΦER46, ΦMM7, and/or ΦMM9, are suitably contained in a pharmaceutically acceptable carrier. In some aspects, ΦER12, ΦER15, ΦER16, ΦER39, ΦER46, or any combination thereof, are suitably contained in a pharmaceutically acceptable carrier. In some aspects, ΦER3, ΦER11, ΦER27, ER36, ΦMM9, or any combination thereof, are suitably contained in a pharmaceutically acceptable carrier. In some aspects, ΦER15, ER27, ΦER43, ΦER46, ΦMM7, or any combination thereof, are suitably contained in a pharmaceutically acceptable carrier.

[0213] In some aspects, the carrier is non-toxic, biocompatible, and is selected so as not to detrimentally affect the biological activity of the agent. The agents in some aspects of the disclosure may be formulated into preparations for local delivery (i.e., to a specific location of the body) or systemic delivery, in solid, semi-solid, gel, liquid, or gaseous forms such as tablets, capsules, powders, granules, ointments, solutions, depositories, inhalants, and injections allowing for oral, parenteral, or surgical administration. Certain aspects of the disclosure also contemplate local administration of the compositions by coating medical devices and the like.

[0214] Suitable carriers for parenteral delivery via injectable, infusion, or irrigation and topical delivery include distilled water, physiological phosphate-buffered saline, normal or lactated Ringer's solutions, dextrose solution, Hank's solution, or propanediol. In addition, sterile, fixed oils may be employed as a solvent or suspending medium. For this purpose, any biocompatible oil may be employed including synthetic mono- or diglycerides. In addition, fatty acids such as oleic acid find use in the preparation of injectables. The carrier and agent may be compounded as a liquid, suspension, polymerizable or non-polymerizable gel, paste or salve.

[0215] The carrier may also comprise a delivery vehicle to sustain (i.e., extend, delay or regulate) the delivery of the agent(s) or to enhance the delivery, uptake, stability, or pharmacokinetics of the therapeutic agent(s). Such a delivery vehicle may include, by way of non-limiting examples, microparticles, microspheres, nanospheres, or nanoparticles composed of proteins, liposomes, carbohydrates, synthetic organic compounds, inorganic compounds, polymeric or copolymeric hydrogels, and polymeric micelles.

[0216] In certain aspects, the actual dosage amount of a composition administered to a patient or subject can be determined by physical and physiological factors such as body weight, severity of condition, the type of disease being treated, previous or concurrent therapeutic interventions, idiopathy of the patient, and the route of administration. The practitioner responsible for administration will, in any event, determine the concentration of active ingredient(s) in a composition and appropriate dose(s) for the individual subject.

[0217] Solutions of pharmaceutical compositions can be prepared in water suitably mixed with a surfactant, such as hydroxypropylcellulose. Dispersions also can be prepared in glycerol, liquid polyethylene glycols, mixtures thereof, and in oils. Under ordinary conditions of storage and use, these preparations contain a preservative to prevent the growth of microorganisms.

[0218] In certain aspects, the pharmaceutical compositions are advantageously administered in the form of injectable compositions either as liquid solutions or suspensions; solid forms suitable or solution in, or suspension in, liquid prior to injection may also be prepared. These preparations also may be emulsified. A typical composition for such purpose comprises a pharmaceutically acceptable carrier. For instance, the composition may contain 10 mg or less, 25 mg, 50 mg or up to about 100 mg of human serum albumin per milliliter of phosphate buffered saline. Other pharmaceutically acceptable carriers include aqueous solutions, non-toxic excipients, including salts, preservatives, buffers and the like.

[0219] Examples of non-aqueous solvents are propylene glycol, polyethylene glycol, vegetable oil, and injectable organic esters such as ethyloleate. Aqueous carriers include water, alcoholic/aqueous solutions, saline solutions, parenteral vehicles such as sodium chloride, Ringer's dextrose, etc. Intravenous vehicles include fluid and nutrient replenishers. Preservatives include antimicrobial agents, antifungal agents, anti-oxidants, chelating agents and inert gases. The pH and exact concentration of the various components of the pharmaceutical composition are adjusted according to well-known parameters.

[0220] Additional formulations are suitable for oral administration. Oral formulations include such typical excipients as, for example, pharmaceutical grades of mannitol, lactose, starch, magnesium stearate, sodium saccharine, cellulose, magnesium carbonate, and the like. The compositions take the form of solutions, suspensions, tablets, pills, capsules, sustained release formulations, or powders.

[0221] In further aspects, the pharmaceutical compositions may include classic pharmaceutical preparations. Administration of pharmaceutical compositions according to certain aspects may be via any common route so long as the target tissue is available via that route. This may include oral, nasal, buccal, rectal, vaginal or topical. Alternatively, administration may be by orthotopic, intradermal, subcutaneous, intramuscular, intraperitoneal or intravenous injection. Such compositions would normally be administered as pharmaceutically acceptable compositions that include physiologically acceptable carriers, buffers, or other excipients. For treatment of conditions of the lungs, aerosol delivery can be used. Volume of the aerosol may be between about 0.01 ml and 0.5 ml, for example.

[0222] An effective amount of the pharmaceutical composition is determined based on the intended goal. The term “unit dose” or “dosage” refers to physically discrete units suitable for use in a subject, each unit containing a predetermined-quantity of the pharmaceutical composition calculated to produce the desired responses discussed above in association with its administration, i.e., the appropriate route and treatment regimen. The quantity to be administered, both according to number of treatments and unit dose, depends on the protection or effect desired.

[0223] Precise amounts of the pharmaceutical composition also depend on the judgment of the practitioner and are peculiar to each individual. Factors affecting the dose include the physical and clinical state of the patient, the route of administration, the intended goal of treatment (e.g., alleviation of symptoms versus cure) and the potency, stability, and toxicity of the particular therapeutic substance.

[0224] It is contemplated that other agents may be used in combination with certain aspects of the present disclosure to improve the therapeutic efficacy of treatment. These additional agents include agents having antibacterial properties (e.g., antibiotics). For example, one or more therapeutic phage of the disclosure may be used in combination with one or more antibiotics. Various antibiotics are recognized in the art and contemplated herein including, for example, cephalosporins ceftriaxone), carbapenems (e.g., (e.g., cefotaxime, imipenem/cilastatin, meropenem, ertapenem), aminoglycosides (e.g., gentamicin, amikacin), beta-lactams (e.g., ceftolozane/tazobactam, ceftazidime/avibactam, vaborbactam), quinolones (e.g., ciprofloxacin, levofloxacin, norfloxacin, moxifloxacin), ampicillin, avibactam, aztreonam, rifampin, sulbactam, piperacillin, tazobactam, ticarcillin, clavulanate, ceftazidime, cefepime, colistin, tigecycline, trimethoprim, sulfamethoxazole, metronidazole, or combinations of any two or more of the foregoing.

### IV. Devices

[0225] Also contemplated herein, in some aspects, are devices (e.g., medical devices) comprising one or more bacteriophages or bacteriophage compositions of the present disclosure. A device of the disclosure may comprise 1, 2, 3, 4, 5, 6, 7, 8, 9, 10 or more bacteriophage(s). A device of the disclosure may comprise one or more of ΦER1, ΦER2, ΦER3, ER4, ΦER5, ΦER6, ΦER7/ΦER10, ΦER8, ΦER11, ΦER12, ΦER13, ΦER14, ΦER15, ΦER16, ΦER18, ΦER20, ΦER21, ΦER22, ΦER23, ΦER27, ΦER32, ER36, ΦER37, ΦER38, ΦER39, ΦER43, ΦER44, ΦER45, ΦER46, ΦER47, ΦER48, ΦER49, ΦER50, ΦER51, ΦER52, ΦER53, ΦER54, ΦER55, ΦMM1, ΦMM2, ΦMM3, ΦMM4, ΦMM5, ΦMM6, ΦMM7, ΦMM8, and/or ΦMM9. Any one or more of the foregoing bacteriophage(s) may be excluded from a device of the disclosure. In some aspects, a device of the disclosure may comprise ΦER3, ΦER11, ΦER12, ΦER15, ΦER16, ΦER27, ΦER36, ΦER39, ΦER43, ΦER46, ΦMM7, and/or ΦMM9, or one or more compositions thereof. In some aspects, the device comprises ΦER3 or a composition thereof. In some aspects, the device comprises ΦER11 or a composition thereof. In some aspects, the device comprises ΦER12 or a composition thereof. In some aspects, the device comprises ΦER15 or a composition thereof. In some aspects, the device comprises ΦER16 or a composition thereof. In some aspects, the device comprises ΦER27 or a composition thereof. In some aspects, the device comprises ΦER36 or a composition thereof. In some aspects, the device comprises ΦER39 or a composition thereof. In some aspects, the device comprises ΦER43 or a composition thereof. In some aspects, the device comprises ΦER46 or a composition thereof. In some aspects, the device comprises ΦMM7 or a composition thereof. In some aspects, the device comprises ΦMM9 or a composition thereof. In some aspects, the device comprises two or more of ΦER1, ΦER2, ΦER3, ΦER4, ΦER5, ΦER6, ΦER7/ΦER10, ΦER8, ΦER11, ΦER12, ΦER13, ΦER14, ΦER15, ΦER16, ΦER18, ΦER20, ΦER21, ΦER22, ΦER23, ΦER27, ΦER32, ΦER36, ΦER37, ΦER38, ΦER39, ΦER43, ΦER44, ΦER45, ΦER46, ΦER47, ΦER48, ΦER49, ΦER50, ΦER51, ΦER52, ΦER53, ΦER54, ΦER55, ΦMM1, ΦMM2, ΦMM3, ΦMM4, ΦMM5, ΦMM6, ΦMM7, ΦMM8, and/or ΦMM9. In some aspects, ΦER3, ΦER11, ΦER12, ΦER15, ΦER16, ΦER27, ΦER36, ΦER39, ΦER43, ΦER46, ΦMM7, and/or ΦMM9, or one or more compositions thereof. In some aspects, the device comprises three or more of ΦER1, ΦER2, ΦER3, ΦER4, ΦER5, ER6, ΦER7/ΦER10, ΦER8, ΦER11, ΦER12, ER13, ΦER14, ΦER15, ΦER16, ΦER18, ΦER20, ΦER21, ΦER22, ΦER23, ΦER27, ER32, ΦER36, ΦER37, ΦER38, ΦER39, ΦER43, ΦER44, ΦER45, ΦER46, ΦER47, ER48, ΦER49, ΦER50, ΦER51, ΦER52, ΦER53, ΦER54, ΦER55, ΦMM1, ΦMM2, ΦMM3, ΦMM4, ΦMM5, ΦMM6, ΦMM7, ΦMM8, and/or ΦMM9. In some aspects, ΦER3, ER11, ΦER12, ΦER15, ΦER16, ΦER27, ΦER36, ΦER39, ΦER43, ΦER46, ΦMM7, and/or ΦMM9, or one or more compositions thereof. In some aspects, the device comprises four or more of ΦER1, ΦER2, ΦER3, ΦER4, ΦER5, ΦER6, ΦER7/ΦER10, ΦER8, ΦER11, ΦER12, ΦER13, ΦER14, ΦER15, ΦER16, ΦER18, ΦER20, ΦER21, ΦER22, ΦER23, ΦER27, ΦER32, ΦER36, ΦER37, ΦER38, ΦER39, ΦER43, ΦER44, ΦER45, ΦER46, ΦER47, ΦER48, ΦER49, ΦER50, ΦER51, ΦER52, ΦER53, ΦER54, ΦER55, ΦMM1, ΦMM2, ΦMM3, ΦMM4, ΦMM5, ΦMM6, ΦMM7, ΦMM8, and/or ΦMM9. In some aspects, ΦER3, ΦER11, ΦER12, ΦER15, ΦER16, ΦER27, ΦER36, ΦER39, ΦER43, ΦER46, ΦMM7, and/or ΦMM9, or one or more compositions thereof.

[0226] In some aspects, the device comprises ΦER12, ΦER15, ΦER16, ΦER39, ΦER46, or any combination thereof. In some aspects, the device comprises ΦER3, ΦER11, ΦER27, ΦER36, ΦMM9, or any combination thereof. In some aspects, the device comprises ΦER15, ΦER27, ΦER43, ΦER46, ΦMM7, or any combination thereof.

[0227] In some aspects, the device comprises one of the bacteriophage combinations of Table 1, other bacteriophage combinations completed herein, or one or more compositions thereof.

[0228] A device is described herein as “comprising” a bacteriophage or bacteriophage composition where the device has in, on, or around it, or is attached to, the bacteriophage or bacteriophage composition. In some aspects, a device of the disclosure is a medical device. In such cases, it may be desirable for a medical device to comprise bacteriophages capable of treating or preventing a pathogenic infection, such as a Klebsiella infection. Various medical devices are recognized in the art and contemplated herein. Examples of devices contemplated herein include, but are not limited to, a catheter, drive line, syringe, tube, implant, defibrillator, artificial joint, pacemaker, screw, rod, disc, intrauterine device, pin, plate, stent, dental device, eye lens, shunt, valve, neurological or neurosurgical device, gastrointestinal device, genitourinary device, catheter cuff, vascular access device, and wound drain. In some aspects, the device is a stent. In some aspects, the device is a catheter. In some aspects, the device is an implant.

[0229] Aspects of the disclosure comprise methods for preparing a device comprising subjecting a device to a bacteriophage or composition thereof of the disclosure (e.g., a bacteriophage composition comprising ΦER1, ΦER2, ΦER3, ΦER4, ΦER5, ΦER6, ΦER7/ΦER10, ΦER8, ΦER11, ΦER12, ΦER13, ΦER14, ΦER15, ΦER16, ΦER18, ΦER20, ΦER21, ΦER22, ΦER23, ΦER27, ΦER32, ΦER36, ΦER37, ΦER38, ΦER39, ΦER43, ΦER44, ΦER45, ΦER46, ΦER47, ΦER48, ΦER49, ΦER50, ΦER51, ΦER52, ΦER53, ΦER54, ΦER55, ΦMM1, ΦMM2, ΦMM3, ΦMM4, ΦMM5, ΦMM6, ΦMM7, ΦMM8, and/or ΦMM9). In some aspects, methods for preparing a device comprise subjecting a device to a bacteriophage or composition thereof of the disclosure (e.g., a bacteriophage composition comprising ΦER3, ΦER11, ΦER12, ΦER15, ΦER16, ΦER27, ΦER36, ΦER39, ΦER43, ΦER46, ΦMM7, and/or ΦMM9). Disclosed are methods comprising placing a bacteriophage or composition thereof on a device, placing a bacteriophage or composition thereof around a device, placing a bacteriophage or composition thereof in a device, and coating a device with a bacteriophage or composition thereof (e.g., coating one or more surfaces of a device). Aspects further comprise delivering the device to an individual following such preparation.

### V. Kits

[0230] Any of the compositions described herein may be comprised in a kit. In a non-limiting example, phage, reagents to produce or isolate phage, vectors, and reagents to produce vectors, and/or components thereof may be comprised in a kit. In certain aspects, phage may be comprised in a kit. Such a kit may or may not have one or more reagents for manipulation of phage. Such reagents include small molecules, proteins, nucleic acids, antibodies, buffers, primers, nucleotides, salts, and/or a combination thereof, for example. Nucleotides that encode components of phage may be included in the kit, including reagents to generate same.

[0231] In particular aspects, the kit comprises one or more bacteriophages, and/or pharmaceutical compositions comprising the same, alone or in any together with a pharmaceutically acceptable carrier or excipient. In some cases, the kit, in addition to the one or more bacteriophages, also includes an additional therapy, such as a treatment for Klebsiella infection, for example, cephalosporins (e.g., cefotaxime, ceftriaxone), quinolones, carbapenems (e.g., imipenem, cilastatin), minoglycosides (e.g., gentamicin, amikacin), ceftazidime/avibactam, ceftolozane/tazobactam, meropenem/vaborbactam, aztreonam, ampicillin/sulbactam, piperacillin/tazobactam, ticarcillin/clavulanate, ceftazidime, cefepime, levofloxacin, norfloxacin, moxifloxacin, meropenem, ertapenem, or a combination thereof. The kit(s) may be tailored to a particular disease, disorder, or condition for an individual and comprise respective additional therapies for the individual.

[0232] A kit may comprise, comprise at least, or comprise at most 1, 2, 3, 4, 5, 6, 7, 8, 9, or 10 different bacteriophages, or more. In some aspects, a kit of the disclosure comprises at least, as most, or exactly 1, 2, 3, 4, 5, 6, 7, 8, 9, 10, 11, 12, 13, 14, 15, 16, 17, 18, 19, 20, 21, 22, 23, 24, 25, 26, 27, 28, 29, 30, 31, 32, 33, 34, 35, 36, 37, 38, 39, 40, 41, 42, 43, 44, 45, 46, 47, 48, 49, 50, 51, 52, 53, 54, 55, 56, 57, 58, 59, 60, 61, 62, 63, 64, 65, 66, 67, 68, 69, 70, 71, 72, 73, or all of ΦER1, ΦER2, ΦER3, ΦER4, ΦER5, ΦER6, ΦER7/ΦER10, ΦER8, ΦER11, ΦER12, ΦER13, ΦER14, ΦER15, ΦER16, ΦER18, ΦER20, ΦER21, ΦER22, ΦER23, ΦER27, ΦER32, ΦER36, ΦER37, ΦER38, ΦER39, ΦER43, ΦER44, ΦER45, ΦER46, ΦER47, ΦER48, ΦER49, ΦER50, ΦER51, ΦER52, ΦER53, ΦER54, ΦER55, ΦMM1, ΦMM2, ΦMM3, ΦMM4, ΦMM5, ΦMM6, ΦMM7, ΦMM8, and/or ΦMM9. In some aspects, ΦER3, ΦER11, ΦER12, ΦER15, ΦER16, ΦER27, ΦER36, ΦER39, ΦER43, ΦER46, MM7, and/or ΦMM9. In some aspects, a kit of the disclosure comprises at least, at most, or exactly 1, 2, 3, 4, or more of ΦER3, ΦER11, ER12, ΦER15, ΦER16, ΦER27, ΦER36, ΦER39, ΦER43, ΦER46, ΦMM7, and ΦMM9. One or more phage(s) may be specifically excluded from certain aspects. In some aspects, a kit of the disclosure comprises ΦER3 or a composition thereof. In some aspects, a kit of the disclosure comprises ΦER11 or a composition thereof. In some aspects, a kit of the disclosure comprises ΦER12 or a composition thereof. In some aspects, a kit of the disclosure comprises ΦER15 or a composition thereof. In some aspects, a kit of the disclosure comprises ΦER16 or a composition thereof. In some aspects, a kit of the disclosure comprises ΦER27 or a composition thereof. In some aspects, a kit of the disclosure comprises ΦER36 or a composition thereof. In some aspects, a kit of the disclosure comprises ΦER39 or a composition thereof. In some aspects, a kit of the disclosure comprises ΦER43 or a composition thereof. In some aspects, a kit of the disclosure comprises ΦER46 or a composition thereof. In some aspects, a kit of the disclosure comprises ΦMM7 or a composition thereof. In some aspects, a kit of the disclosure comprises ΦMM9 or a composition thereof. In some aspects, a kit of the disclosure comprises two or more of ΦER3, ΦER11, ΦER12, ΦER15, ΦER16, ΦER27, ΦER36, ΦER39, ΦER43, ΦER46, ΦMM7, and ΦMM9, or one or more compositions thereof. In some aspects, a kit of the disclosure comprises three or more of ΦER3, ΦER11, ΦER12, ΦER15, ΦER16, ΦER27, ΦER36, ΦER39, ΦER43, ΦER46, ΦMM7, and ΦMM9, or one or more compositions thereof. In some aspects, a kit of the disclosure comprises four or more of ΦER3, ΦER11, ΦER12, ΦER15, ΦER16, ΦER27, ΦER36, ΦER39, ΦER43, ΦER46, ΦMM7, and ΦMM9, or one or more compositions thereof.

[0233] In some aspects, kit of the disclosure comprises ΦER12, ΦER15, ΦER16, ΦER39, ΦER46, or any combination thereof. In some aspects, kit of the disclosure comprises ΦER3, ΦER11, ΦER27, ΦER36, ΦMM9, or any combination thereof. In some aspects, kit of the disclosure comprises ΦER15, ΦER27, ΦER43, ΦER46, ΦMM7, or any combination thereof.

[0234] In some aspects, a kit of the disclosures comprises one of the bacteriophage combinations of Table 1, other bacteriophage combinations completed herein, or one or more compositions thereof.

[0235] The kit can further comprise a package insert comprising instructions to treat or delay progression of disease, for example, Klebsiella infection, in an individual or to enhance treatment of for a Klebsiella infection. Any of the one or more bacteriophages, and/or pharmaceutical compositions comprising the same, alone or in any together with a pharmaceutically acceptable carrier or excipient, as described herein, may be included in the article of manufacture or kits. Kits may comprise components, which may be individually packaged or placed in a container. Suitable containers include, for example, bottles, vials, bags, tubes, syringes, and other suitable container means. The container may be formed from a variety of materials such as glass, plastic (such as polyvinyl chloride or polyolefin), or metal alloy (such as stainless steel or hastelloy). In some embodiments, the container holds the formulation and the label on, or associated with, the container may indicate directions for use. The article of manufacture or kit may further include other materials desirable from a commercial and user standpoint, including other buffers, diluents, filters, needles, syringes, and package inserts with instructions for use. In some embodiments, the article of manufacture further includes one or more of another agent (e.g., a treatment for Klebsiella infection, for example, cephalosporins (e.g., cefotaxime, ceftriaxone), quinolones, carbapenems (e.g., imipenem, cilastatin), minoglycosides (e.g., gentamicin, amikacin), ceftazidime/avibactam, ceftolozane/tazobactam, meropenem/vaborbactam, aztreonam, ampicillin/sulbactam, piperacillin/tazobactam, ticarcillin/clavulanate, ceftazidime, cefepime, levofloxacin, norfloxacin, moxifloxacin, meropenem, ertapenem, or a combination thereof). Suitable containers for the one or more agent include, for example, bottles, vials, bags and syringes.

[0236] A kit of the disclosure may further comprise a device. A kit may comprise a device having one or more bacteriophage or compositions thereof of the disclosure on, in, and/or around the device. A kit may comprise a device separate from one or more bacteriophage or compositions thereof.

[0237] Individual components may also be provided in a kit in concentrated amounts; in some aspects, a component is provided individually in the same concentration as it would be in a solution with other components. Concentrations of components may be provided as 1×, 2×, 5×, 10×, or 20× or more.

### EXAMPLES

[0238] The following examples are included to demonstrate certain aspects of the disclosure. It should be appreciated by those of skill in the art that the techniques disclosed in the examples which follow represent techniques discovered by the inventor to function well in the practice of the disclosure, and thus can be considered to constitute certain modes for its practice. However, those of skill in the art should, in light of the present disclosure, appreciate that many changes can be made in the specific aspects which are disclosed and still obtain a like or similar result without departing from the spirit and scope of the disclosure.

### Example 1—Identification of Bacteriophage of Interest

[0239] A collection of bacteriophages that can infect clinical Klebsiella isolates were isolated from sewage. FIG. 1 shows electron microscopy of representative bacteriophage that infect Klebsiella, according to some aspects of the disclosure. FIG. 2 shows the phylogenetic relationship of representative bacteriophage that infect Klebsiella, according to some aspects of the disclosure. FIG. 3 shows the ability of various bacteriophage to infect clinical Klebsiella strains, according to some aspects of the disclosure.

[0240] Through selection on a variety of different Klebsiella hosts, including carbapenem-resistant strains of K. pneumoniae (MH258, BAA-2472, MGH78578, JHCK1, and BAA-2342) and extended-spectrum beta-lactamase (ESBL) positive strains of K. quasipneumoniae (K6), phages representing the major families of tailed phages were isolated. Two of these host bacteria (MH258 and BAA-2342) belong to sequence type 258 (ST258) strains of K. pneumoniae that account for the majority of carbapenem-resistant infections in the United States (Wyres, K. L., Lam, M. M. C., and Holt, K. E. (2020)). With future considerations for cocktails (where resistance could result in acapsular variants), a subset of the phages was isolated on non-capsulated variants of MH258, JHCK1, and K6. The isolated phages reported herein are all obligately lytic and lack any deleterious genes that may contraindicate them for therapy (e.g., antibiotic resistance, virulence, or toxin genes). Genomic content and synteny was largely shared between phages in the same genus, with the highest degree of diversity in annotated receptor binding proteins, hypothetical proteins, or homing endonucleases.

[0241] Four distinct families of T4-like phages including 19 T4-like Straboviridae were identified (FIG. 31A). These included 12 Slopekviruses and one Pseudotevenvirus (in red), 2 Marfaviruses (in teal), and 5 Jiaodaviruses (in blue), which belong to the Tevenvirinae subfamily and are more similar to bacteriophage T4. The phages produced tiny pinprick plaques on a capsulated host and larger plaques on a non-capsulated host. The Tevenvirinae contain multiple tRNA genes, while the Slopekviruses only have one tRNA gene. Bacteriophage T4 contains 8 tRNA genes, while the reported Tevenvirinae contain more, up to 15. The presence of the tRNAs may facilitate translation of phage proteins after destruction of the host machinery and allow for codon preference of the phage genes compared to the host. These bacteriophages recognize lipopolysaccharide (LPS) of host bacteria as the receptor for entry, and bacterial resistance to the bacteriophage can be mediated by mutations to genes involved in LPS synthesis.

[0242] Also identified were Ackermannviridae (FIG. 31B), once classified as Myoviridae, which are large phages (160 kb) with a large head and medium tail. The tail fibers are present as rosettes at the tip of the tail. The phages make medium sized plaques surrounded by a halo. These bacteriophages use a capsule for bacterial strain recognition and entry, and bacterial resistance to the bacteriophage is by capsule loss, with non-capsulated bacterial being less virulent. The tail fibers of the bacteriophage recognize the host bacteria capsule, and over 100 different Klebsiella capsule types have been identified. These phages do not plaque on or infect strains lacking a capsule. The Ackermannviridae also contain 5-6 tRNA genes.

[0243] One other phage that formerly would have been classified as Myoviridae was also identified: a vRV-like Vequintavirinae subfamily, Mydovirus genus (143 kb) (FIG. 31C).

[0244] Also identified were two T7-like Autographviridae (FIG. 31B), which are small (40 kb) Podoviruses, with a small head and a very short tail. The plaques are medium sized with a very large halo that increases over time as a depolymerase diffuses outwards. The T7-like phages have their own DNA and RNA polymerases. Two T7-like phages were isolated, and another Podovirus, ΦER49, related to the bacteriophage N4, which at 77 kb, also formed a small head and no tail, but was taxonomically distinct (Schitoviridae family) was also isolated (FIG. 31C).

[0245] Also identified were two T5-like Demerecviridae, which are formerly Siphoviridae with a medium head (110 kb) and a long tail (FIG. 31B). T5-like phages contain proteins A1 and A2, which facilitate transfer and degradation of the host DNA after the first portion of the DNA is inject in a two-step process. When assembling the genome of Demerecviridae, an increase in read depth for the initial 9.2 kb (8% of the genome) was observed. The two Demerecviridae also contain a large (>10 kb) tail fiber gene, similar to phage vB_Kpn_B01. Like bacteriophages T4 and T5, phages ΦER46 and ΦER52 also contain multiple tRNA genes, as many as 21 (including two tRNA-Met genes).

[0246] Also isolated were seven T1-like Drexlerviridae, also formerly Siphoviridae, which have a small head (50 kb) and a very long contractile tail (FIG. 31B). Ten of these phages were isolated in the Webervirus genus. Phages ΦER10 and ΦER55 were isolated on non-capsulated strains. In general, the T1-like phages tended to plaque more broadly on non-capsulated Klebsiella strains.

[0247] The remaining 10 phages cluster together in an unclassified Siphoviridae family, a proposed name for which is Purpuraviridae (FIG. 31C). These phages are small (48 kb) with a long tail, medium-sized plaques, and moderate virulence in liquid assays (FIG. 36B) and have yet to be thoroughly studied or employed in therapeutic settings. These bacteriophages recognize protein receptors of host bacteria as the receptor for entry, and bacterial resistance to the bacteriophage is generally by mutation to the receptor.

### Example 2—Characterization of Bacteriophage Host Range

[0248] The host-range of the isolated Klebsiella phages was assessed on 27 different Klebsiella strains that span 23 sequence types (STs) (including clinically-relevant ST14, ST37, and ST25829), 21 capsule types, and 8 O-antigen types (FIG. 32). Additionally, the strain set includes carbapenem-resistant and ESBL positive strains as well as 14 new clinical isolates from recurrent urinary tract infections. Although strains exhibited varying levels of susceptibility to the phages, each strain was susceptible to multiple bacteriophages.

[0249] Bacteria can avoid phage infection through a variety of means, including preventing phage adsorption by lacking the proper receptor, degrading the injected phage DNA, and various abortive infection strategies (Huiting, E., and Bondy-Denomy, J. (2023); Labrie, S. J., Samson, J. E., and Moineau, S. (2010)). A phage with a broad host range will likely infect using a conserved receptor on the bacterial surface and contain anti-defense systems, such as DNA modifications, lack of restriction sites, or anti-CRISPR proteins (Li, Y., and Bondy-Denomy, J. (2021)). Phages with narrow host range tend to be the T1-like Drexlerviridae (green), the Ackermannviridae (yellow), the Podoviruses (brown and grey), and also the one vR5-like virus (lime green). Also isolated were numerous T1-like viruses on non-capsulated Klebsiella strains (FIG. 32), which are likely prevented from entry by the capsule. On the other hand, the Ackermannviridae require specific capsule types for entry and are thus excluded by most capsule types.

[0250] Phages with broad host ranges include the T4-like Straboviridae phages (shown in red, blue, and teal), the class of Siphoviridae shown in Purple (proposed Purpuraviridae), and the T5-like viruses shown in orange. T4 is known to modify its DNA by incorporating hydroxymethyl-cytosine (HMC) instead of cytosine and glycosylating that residue to prevent recognition by the host defense systems. Indeed, both the blue Tevenvirinae and red Slopekviruses contain genes for a putative dCMP hydroxymethylase and the blue Tevenvirinae also contain a beta-glucosyl-HMC-alpha-glucosyl-transferase. Additionally, the red Slopekviruses also lack KpnI restriction sites, presumably to prevent degradation by that Klebsiella pneumoniae restriction enzyme. The Purpuraviridae are currently understudied and do not possess any hallmark proteins that suggest resistance to anti-phage systems. However, their genomes are devoid of KpnI restriction sites, which would allow for evasion of restriction-modification systems.

### Example 3—Characterization of Bacteriophage of Interest

[0251] The collection of bacteriophages that can infect clinical Klebsiella isolates were assessed for their ability to infect clinical Klebsiella strains (FIG. 3; darker shading is indicative of a greater ability of the bacteriophage to infect the clinical Klebsiella strains; scale of 0=no infection to 3=complete lysis; “na” indicates no data).

[0252] FIG. 4 shows phage adsorption kinetics for various bacteriophage of interest. ΦER12 and ΦER15 displayed rapid binding to bacterial cell surface. ΦER16, ΦER39, and ΦER3 also showed binding to the bacterial cell surface.

[0253] FIGS. 5A-5C show pH tolerance of representative bacteriophage disclosed herein. All bacteriophages were inactivated by pH 2.6. T4-like bacteriophage (e.g., φ8, ΦER11, ΦER15, ΦER16, ΦER27, φ32, and ΦER36) were not sensitive to pH 3.5 (FIGS. 5B, 5C), while Ackermannviridae family bacteriophage (e.g., ΦER12, φ14) were mildy sensitive to pH 3.5 (FIG. 5A), and Siphoviridae family bacteriophage (e.g., ΦER3, ΦER39) were very susceptible to pH 3.5 (FIG. 5A).

[0254] FIGS. 6A-6C show one-step growth of representative bacteriophage disclosed herein. Siphoviridae family bacteriophage (e.g., ΦER39) had a 40 min latent period and a 30-40× burst (FIG. 6A). T4-like bacteriophage (e.g., ΦER15) had a 20 min latent period and a 10-80× burst (FIG. 6B). Ackermannviridae family bacteriophage (e.g., ΦER12) had a 30 min latent period and a 10-80× burst (FIG. 6C).

### Example 4—Identification of Bacterial Host Factors Required for Phage Infection

[0255] Bacterial host factors required for bacteriophage infection were identified using a method illustrated by FIG. 13. To determine how the different phages enter the cells, we sought to identify the cell receptors and other host factors by using a transposon library of Klebsiella pneumoniae MH258, a carbapenem-resistant ST258 strain (Jung, H.-J., Littmann, E. R., Seok, R., Leiner, I. M., Taur, Y., Peled, J., van den Brink, M., Ling, L., Chen, L., Kreiswirth, B. N., et al. (2019)). We first used insertion sequencing (INSeq) (Goodman, A. L., McNulty, N. P., Zhao, Y., Leip, D., Mitra, R. D., Lozupone, C. a, Knight, R., and Gordon, J. I. (2009)) on ΦER15 and ΦER39 infected cultures to quantify the differential abundance of transposon mutants in uninfected and infected populations. Additionally, we identified transposon mutants that survived infection of ΦER12, ΦER15, ΦER16, ΦER39, or ΦER46 by the location of the transposon insertions with arbitrarily-primed nested PCR.

[0256] We first independently infected cultures with ΦER15 and ΦER39 for 3 hours. After extracting DNA from uninfected and infected cultures and processing for INSeq (Goodman, A. L., McNulty, N. P., Zhao, Y., Leip, D., Mitra, R. D., Lozupone, C. a, Knight, R., and Gordon, J. I. (2009)), we compared the pool of mutants before and after infection for an enrichment of interrupted genes in the presence of phage (FIG. 33I). The top ΦER15-enriched genes included walW (wabN; a polysaccharide deacetylase in the LPS pathway), galU (catalyzes the synthesis of UDP-D-glucose, a precursor in capsule and LPS biosynthesis), rfaZ (LPS biosynthesis) and tolB, a member of the envelope-spanning Tol-Pal system for cell division and outer membrane integrity. The top hits for ΦER39 included tolB, rfaZ, pstB (part of a phosphate-sensing system in the membrane), and csrD (sugar metabolism regulation). The INSeq method provides useful information at the population level and highlights processes in cell metabolism that may not just be as simple as a surface receptor Mutalik, V. K., Adler, B. A., Rishi, H. S., Piya, D., Zhong, C., Koskella, B., Kutter, E. M., Calendar, R., Novichkov, P. S., Price, M. N., et al. (2020)).

[0257] To complement the INSeq process, the transposon library of MH258 (a clinical isolate of multi-drug resistant ST258 Klebsiella pneumoniae) was infected with ΦER12, ΦER15, ΦER16, φ16e, ΦER39, ΦER46, or φ46e for 3 hours to lyse bacterial host cells, followed by culture of the surviving bacterial host cells overnight, plating of the cultured surviving bacterial host cells, confirmation of bacteriophage resistance of the surviving bacterial host cells, and identification of surviving bacterial host cell strains using arbitrarily-primed PCR for transposon location. ΦER16e and ΦER46e are evolved variants of ΦER16 and ΦER46, respectively, discussed in greater detail with respect to FIG. 36A.

[0258] After confirming resistance to the infecting phage, the location of the transposon insertions were identified (Table 2). As shown in FIG. 14 and FIG. 34, several Klebsiella factors were determined to be required for infection of Klebsiella with representative bacteriophage (e.g., ΦER12, ΦER15, ΦER16, φ16e, ΦER39, ΦER46, or φ46e).

TABLE 2

| Phage | Gene hit | Gene function | Capsulated | Times |
|---|---|---|---|---|
| ER12 | wzc | capsule transport | no | 2 |
| ER12 | wzi | capsule transport | no | 1 |
| ER15 | glycosyl | LPS biosynthesis | no | 1 |
| | transferase | | | |
| ER15 | rfaQ/walW | LPS biosynthesis | no | 2 |
| | promoter | | | |
| ER15 | walW | LPS biosynthesis | no | 1 |
| ER15 | rfaE/hldE | LPS biosynthesis, | partial | 1 |
| | | inner core | | |
| ER15 | rfaZ | LPS biosynthesis | no | 1 |
| ER16 | csrA promoter | Sugar metabolism | yes | 2 |
| ER16 | walW | LPS biosynthesis | no | 2 |
| ER16 | csrD | Sugar metabolism | yes | 2 |
| ER16 | rfaQ/walW | LPS biosynthesis | no | 2 |
| | promoter | | | |
| ER39 | waaH | LPS decoration | yes | 4 |
| ER39 | ompC | Outer membrane | yes | 2 |
| | | protein | | |
| ER46 | fhuA | Iron Transport | yes | 3 |
| | | protein | | |
| ER46 | wbaP | capsule biosynthesis | no | 1 |
| ER46 | wza | capsule transport | no | 1 |
| ER46 | wzc | capsule transport | no | 1 |
| Independent infections: | | | | |
| ER12 | 2 | | | |
| ER15 | 3 | | | |
| ER16 | 4 | | | |
| ER39 | 5 | | | |
| ER46 | 3 | | | |

[0259] For ΦER12, survivors of infection were always non-capsulated, and all non-capsulated MH258 strains were resistant to ΦER12. Three selected non-capsulated survivors from ΦER12 infection mapped to the capsule locus (wzi and wzc). For the T4-like Straboviridae ΦER15 and ΦER16, transposon hits to the LPS locus were expected, which is a known receptor for bacteriophage T4. Six hits were sequenced for ΦER15 and 8 hits for ΦER16, and the majority were indeed disruptions to LPS biosynthesis (glycosyltransferases, rfaZ KdoIII attachment to inner core, rfaE/hldE inner core building block, a divergent promoter to rfaQ addition of side branch to inner core and the walW polysaccharide deacetylase, and the walW gene itself; Table 2). In agreement with the INSeq data, survivors of ΦER16 were disrupted in csrD and in the promoter region of csrA (since csrA is known to be essential in E. coli grown in LB (Timmermans, J., and Van Melderen, L. (2009)). As a Siphovirus, suppressors of ΦER39 were expected to be a disruption to an outer membrane protein receptor. The top survivor hits were to ompC, an outer membrane protein, and to waaH, an LPS decoration protein. WaaH is responsible for the addition of a heptose III residue to the inner core of LPS, but it may also be an outer membrane-associated protein (Klein, G., Müller-Loennies, S., Lindner, B., Kobylak, N., Brade, H., and Raina, S. (2013)). OmpC is a canonical outer membrane receptor and is likely to be host receptor where the phage genome is injected. For the T5-like ΦER46e, hits were expected to be in fhuA (also known historically as tonA in E. coli for its resistance to bacteriophage T1, as well as being the receptor for T5). Indeed, most of the survivors of ΦER46e infection were transposon insertions in the fhuA3 gene of MH258. Since some of the surviving colonies were non-capsulated, three candidates were sequenced, and hits to the capsule biosynthesis pathway (wza, wzc, and wbaP) were found. Thus, ΦER46 requires both the host receptor protein FhuA3 and the capsule.

[0260] In summary, ΦER12, representing the Ackermannviridae, requires the capsule, andmutations in wzc, wbaP, and wzi capsule genes impaired infection by ΦER12 (FIG. 34A). ΦER15 and ΦER16, representing the T4-like Straboviridae, use the LPS, as mutations in rfaQ)/PSD promoters, wbaN (PSD), rfaE, and tolB LPS and membrane genes as well as csrD regulator genes impaired infection by ΦER15, and mutations in rfaQ/PSD promoters and wbaN (PSD) LPS genes as well as csrA and csrD regulator genes impaired infection by ΦER16 (FIG. 34A). ΦER39 (Siphoviridae) and ΦER46 (T5-like Demerecviridae) use outer membrane proteins such as OmpC and FhuA, respectively (FIG. 34A), as mutations in waaH, ompC, and tolB outer membrane protein genes impaired infection by ΦER39, and mutations in fhuA, wzc, wza, and wbaP outer membrane protein and capsule genes impaired infection by ΦER46. It was also found that the csrD carbohydrate regulator and the Tol-Pal membrane stability system influence the ability of the Straboviridae, Siphoviridae, and Demerecviridae to infect (FIG. 34A)

[0261] Clean deletions of the genes determined to be required for infection of Klebsiella with representative bacteriophage was performed in Klebsiella MH258, and the mutant Klebsiella MH258 strains were infected with various bacteriophage. To confirm the top hits from the INSeq and phage survivor screen, we selected the following eight genes to delete and complement: wbaP, wzc, walW, waaH, ompC, fhuA3, csrD, and tolB. Two of the gene deletions were constructed by homologous recombination with a plasmid integration intermediate (van Aartsen, J. J., and Rajakumar, K. (2011)), while the other six were constructed using the Lambda-Red method of deletion-replacement (Huang, T.-W., Lam, I., Chang, H.-Y., Tsai, S.-F., Palsson, B. O., and Charusanti, P. (2014); Sharan, S. K., Thomason, L. C., Kuznetsov, S. G., and Court, D. L. (2009)). All deleted genes contained the start codon and final six amino acids (based on those constructed in the Keio collection of E. coli mutants) to avoid potential downstream effects (Baba, T., Ara, T., Hasegawa, M., Takai, Y., Okumura, Y., Baba, M., Datsenko, K. A., Tomita, M., Wanner, B. L., and Mori, H. (2006)).

[0262] It was then determined whether the constructed mutant was resistant to the panel of five phages (ΦER12, ΦER15, ΦER16e, ΦER39, and ΦER46e) both by spot test with a high titer stock on a lawn of bacteria (FIG. 34B) and by measuring the area under the curve normalized to uninfected culture of kill curve assays in liquid broth (FIG. 34C and FIGS. 33A-H). For each mutant, each gene was complemented by providing a copy in trans with a constitutively expressed promoter. All the phenotypes described below in the deletion mutants were able to be mostly, if not fully, rescued by the presence of the plasmid.

[0263] Capsule Pathway Deletions. wbaP was deleted in Klebsiella MH258, and the wbaP deletion Klebsiella MH258 mutant (ΔwbaP) was treated with ΦER12 or ΦER46 (FIG. 15; FIG. 33B; FIG. 34). Deletion of wbaP in Klebsiella MH258 reduced infection and lysis by ΦER12 and ΦER46, whereas complementing the wbaP gene deletion (ΔwbaP pZE4D-wbaP) rescued the ability of ΦER12 and ΦER46 to infect and lyse the wbaP deletion Klebsiella MH258 mutant. wzc was deleted in Klebsiella MH258, and the wzc deletion Klebsiella MH258 mutant (Δwzc) was treated with ΦER12 or ΦER46 (FIG. 16; FIG. 33A; FIG. 34). Deletion of wzc in Klebsiella MH258 reduced infection and lysis by ΦER12 and to a lesser extent ΦER46, whereas complementing the wzc gene deletion (Δwzc pZE4D-wzc) rescued the ability of ΦER12 and ΦER46 to infect and lyse the wzc deletion Klebsiella MH258 mutant.

[0264] Both wbaP and wzc are part of the capsule biosynthesis operon, with WbaP (or WcaJ) performing the first step in assembly of the sugar oligomers and Wzc being a tyrosine protein kinase which helps regulate the transport of the capsule to the surface (Patro, L. P. P., and Rathinavelan, T. (2019)). ΔwbaP is completely unable to synthesize the capsule, while the Δwzc mutant still makes some capsule, but not to the wild-type levels, and most of the synthesized capsule is not on the cell surface. Both capsule mutants were fully resistant to ΦER12, showing the strong requirement of the Ackermannviridae for the Klebsiella capsule. Both ΔwbaP and Δwzc capsule mutants also showed resistance to ΦER46e in liquid culture. However, this T5-like phage can fully infect on a lawn of Δwzc and partially infect a lawn of ΔwbaP, indicating that ΦER46e likely utilizes the capsule as a co-receptor to stabilize phage-bacterial interaction. In liquid culture, the Δwzc mutant was partially resistant to ΦER16e, perhaps indicating that the capsule facilitates entry for T4-like Slopekviruses.

[0265] LPS Pathway Deletions. wbaN (also referred to herein as walW) was deleted in Klebsiella MH258, and the wbaN deletion Klebsiella MH258 mutant (ΔPSD) was treated with ΦER12, ΦER15, or ΦER16 (FIG. 17). Deletion of wbaN in Klebsiella MH258 reduced infection and lysis by ΦER15 or ΦER16 and to a lesser extent ΦER12, whereas complementing the wbaN gene deletion (ΔPSD pZE4D-PSD) rescued the ability of ΦER12, ER15, and ΦER16 to infect and lyse the wbaN deletion Klebsiella MH258 mutant.

[0266] The walW gene is part of the LPS pathway, an uncharacterized polysaccharide deacetylase in the LPS biosynthesis operon. This gene was chosen because it appeared both in the INSeq and survivor screens as required for both groups of T4-like phages represented by ΦER15 and ΦER16e. The ΔwalW mutant exhibited a non-capsulated appearance on plates and was fully resistant to phages ΦER15 and ΦER16. Capsule production was partially eliminated in the ΔwalW (FIG. 35A), which is corroborated by the fact that ΦER12 can partially infect in this background (FIG. 33C).

[0267] waaH was deleted in Klebsiella MH258, and the waaH deletion Klebsiella MH258 mutant (ΔwaaH) was treated with ΦER39 (FIG. 19; FIG. 33D; FIG. 34). The waaH gene is responsible for adding a HepIII residue to the HepII of the inner core of the LPS (Klein, G., Müller-Loennies, S., Lindner, B., Kobylak, N., Brade, H., and Raina, S. (2013)). Deletion of waaH in Klebsiella MH258 reduced infection and lysis by ΦER39, whereas complementing the waaH gene deletion (ΔwaaH pZE4D-waaH) rescued the ability of ΦER39 to infect and lyse the waaH deletion Klebsiella MH258 mutant. A transposon disrupting this gene was found multiple times in the survivors of ΦER39 infection. It is interesting to note that no other major LPS biosynthesis genes were isolated as survivors of ΦER39 infection and that the waaH was found in 5 independent infections. However, the rfaZ gene, also affecting the inner LPS core, and ykoT, a glycosyltransferase predicted to be involved in LPS biosynthesis, were increased in the INSeq data after ΦER39 infection (FIG. 33I). The ΔwaaH mostly prevented infection by ΦER39, with faint plaquing that can be seen in FIG. 34B, and moderate resistance in liquid culture. In contrast, deletion of the ompC gene resulted in full resistance to ΦER39, implying that OmpC is the outer membrane porin receptor for ΦER39, while the modification to LPS is also required for optimum infection, but not strictly necessary.

[0268] Outer Membrane Protein Deletions. ompC was deleted in Klebsiella MH258, and the ompC deletion Klebsiella MH258 mutant (ΔompC) was treated with ΦER39 (FIG. 20; FIG. 33E; FIG. 34). OmpC (OmpK36), along with OmpF (OmpK35), is one of two major outer membrane porins responsible for the diffusion of small molecules into the cell (Tsai, Y.-K., Fung, C.-P., Lin, J.-C., Chen, J.-H., Chang, F.-Y., Chen, T.-L., and Siu, L. K. (2011)). Bacteriophage T4, in addition to requiring LPS for infection, also requires OmpC to facilitate entry into the cell (Yu, F., and Mizushima, S. (1982)). Deletion of ompC in Klebsiella MH258 reduced infection and lysis by ΦER39, whereas complementing the ompC gene deletion (ΔompC pZE4D-ompC) rescued the ability of ΦER39 to infect and lyse the ompC deletion Klebsiella MH258 mutant. Unlike with T4, the ΔompC mutant only showed a slight resistance to infection with phages ΦER15 and ΦER16e, perhaps indicating a lesser role for OmpC in the two T4-like phages. The ΔompC mutant also showed slight resistance to ΦER46e, perhaps by affecting small molecules or cation transport near the cell surface. The membrane integrity of ΔompC was tested by plating the mutants on plates containing SDS and EDTA (FIG. 35B), however there did not seem to be a membrane defect.

[0269] fhuA3 was deleted in Klebsiella MH258, and the fhuA3 deletion Klebsiella MH258 mutant (ΔfhuA3) was treated with ΦER12 or ΦER46 (FIG. 21; FIG. 33F; FIG. 34). The fhuA gene is responsible for iron transport into the cell, however it is also known as the receptor for both bacteriophages T1 and T5. Deletion of fhuA3 in Klebsiella MH258 reduced infection and lysis by ΦER46, whereas complementing the fhuA3 gene deletion (ΔfhuA3 pZE4D-fhuA3) rescued the ability of ΦER46 to infect and lyse the fhuA3 deletion Klebsiella MH258 mutant. In the ΔfhuA3 strain, only ΦER46e was unable to infect in this background, indicating that the FhuA3 is the cell receptor for ΦER46. Additionally, sequencing the fhuA3 gene of a spontaneous survivor of ΦER46e infection revealed a six amino acid deletion.

[0270] Disruption to Membrane Stability: A gene in the Tol-Pal system was also deleted, since both ΦER15 and ΦER39 contained tolB in the top over-represented genes for phage resistance (FIG. 33I). The Tol-Pal system comprises proteins TolA, TolQ, and TolR in the inner membrane and TolB and Pal in the outer membrane. Disruptions to the Tol-Pal system result in a pleiotropic effect that disrupts the outer membrane integrity, susceptibility to certain antibiotics like vancomyin and beta-lactams, and changes in cell division and cell morphology (Clavel, T., Lazzaroni, J. C., Vianney, A., and Portalier, R. (1996); Hirakawa, H., Suzue, K., and Tomita, H. (2022)). Additionally, there is evidence that loss of the Tol-Pal system plays a role in reducing virulence (Hirakawa, H., Suzue, K., and Tomita, H. (2022)). ΔtolB was constructed, and it was confirmed that the cells have altered cell membrane integrity by plating colonies on LB plates supplemented with 1% SDS and 2 mM EDTA. The ΔtolB mutant formed smaller colonies in the presence of these membrane-destabilizing agents and complementation with tolB restored colony size (FIG. 35B). The ΔtolB showed striking resistance to phages ΦER15, ΦER16, ΦER39, and ΦER46 in liquid culture, indicating that membrane stability could play a role in allowing these phages to enter the cell (FIG. 33H).

[0271] Carbon Storage Regulator Deletion: One of the unexpected hits in both INSeq (ΦER15 and ΦER39) and in survivors of infection (ΦER16) was to the carbon storage regulator pathway, mediated by CsrABCD. CsrD negatively regulates the small RNAs CsrB and CsrC that sequester CsrA, which in turn acts as a regulator for a variety of different sugar pathways (Esquerré, T., Bouvier, M., Turlan, C., Carpousis, A. J., Girbal, L., and Cocaign-Bousquet, M. (2016)). The survivors of ΦER16 had multiple hits to both the csrA promoter (likely reducing its expression) and to the csrD coding region. Since sugars are the main component of both the capsule and the LPS, we hypothesized that altered capsule or LPS abundance was the means to provide resistance.

[0272] csrD was deleted in Klebsiella MH258, and the csrD deletion Klebsiella MH258 mutant (ΔcsrD) was treated with ΦER12, ΦER15, ΦER16, ΦER39, or ΦER46 (FIG. 18; FIG. 33G; FIG. 34). Deletion of csrD in Klebsiella MH258 reduced infection and lysis by ΦER15, ΦER16, ER39, and ΦER46, whereas complementing the csrD gene deletion (ΔcsrD pZE4D-csrD) rescued the ability of ΦER15, ΦER16, ΦER39, and ΦER46 to infect and lyse the csrD deletion Klebsiella MH258 mutant. The ΔcsrD mutant of MH258 exhibited increased capsule levels (FIG. 35A), confirming previous reports (Mike, L. A., Stark, A. J., Forsyth, V. S., Vornhagen, J., Smith, S. N., Bachman, M. A., and Mobley, H. L. T. (2021)). The ΔcsrD showed resistance to ΦER15, ΦER16e, ΦER39, and ΦER46e in liquid culture. Conversely, cells were more permissive to phages ΦER15, ΦER16, ΦER39, and ΦER46 when over-expressing the csrD on a plasmid (FIG. 33J). Although the ΔcsrD strain showed resistance in liquid assays, phages were still able to plaque in high titer spots, indicating that CsrD likely modulates cellular physiology to permit phage infection rather than acting as a strict requirement for infection.

[0273] To further investigate the effect of ΔcsrD on cell metabolism, RNA-seq was performed on MH258 and ΔcsrD. In the mutant strain, 13 genes were upregulated and 74 downregulated (log₂ Fold Change>2, p_{adj}<0.05) (FIG. 33K). Gene set enrichment analysis revealed decreased expression of genes involved in purine metabolism, starch and sucrose metabolism, and oxidative phosphorylate pathways in the deletion mutant (FIG. 33L), suggesting that the loss of the carbon storage regulator affects phage infection by modulating the metabolic state of the cell to one less conducive for phage infection. Altered sugar metabolism in ΔcsrD may modulate accessibility of cell surface receptors by increasing substrate availability for capsule biosynthesis and thickening the capsule. Further, decreased host purine synthesis in the ΔcsrD may decrease the pool of host nucleotides coopted for phage genome synthesis, akin to recently described phage defense systems (Tal, N., Millman, A., Stokar-Avihail, A., Fedorenko, T., Leavitt, A., Melamed, S., Yirmiya, E., Avraham, C., Brandis, A., Mehlman, T., et al. (2022); Hsueh, B. Y., Severin, G. B., Elg, C. A., Waldron, E. J., Kant, A., Wessel, A. J., Dover, J. A., Rhoades, C. R., Ridenhour, B. J., Parent, K. N., et al. (2022)).

[0274] Another way to show lethality of the bacteriophages is to provide an area under curve graph to represent lethality by one number instead of a graph. For example, FIG. 22A shows curves for infection of Klebsiella MH258 by ΦER12, ΦER15, ΦER16, ΦER39, or ΦER46, while FIG. 22B shows the area under each curve of FIG. 22A normalized to untreated control Klebsiella MH258 to provide a numerical representation of lethality of ΦER12, ΦER15, ΦER16, ΦER39, or ΦER46 infection in Klebsiella MH258 (FIG. 22B) or of ΦER12, ΦER15, ΦER16, ΦER39, or ΦER46 infection in Klebsiella MH258 strains in which bacterial genes determined to be required for infection of Klebsiella with ΦER12, ΦER15, ΦER16, ΦER39, or ΦER46 are deleted and then complemented (FIG. 22C).

### Example 5—Phage-Resistant Bacteria are More Susceptible to Macrophage Engulfment & Antibiotic Treatment

[0275] Macrophages in the immune system engulf and digest bacteria, including Klebsiella. One of the hallmarks of Klebsiella species is the copious amount of capsule they produce, which prevents macrophage engulfment. Conversely, non-capsulated Klebsiella are more readily engulfed. FIG. 26 shows capsule amounts of Klebsiella MH258 deletion mutants in which bacterial genes wbaP, wbaN (PSD), wzc, csrD, waaH, or fhuA3 are deleted or a Klebsiella MH258 strain having extra capsule (wzc-G565A; ER51).

[0276] FIG. 24 and FIG. 36A illustrate schematically a method for measuring phagocytosis by macrophages of bacteriophage-treated bacteria, according to some aspects of the disclosure. Mouse RAW 246.7 macrophage cells were provided with wild-type and mutant MH258 strains (either deletion mutants or survivors of MH258 infected with the indicated phage) for 2 hours, treated with a high concentration of gentamicin to eliminate extracellular bacteria, before lysis and bacterial enumeration from the lysate. As shown in FIGS. 23A-23B, FIG. 25, and FIG. 36, in some aspects, bacteriophage treatment or deletion of bacterial genes determined to be required for infection of Klebsiella makes it easier for macrophages to engulf Klebsiella.

[0277] A non-capsulated (ΔwbaP) mutant of MH258 and an extra capsulated variant of MH258 (wzc_{G565A}) were tested in a mouse macrophage engulfment assay. MH258 wzc_{G565A} strain was an extra-mucoid survivor of T4-like ΦER8 infection that we identified by whole genome sequencing. Previous reports show this mutation causes an increase in capsule formation that is different from the hyper-mucoid capsule of hyper-virulent strains (Ernst, C. M., Braxton, J. R., Rodriguez-Osorio, C. A., Zagieboylo, A. P., Li, L., Pironti, A., Manson, A. L., Nair, A. V., Benson, M., Cummins, K., et al. (2020)). The wzc_{G565A} allele causes the bacteria to produce extra capsule, making them more difficult to be engulfed, in some aspects.

[0278] The non-capsulated ΔwbaP showed a modest 2-5-fold increase in intracellular titer compared to the capsulated parent strain, which was restored upon complementation with wbaP (FIG. 35C). Conversely, in MH258 wzc_{G565A}, a 5-fold decrease in phagocytosis was observed. The capsule-deficient mutants ΔwalW and Δwzc also showed a 2× increase in macrophage engulfment that was partially restored to parental levels by plasmid complementation. ΔcsrD and its complement were also tested in the macrophage assay, however neither was significantly different from MH258 (FIG. 35C), despite the ΔcsrD making more uronic acid (FIG. 35A). In the second set of macrophage experiments, the ΔcsrD was taken up at 1.5× of the parental levels (FIG. 36B).

[0279] FIGS. 23A-23B show that phagocytosis by mouse macrophages is increased for Klebsiella MH258 strains in which bacterial genes wbaN (PSD) and wzc are deleted and reduced for a Klebsiella MH258 strain having extra capsule (ER51) (FIG. 23A; n=8, bar is median). In some aspects, complementing gene deletions can reduce the ability of macrophages to phagocytose the Klebsiella MH258 deletion mutants (FIG. 23B; n=8, bar is median). FIG. 25 shows that, in some aspects, survivors of phage infection, particularly non-capsulated Klebsiella, are more susceptible to macrophage engulfment.

[0280] Tested next was how well macrophages engulfed MH258 that had been treated with different phages (ΦER12, ΦER15, ΦER16e, ΦER39, and ΦER46e) at a multiplicity of infection (MOI) of 1-2. There was an expectation that the phages would kill the majority of wild-type bacteria cells and select for variants with defects in either capsule or LPS production that would render them more susceptible to engulfment. Indeed, ΦER12, ΦER15, ΦER16e and ΦER46e infected cultures, which have capsule and LPS defects as survivors, were readily engulfed by macrophages. Unexpectedly, ΦER39 survivors were also increased over the parental. ΦER39-resistant mutants are likely in waaH or ompC, however a ΔwaaH mutant was taken up at similar levels as the parent strain. Similarly, a ΔfhuA3 strain was also taken up at similar levels to the parent, and a likely mechanism of resistance to ΦER46e is through mutation to fhuA3. Together, these data suggest that the mixed population of survivors of a phage infection have collectively higher susceptibility to phagocytosis than single mutants alone. For example, the presence of LPS-defects in ΦER39-infected and non-capsulated survivors in ΦER46e-infected cultures could have contributed to the increase in macrophage engulfment.

[0281] Phage treatment has been previously linked to altered antibiotic susceptibility in surviving bacterial populations (Gurney, J., Brown, S. P., Kaltz, O., and Hochberg, M. E. (2020); Oromi-Bosch, A., Antani, J. D., and Turner, P. E. (2023); Burmeister, A. R., Fortier, A., Roush, C., Lessing, A. J., Bender, R. G., Barahman, R., Grant, R., Chan, B. K., and Turner, P. E. (2020)). Antibiotic resistance was therefore tested via disk diffusion in wild-type and mutant MH258 strains and observed pleiotropic effects (FIG. 36C). At baseline, wild-type MH258 is resistant to all antibiotics tested, including carbapenems, cephalosporins, aminoglycosides, and tetracyclines. Deletion of some essential host factors for phage infection, such as ΔwalW and Δwzc, led to slight sensitization to multiple classes of antibiotics. However, deletion of ompC (and to a lesser extent ΔcsrD and ΔtolB) significantly increased resistance to carbapenem class antibiotics, corroborating previous reports that ompC is necessary for import of carbapenems into the periplasm (Tsai, Y.-K., Fung, C.-P., Lin, J.-C., Chen, J.-H., Chang, F.-Y., Chen, T.-L., and Siu, L. K. (2011); Bulman, Z. P., Krapp, F., Pincus, N. B., Wenzler, E., Murphy, K. R., Qi, C., Ozer, E. A., and Hauser, A. R. (2021)). Genetic complementation of these deletions restored wild-type levels of sensitivity (FIG. 35D). Altogether, phages may select for mutants with increased or decreased susceptibility to antibiotics, suggesting that a careful approach must be taken to design phages that do not interfere with conventional antibiotic therapy. However, in assays with survivors of phage-treated cultures, increased antibiotic resistance was rarely observed, although the number of suppressor colonies in zones of clearing greatly increased. For example, ompC mutations that lead to ΦER39 resistance would lead to increased carbapenem resistance in that population. Overall, phage treatment tended to sensitize strains to various classes of antibiotics, particularly with ΦER39 and ΦER46e which increased sensitivity to imipenem.

### Example 6—Bacteriophage Cocktails Increase Time of Bacterial Resistance

[0282] Klebsiella become resistant to bacteriophage quickly in vitro (e.g., ΦER12 resistance can be promoted by loss of the Klebsiella capsule). For infection, since some phages used LPS (Straboviridae), others used capsule (Ackermannviridae and Demerecviridae), and still others relied on outer membrane proteins (Siphoviridae and Demerecviridae), it was reasoned that the different mechanisms of infection would make it difficult to for the cell to overcome by either delaying the time for a population to become resistant or by negatively affecting the fitness of the phage-resistant cells. For example, loss of the Klebsiella capsule, however, may make it easier for a second phage to infect the Klebsiella. This is supported by evidence that many phages are more virulent in ER26 (a capsule mutant of Klebsiella MH258). Time to resistance can be measured by using a plate reader to detect optical density of the Klebsiella MH258 in the presence and absence of bacteriophage, and FIG. 10 shows development of resistance over time by Klebsiella MH258 to ΦER12.

[0283] Resistance to ΦER12 occurred exclusively due to loss of the capsule. When grown in liquid culture, it took approximately 3.8 hours for a culture of 2×10⁶ MH258 cells to recover from infection with ΦER12. It was reasoned that if a second capsule-independent phage were added to phage ΦER12, the frequency of double resistant mutants would be lower in the initial population and the time for the culture to become resistant would be delayed. This delay in the outgrowth of resistant mutants would be beneficial for phage therapy allowing more time for the host to clear away a Klebsiella infection. Cultures of MH258 were infected singly with phages with either ΦER15, ΦER16e, ΦER39, or ΦER46e, and doubly with ΦER12 and a second phage (FIG. 37A). The time for resistance with ΦER12 combinations increased to an average of 8.2 hour with the addition of ΦER15; 11.38 hours with ΦER16; 6.28 hours with ΦER39; and to 5.3 hours with ΦER46e (p<0.0001 for all combinations, one-way ANOVA with Tukey's multiple comparison). However, ΦER12 and ΦER46e are both capsule-dependent and their combination (5.3 hours) failed to increase the time for resistance with ER46e incubation alone (5.2 hours), suggesting that ΦER46e resistant variants also confer ΦER12 resistance.

[0284] Combining ΦER12 with an additional bacteriophage can therefore delay the time to ΦER12 resistance by the Klebsiella MH258 by over 2 hours. As additional examples, FIG. 11A shows delayed development of resistance by Klebsiella MH258 to ΦER12 when ΦER12 is combined with ΦER16 (high initial cell titer). FIG. 11B shows delayed development of resistance by Klebsiella MH258 to ΦER12 when ΦER12 is combined with ΦER16 (low initial cell titer). FIG. 11C shows delayed development of resistance by Klebsiella MH258 to ΦER12 when ΦER12 is combined with ΦER39. FIG. 12 shows stochastic time to resistance by low (lo; ˜2×10⁷ cfu/ml) or high (hi; ˜2×10⁸ cfu/ml) initial Klebsiella MH258 cell titers to combinations of ΦER12 and ΦER16, ΦER12 and ΦER39, or ΦER12 and ΦER15.

[0285] These results demonstrate that, in some aspects, utilizing a combination of bacteriophage can increase time to resistance by Klebsiella MH258 to the bacteriophage.

### Example 7—Optimized Phage Cocktails Kill Multidrug Resistant and Clinical Isolates of Klebsiella pneumoniae In Vitro

[0286] Using the Klebsiella phage isolates, a process to generate an optimized phage cocktail for a given Klebsiella strain was formalized (FIG. 38A). To generate a cocktail that could best kill Klebsiella, five phylogenetically distinct phages predicted to depend on different host factors for infection were selected. As a proof-of-principle, 5-phage cocktails were designed to target carbenem-resistant K. pneumoniae MH258, ESBL-positive JHCK1, and a primary clinical recurrent urinary tract infection isolate K. quasipneumoniae UTI-7. Cocktail selection began by referencing the host range table (FIG. 32) and identifying phages with the highest lytic activity in each taxonomic group. Individual infections were performed with the candidate phages in a plate reader and those that displayed killing within 2.5 hours were selected (FIGS. 38B-38D). For MH258, ΦER12 (Ackermannviridae), ΦER15 (Tevenvirinae), ΦER16e (Slopekvirus), ΦER39 (unclassified Siphoviridae), and ΦER46e (Demerecviridae) were chosen. For UTI-7, ΦMM9 (Autographiviridae), ΦER11 (Tevenvirinae), ΦER27 (Slopekvirus), ER32 (Slopekvirus), and ΦER3 (proposed Purpuraviridae) were chosen. For JHCK1, ΦER15 (Tevenvirinae), ΦER27 (Slopekvirus), ΦER43 (Autographiviridae), ΦER46 (Demerecviridae), and ΦMM7 (proposed Purpuraviridae) were chosen. All these phages were able to infect their respective host individually at MOI=˜1, and the 5-phage cocktails were able to effectively kill the population and prevent significant growth from occurring (FIGS. 38B-38D).

[0287] While the individually infected cultures were killed or had reduced titer during a short time frame of several hours, all the cultures eventually became resistant over the course of an overnight infection (FIGS. 38E-38G). Due to the stochastic nature of the spontaneous mutations, there was variability in the time it took for cultures to become resistant. However, the cocktails of all five phages suppressed the incidence of resistance in all (JHCK1) or most cultures (MH258 and UTI-7). The recovered colonies from these 5-phage infections were usually small, non-capsulated, or both. To further investigate the nature of these mutations, whole genome sequencing was performed on an MH258 survivor that exhibited a small and sickly colony phenotype that occasionally reverted back to parental phenotype during streaking. This strain contained an insertion element in the gall/gene responsible for the synthesis of UDP-D-glucose from UTP and α-D-glucose 1-phosphate, an upstream part of both the capsule and LPS biosynthesis pathways. Although this strain was resistant to the five phages in liquid culture, it was able to plaque ΦER46e on a solid lawn.

### Example 8—Evolution of Bacteriophage

[0288] Repeatedly passaging a bacteriophage isolate from one bacterial strain into another can improve virulence such that bacteriophage are evolved to better infect host bacteria. Accordingly, to further optimize phage virulence, an adaptive directed evolution strategy (often termed ‘phage training’) was employed, wherein a phage is sequentially passaged on a target pathogen to select for genetic variants that improve phage fitness on that specific bacterium in those specific environmental conditions (Borin, J. M., Avrani, S., Barrick, J. E., Petrie, K. L., and Meyer, J. R. (2021); Burrowes, B. H., Molineux, I. J., and Fralick, J. A. (2019); Friman, V.-P., Soanes-Brown, D., Sierocinski, P., Molin, S., Johansen, H. K., Merabishvili, M., Pirnay, J.-P., De Vos, D., and Buckling, A. (2016)). This strategy relies on natural evolutionary processes and has been used clinically to optimize phages for inclusion in therapeutic cocktails (Eskenazi, A., Lood, C., Wubbolts, J., Hites, M., Balarjishvili, N., Leshkasheli, L., Askilashvili, L., Kvachadze, L., van Noort, V., Wagemans, J., et al. (2022); Castledine, M., Padfield, D., Sierocinski, P., Soria Pascual, J., Hughes, A., Mäkinen, L., Friman, V.-P., Pirnay, J.-P., Merabishvili, M., de Vos, D., et al. (2022); Torres-Barceló, C., Turner, P. E., and Buckling, A. (2022)).

[0289] Using the set of MH258 phages as a test-case, ΦER12, ΦER15, ΦER16, and ΦER39 were sequentially passaged on the parental bacterial strain for 7 days. Additionally, ΦER46 was passaged on MH258 overexpressing csrD on a high-copy plasmid, as this strain is sensitized to ΦER46 infection. Virulence of the resultant phage populations were assessed using a virulence index assay (Storms, Z. J., Teel, M. R., Mercurio, K., and Sauvageau, D. (2019)), which captures the magnitude of phage killing at varying MOI.

[0290] FIGS. 7 and 8 show virulence of a representative bacteriophage (ΦER16, FIG. 7; ΦER46, FIG. 8) evolved over multiple passages (e.g., ΦER16.1.1, ΦER16.2.2, ΦER16.2.3, ΦER46.1). As illustrated by FIGS. 7 and 8, evolved bacteriophage better kill Klebsiella MH258 than original bacteriophage. As shown in FIG. 9, evolved bacteriophage also adsorbs to Klebsiella MH258 better than the original bacteriophage. The negative control 22 is a T1-like Siphoviridae family bacteriophage that does not infect Klebsiella MH258.

[0291] For ΦER16 and ΦER46, plaque-purified isolates (ΦER16e and ΦER46e) from the evolved populations displayed a marked increase in virulence compared to ancestral isolates (ΦER16 Vᵢ=0.23; ΦER16e Vᵢ=0.28; ΦER46 Vᵢ=0; ΦER46e Vᵢ=0.69) (FIGS. 38H, 38J). Whole genome sequencing of evolved variants revealed point mutations in tail fiber gene of ΦER16e (ΦER16 CDS_0049 N281T) and a large 404 amino acid deletion in the tail spike of ΦER46e (ΦER46 CDS_0001 Q2652_3055del), suggesting that passaging led to mutations that impact phage binding to bacterial hosts. Adsorption assays of ancestral and evolved phages on MH258 confirmed increased binding affinity (ΦER16=4.8×10⁻¹⁰, ΦER16e=1.2×10⁻⁹, ΦER46=1.2×10⁻¹⁰, ΦER46e=6.6×10⁻¹⁰ mL min⁻¹ cell⁻¹). Visually, it was also apparent that ΦER16e formed larger plaques than ΦER16 (FIG. 37B).

[0292] In other cases, such as with ΦER3, the efficiency of infection improved with a single passage on a target strain. ΦER3 that was amplified on UTI-7 infected UTI-7 better than phage that was grown on a K6 or MH258 (FIG. 37C), and vice versa. Whole genome sequencing could not identify any changes to the phage genome, suggesting an epigenetic mechanism.

### Example 9—Effect of Klebsiella Colonization and/or Bacteriophage Treatment on Mouse Microbiome

[0293] It was investigated how the mouse gut microbiome is changed upon Klebsiella and/or phage addition. The use of phage cocktails to decolonize carbapenem-resistant K. pneumoniae MH258 from the mouse gut, without affecting the surrounding microbiome, was explored. A compelling use of phage therapy that leverages its specificity is to target patients colonized with multi-drug resistant pathogens that may bloom, dominate the microbiome, and translocate into the bloodstream upon antibiotic use. Human strains of K. pneumoniae do not colonize mice with an intact microbiome (Federici, S., Kredo-Russo, S., Valdés-Mas, R., Kviatcovsky, D., Weinstock, E., Matiuhin, Y., Silberberg, Y., Atarashi, K., Furuichi, M., Oka, A., et al. (2022); Sorbara, M. T., Dubin, K., Littmann, E. R., Moody, T. U., Fontana, E., Seok, R., Leiner, I. M., Taur, Y., Peled, J. U., van den Brink, M. R. M., et al. (2019)) and thus require constant antibiotic perturbation to maintain K. pneumoniae colonization. However, these antibiotic-perturbation models lead to high levels of K. pneumoniae colonization, often comprising the majority of the gut bacterial population as in an antibiotic-mediated bloom.

[0294] FIG. 27 shows that Klebsiella colonizes the mouse gut microbiome well, the Klebsiella population is stable over time, and bacteriophage treatment does not affect the Klebsiella titer. All mice received Klebsiella MH258 at Day 0. Mice 198, 199, and 200 received no bacteriophage treatment, while mice 201, 204, 205, 206, and 207 received a bacteriophage cocktail at D7 and D8.

[0295] Instead, a gnotobiotic mouse model with a reduced complexity community that permits low level colonization of K. pneumoniae to mimic pathogen carriage was used. To create the community, 13 taxonomically and metabolically diverse human-derived strains were selected and include all 5 major phyla in the human microbiome (see Example 10 for more details). At baseline, 8-12 week old C57BL/6 gnotobiotic mice containing the defined gut microbiome were orally administered ˜5×10⁷ CFU of K. pneumoniae MH258 and given one week for the Klebsiella to engraft and stabilize in the gut community. Bacterial load was enumerated from mouse fecal samples and K. pneumoniae were stably maintained at ˜0.1% relative abundance up to 15 days (FIG. 39A). On Days 7 and 8, the mice were gavaged with either PBS or a cocktail of ΦER12, ΦER15, ΦER16e, ΦER39, and ΦER46e in PBS (each ˜10⁹ PFU/mouse). The K. pneumoniae and phage titers were counted in fecal pellets until the mice were sacrificed on Day 15, where cecal contents were used.

[0296] Upon phage treatment, there was a measurable loss in K. pneumoniae titer after administration of the cocktail (FIG. 39A) that peaked on Day 8 and was sustained until the end of the experiment (p<0.001, t test with Welch correction; n=17 PBS, n=23 Φ cocktail). The extent of K. pneumoniae suppression varied by experiment from 2-fold to 50-fold (FIGS. 40A, 40B). Additionally, the phage populations also began to differentially diminish over time as measured by plaquing on indicator strains (FIG. 39B and FIG. 40C). The phage that remained in the highest titer in the mice was ΦER39, at a median value of 4.5×10⁷ PFU/g stool on the last day, followed by ΦER12 at around 1×10⁴ PFU/g stool, then ΦER15, ΦER16e, and ΦER46e at or near the limit of detection of 200 PFU/g stool. The extent of K. pneumoniae inversely correlated with the number of total phages recovered in feces (e.g., a higher phage titer on Day 8 corresponded to a lower K. pneumoniae titer) and a minimum threshold of 2×10⁸ PFU/g stool on Day 8 was necessary for potent suppression of K. pneumoniae burden (FIG. 39C). To assess the effects on the gut microbiome, the composition of the entire gut microbial community was analyzed by 16S rRNA amplicon sequencing at the nadir of K. pneumoniae titer on Day 8. While the relative abundance of K. pneumoniae decreased in phage treated samples, the abundance of no other member of the community was significantly altered following phage treatment (FIGS. 39D, 39E), suggesting that the effects of phage therapy are species-specific and do not compromise community stability.

[0297] A striking alteration in the morphology of the surviving K. pneumoniae was observed post-phage treatment. At Day 15, most of the bacteria were non-capsulated (FIG. 39F), ranging from 75% to 100% of the colonies per mouse. All the non-capsulated colonies were resistant to phages ΦER12 and to ΦER46e (in liquid culture; some non-capsulated strains still allowed plaquing of ΦER46e on plates, likely indicating a reduction in capsule like a wzc mutation rather than a capsule null mutation such as wbaP). In one experiment, one of the non-capsulated colonies was resistant to both ΦER15 and ΦER16e, likely indicating a mutation to the LPS. The recovered capsulated colonies were mostly still susceptible to all five phages, perhaps indicating a spatial separation of the bacteria from the phages or that subpopulations of K. pneumoniae were in cellular states that disallow phage infection to exist inside the mice. Colonies were isolated from six mice treated with the cocktail that were partially resistant to ΦER39. Whole genome sequencing was performed on one candidate and revealed it to be a mutation in the O-antigen locus, further suggesting a role of O-antigen in Purpuraviridae infection. In sum, treatment with the phage cocktail caused a modest, sustained loss in titer, but after a week, the resulting K. pneumoniae were less capsulated or had altered LPS. Since both capsule and LPS are key virulence factors in K. pneumoniae pathogenesis (Patro, L. P. P., and Rathinavelan, T. (2019)) and their loss sensitizes strains to phagocytosis (FIG. 36) phage therapy could be used in colonized patients to not only suppress bacterial burden, but also to select for strain variants more readily cleared by the host immune system.

[0298] In a second experiment, the distribution of a 14-species gnotobiotic mouse model gavaged with 4×10⁷ cfu Klebsiella MH258 at Day 0 over the course of 15 days was determined and is shown in FIG. 28A, which demonstrates that, in some aspects, introducing Klebsiella does not alter the composition of the mouse microbiome. Klebsiella remained stable over time between 1-5×10⁸ cfu/g feces. FIG. 28B shows that the E. coli composition, specifically, of the mouse microbiome was not changed upon introduction of Klebsiella. FIG. 29 shows that, in mice, Klebsiella and bacteriophage co-exist, and ΦER12 and ΦER39 persist over time. Finally, FIG. 30 shows that mice infected with ΦER12 have Klebsiella populations without a capsule.

[0299] Together, the examples described herein demonstrated that, in some aspects, bacteriophage infection of Klebsiella MH258 results in non-capsulated Klebsiella MH258 cells. In some aspects, bacteriophage-treated Klebsiella are more susceptible to phagocytosis by macrophages. In some aspects, treatment with ΦER12 changes the capsule phenotype of Klebsiella in the mouse gut.

### Example 10—Exemplary Materials & Methods

[0300] Bacterial Strains and Growth Conditions: All strains used are listed in Table S1. Deidentified primary clinical isolates were streaked from urine samples obtained from recurrent urinary tract infection at the University of Chicago Urogynecology clinic under IRB22-1580.

[0301] All strains were grown aerobically in LB media (BD Difco) broth or on plates with 15 grams agar (Fisher Scientific) per Liter. Top agar was 6 grams of agar/Liter. Sucrose plates were 10 g Bacto tryptone (BD), 5 g yeast extract (Gibco) and 5% sucrose (Sigma-Aldrich)/L and low-salt plates contained: 10 g tryptone, 5 g yeast extract and 5 g NaCl (Acros Organics)/L.

[0302] Cultures were shaken at 250 rpm at 37° C. Plates were grown at 37° C. for culture streaks and placed at room temperature for colony enumeration. Antibiotics and supplements were provided at the following concentrations: carbenicillin (GoldBio)—100 μg/mL; tetracycline (ThermoFisher Scientific)—25 μg/mL; streptomycin (Fisher Scientific)—100 μg/mL; spectinomycin (Fisher Scientific)—100 μg/mL; ofloxacin (Fisher Scientific)—1.35 μg/mL; hygromycin (GoldBio)—100 μg/mL; L-arabinose (Sigma Aldrich)—0.35%; EDTA (Invitrogen)—2 mM; Sodium Dodecyl Sulfate (ThermoFisher Scientific)—1%. Dilutions of phage and bacteria were done in 1× phosphate buffered saline (PBS; Thermo Scientific).

[0303] Bacterial Genome Sequencing: Bacterial DNA was extracted from 750 μl-1 mL of overnight culture using a Qiagen DNeasy Blood & Tissue kit. Whole genome sequencing was performed by SeqCenter/MiGS (Pittsburgh, PA) using 2×150 bp Illumina NovaSeq at approximately 200 Mbp per sample. Genomes were assembled using Velvet (Zerbino, D. R., and Birney, E. (2008)) de novo assembly in the Geneious Prime 2023.1, with 75 kmer and approximately 800,000-1,000,000 reads to generate 200-300 contigs. MLST, capsule and O-antigen type, and predicted antibiotic resistance were determined using the PathogenWatch (Sánchez-Busó, L., Yeats, C. A., Taylor, B., Goater, R. J., Underwood, A., Abudahab, K., Argimón, S., Ma, K. C., Mortimer, T. D., Golparian, D., et al. (2021)) platform, with the Pasteur Database (https://bigsdb.pasteur.fr/), Kaptive (Lam, M. M. C., Wick, R. R., Judd, L. M., Holt, K. E., and Wyres, K. L. (2022)), and Kleborate (Lam, M. M. C., Wick, R. R., Watts, S. C., Cerdeira, L. T., Wyres, K. L., and Holt, K. E. (2021)), respectively.

[0304] Phage Methods: Isolation: Raw sewage collected from the Stickney Water Reclamation Plant in Chicago IL was centrifuged for 10,000 g for 10 minutes before filtering through a 0.22 μm filter. 300 μl of filtered sewage was mixed with 300 μl of overnight bacterial culture in 3 mL of 0.6% top agar, which was poured as an overlay on top of an LB plate. The resulting plaques were streak-purified three times on the same host lawn before being amplified into a working stock.

[0305] Amplification of Phages: The host bacteria were sub-cultured from an overnight culture and grown to mid-log phase (approximately 1-5×10⁸ CFU/mL or 1.5-2 hours at 37° C.). 10 isolated plaques were picked from the isolation plate if a new phage or 10-500 μl of phage stock (MOI range 0.1-10) were used to infect the growing culture at 37° C. After visible lysis (3-4.5 hours), the cultures were pelleted at 10,000 rpm for 10 minutes, and the resulting supernatant was passed through a 0.22 μm filter. If used for mouse experiments, 1M NaCl and 10% of the weight/volume of PEG-8000 was added to the supernatant and dissolved at 37° C. for 15 minutes before incubation at 4° C. overnight. The phage preparations were then pelleted at 10,000 rpm for 28 minutes, with the resulting pellet dissolved in PBS. Phages stocks were stored in the refrigerator.

[0306] For long-term storage of phages, a 1:100 sub-culture of the host bacteria was grown for 2 hours before infection with phage stock (MOI ˜0.01-0.5) for 15 minutes at room temperature. 700 μl of the infected cells was mixed with 300 μl 50% ice cold glycerol and kept on ice until transfer into a freezer box at −80° C.

[0307] Phage Electron Microscopy: High titer phage stocks in LB were provide to The University of Chicago Advanced Electron Microscopy Core, where they were strained with 1% uranyl acetate and visualized on either an FEI Spirit or FEI Tecnai F30 scanning transmission electron microscope.

[0308] Phage Genomic DNA Extraction: 500 μl of each phage prep greater than 1×10⁹ PFU/mL was transferred to an Eppendorf tube. To each tube, we added 6.25 μl of 1M MgCl2, 0.5 μl RNAse A ((100 mg/mL); Qiagen) and 0.5 μl Turbo DNAse I (Fisher Scientific) and incubated at 37° C. for 30 minutes, followed by 20 μl of 0.5M EDTA (Invitrogen), 2.5 μl Proteinase K (10 mg/mL; Qiagen), and 25 μl 10% SDS (ThermoFisher Scientific) at 55° C. for one hour. DNA was extracted using 550 μl phenol::chloroform::isoamyl alcohol (Thermo Scientific), with the aqueous phase then mixed with 550 μl chloroform and precipitated with twice the volume of cold 100% ethanol (Decon Laboratories) and 1/10 volume of 3M sodium acetate (Fisher Scientific) at pH 5.2, and washed with 70% ethanol. The DNA pellet was re-suspended in EB (10 mM Tris; Qiagen).

[0309] Phage Sequencing, Assembly, and Annotation: Phage whole genome sequencing was performed by SeqCenter/MiGS (Pittsburgh, PA) using 2×150 bp Illumina NovaSeq at approximately 200 Mbp per sample. Genomes were assembled using Velvet (Zerbino, D. R., and Birney, E. (2008)) de novo assembly in the Geneious Prime 2023.1, with 75 kmer and approximately 150,000 reads. The phylogenetic tree was generated by submitting whole genome FASTA files to VICTOR (Meier-Kolthoff, J. P., and Göker, M. (2017)). All phage genomes were annotated using Pharokka v0.1.9 (Bouras, G., Nepal, R., Houtak, G., Psaltis, A. J., Wormald, P.-J., and Vreugde, S. (2023)) initialized with default parameters. Pharokka performs coding sequence (CDS), tRNA, tmRNA, and CRISPR prediction using PHANOTATE (McNair, K., Zhou, C., Dinsdale, E. A., Souza, B., and Edwards, R. A. (2019)), tRNAscan-SE 2.0 (Chan, P. P., Lin, B. Y., Mak, A. J., and Lowe, T. M. (2021)), ARAGORN (Laslett, D., and Canback, B. (2004)), and CRT (Bland, C., Ramsey, T. L., Sabree, F., Lowe, M., Brown, K., Kyrpides, N.C., and Hugenholtz, P. (2007)), respectively. Pharokka utilizes MMseqs2 (Steinegger, M., and Söding, J. (2017)) to assign functional annotation by matching CDS to PHROGs (Terzian, P., Olo Ndela, E., Galiez, C., Lossouarn, J., Pérez Bucio, R. E., Mom, R., Toussaint, A., Petit, M.-A., and Enault, F. (2021)), VFDB (Chen, L., Yang, J., Yu, J., Yao, Z., Sun, L., Shen, Y., and Jin, Q. (2005)), and CARD (Alcock, B. P., Raphenya, A. R., Lau, T. T. Y., Tsang, K. K., Bouchard, M., Edalatmand, A., Huynh, W., Nguyen, A.-L. V., Cheng, A. A., Liu, S., et al. (2020)) databases and mash (Ondov, B. D., Treangen, T. J., Melsted, P., Mallonee, A. B., Bergman, N. H., Koren, S., and Phillippy, A. M. (2016)) indexing matched assembled contigs to their closest hit in the INPHARED database (Cook, R., Brown, N., Redgwell, T., Rihtman, B., Barnes, M., Clokie, M., Stekel, D. J., Hobman, J., Jones, M. A., and Millard, A. (2021)). Whole genome alignments were performed using Mauve progressive alignment (Darling, A. E., Mau, B., and Perna, N. T. (2010)).

[0310] Host Range Determination: The spot test is a semi-quantitative indicator of susceptibility, due to the high relative multiplicity of infection (MOI) and static nature of cells on the plate. The kill curve in liquid culture is more quantitative, since both the phage and cell titers are known, and allows for movement while the cultures grow. In both cases, phages infect growing cells and taken together, can indicate which phages are already good at killing, which cannot infect even at high titer, and which can infect weakly, but be improved upon.

[0311] For spot tests, lawns of bacteria were made by mixing 300 μl overnight culture, 300 μl 1×PBS, and 3 mL of 0.6% top agar as an overlay on LB bottom agar plates. 2.5 μl aliquots of high titer phage stock were dropped on the lawn and dried before overnight incubation at 37° C. Each phage was repeated three times and scored by eye on a scale of 0 (no lysis) to 3 (clear lysis zone). The average of each score was reported by color density with the darker the color representing the highest lysis. In general, phages showing weak lysis fail to robustly clear liquid cultures.

[0312] Kinetic Curves of Phage Killing: Bacterial cultures were diluted 1:100 and grown to mid-log phage, to an approximate titer of 1-2×10⁸ CFU/mL (between 1.5 and 2 hours at 37° C.). Concurrently a clear round-bottom 96-well dish (Corning) was filled with 20 μl of LB or phage stock, at an approximate MOI of 1 for 2.5 hour experiments and MOI of 10 for 16 hour experiments. When the cells reached the desired density, 180 μl was added directly to the wells and the plate was incubated at 37° C. in a TECAN Sunrise plate reader with shaking. OD₆₀₀ measurements were taken every 10 or 15 minutes for the duration of the experiment using Magellan software.

[0313] Time to Resistance Assays: 8 independent bacterial cultures at a time were diluted 1:100, grown to mid-log phase, and diluted to an approximate titer of 1-2×10⁷ CFU/mL. Phages were added at an approximate MOI of 10 and incubated for 16 hours in a TECAN Sunrise plate reader with heating and shaking. Bacteria growth curve values were analyzed in Microsoft Excel; the nadir of each curve was identified and the first time point where the optical density began to rise was counted as the time to resistance. Duplicate wells were inoculated and averaged for each overnight culture.

[0314] To generate a single value for the degree of bacterial suppression during phage infections, we used the Area Under the Curve (AUC) function in GraphPad Prism to compare the uninfected growth curve with phage treated cultures.

[0315] Adsorption Assays: Phage stocks were diluted to approximately 2.5×10⁷ PFU/mL in LB and distributed as 30 μl in Eppendorf tubes. Bacteria strains were sub-cultured 1:100 and grown for 2 hours at 37° C. The cultures were given streptomycin to halt growth and distributed by 300 μl to the tubes containing phage. One tube for each set of phages received 300 μl of LB as a control. The phages were allowed to adsorb to the cell surface at room temperature. At the indicated times, the tubes were centrifuged (1.5 minutes at 13.5K rpm), the supernatant was serially diluted, and the PFU was titered on a lawn of a susceptible host. The phage titers were normalized to the titer of the tube without cells. An exponential decay function (Y=Ae^{-Kx}+B)), where Y is free phage, A is free phage at the beginning of the experiment, and K is the decay constant, was used to fit the data using GraphPad Prism 9.5.1. The adsorption rate (mL min⁻¹ cell⁻¹) was calculated by dividing K (mL min⁻¹) with the cell concentration.

[0316] Identification of host factors: INSeq: Using an MH258 transposon library (Jung, H.-J., Littmann, E. R., Seok, R., Leiner, I. M., Taur, Y., Peled, J., van den Brink, M., Ling, L., Chen, L., Kreiswirth, B. N., et al. (2019)), bacteria were sub-cultured in LB with carbenicillin in triplicate and grew at 37° C. for 2 hours to ˜1×10⁷ CFU/mL before infecting with ΦER15 or ΦER39 at MOI of 1.5 and 30, respectively. Aliquots were taken from uninfected bacteria, after 3 hours, and after overnight incubation at 37° C. Genomic DNA was extracted using the Qiagen DNeasy Blood and Tissue kit, modified for bacteria, and the INSeq protocol (Goodman, A. L., McNulty, N. P., Zhao, Y., Leip, D., Mitra, R. D., Lozupone, C. a, Knight, R., and Gordon, J. I. (2009)) was followed. The 125 bp amplicons were sent to The University of Chicago Genomics Facility and run on a HiSeq 4000. Read analysis was performed using the pyinseq program, available on the world wide web at github.com/mjmLab/pyinseq.

[0317] Arbitrarily Primed POR: The MH258 transposon library was sub-cultured in LB with ofloxacin (to kill any E. coli present) and infected with ΦER12, ΦER15, ΦER16e, ΦER39 or ΦER46e. After overnight growth, the culture was streaked out on LB. Individual colonies were re-streaked and tested to see if they were resistant to the respective infecting phage by both plate reader assay and spot tested for clearing on a lawn. Genomic DNA was extracted from candidates that were resistant to the phage and amplified using degenerate primers with adapters (smd38/ARB1 and erD97/pSam-Kp2-1_out3 for round1; and smD40/ARB2 and erD98/pSam-Kp2-1_out4 for round 2 (github.com/mjmlab/protocols/blob/master/arbitrarily-primed-pcr.md)). PCR products were submitted for Sanger sequencing either at The University of Chicago DNA Sequencing & Genotyping Facility or at Genewiz.

[0318] Deletions by Double Cross-Over Homologous Recombination: For waaH and csrD, deletions were made by cloning a gfp cassette and 1 kb of flanking DNA upstream and downstream of the gene of interest, leaving the start codon and last six amino acids (Baba, T., Ara, T., Hasegawa, M., Takai, Y., Okumura, Y., Baba, M., Datsenko, K. A., Tomita, M., Wanner, B. L., and Mori, H. (2006)). We introduced the pieces into plasmid pMM903 before the sacB gene using Gibson Assembly (NEBuilder.com). The plasmids were introduced into conjugative E. coli strain S17.1 and mated into MH258 with approximately a 2:1 donor to recipient ratio of concentrated saturated culture in 25 μl spots on an LB plate at 37° C. for 3.5 hours. The mating spots were swabbed into 1 mL LB and plated onto LB streptomycin-ofloxacin plates. Fluorescent colonies were picked for re-streaking and the integrants were confirmed by PCR. Candidate colonies were then plated on LB low salt sucrose plates and screened for loss of fluorescence. A second PCR confirmed whether the excision of the plasmid resulted in the parental sequence or the deleted gene. Since non-specific integrants were frequent and it was difficult getting the correct integrant to excise, a homologous recombination-mediated genetic engineering approach was utilized.

[0319] Deletions by Lambda-Red Recombination: We modified pKD46 (Sharan, S. K., Thomason, L. C., Kuznetsov, S. G., and Court, D. L. (2009)) to express the aadA gene instead of bla and introduced it into MH258 by electroporation, selecting on LB streptomycin. We also modified pKD13 by replacing the kanamycin resistance cassette with tetracycline resistance. MH258 pKD46-aadA was sub-cultured and grown to mid-log phase at 30° C. The Lambda-Red genes on the plasmid were induced with L-arabinose for 10 minutes at 30° C. and 30 minutes at 37° C. before being washed with successively smaller volumes of 10% glycerol to make electrocompetent cells. The cells were electroporated with 0.5-1 μg of PCR product made with 90-mer primers amplifying the tetR gene on pKD13-tet. The primers contained approximately 60-bp of homology to the upstream and downstream regions of the gene of interest. After electroporation, the cells were recovered in 3 mL LB on the benchtop overnight. Transformants were selected on LB tetracycline plates at 37° C. and confirmed for the deletion-insertion by PCR. To eliminate the antibiotic cassette, the cells were made chemically competent with 2×TSS (20% PEG, 40 mM Mg2, 10% DMSO, given 5×KCM salts ((500 mM KCl (Alfa Aesar), 150 mM CaCl₂) (Acros Organics), 250 mM MgCl2 (Acros Organics)), and transformed with pFLP-hyg36 (Addgene). Colonies were selected on LB low salt hyg plates and confirmed for the excision of the antibiotic cassette by PCR. To lose the plasmid, the cells were streaked and inoculated into overnight cultures for several passages.

[0320] Complementation of Deletions Strains: To complement the deletions, plasmid pZE4D-GFP (Lutz, R., and Bujard, H. (1997)) had the GFP gene removed and replaced by the gene of choice. The vector was amplified using primers with overlapping regions of the insert using the default settings on the NEBuilder website. The insert DNA was amplified from chromosomal MH258 DNA extracted using the Qiagen DNeasy Blood and Tissue kit. A 3:1 molar ratio of insert to vector was combined with equal volume of 2× Gibson master mix (Gibson, D. G., Young, L., Chuang, R., Venter, J. C., Hutchison, C. A., and Smith, H. O. (2009)) (T5 exonuclease/Phusion polymerase/Taq ligase in ISO buffer) for 1 hour at 50° C. and a subset of the reaction was transformed into NEB10beta E. coli cells for selection and propagation. For two of the candidates (fhuA3 and tolB), vector pZara2 used the backbone of pZE4D-GFP, but replaced the promotor region with the ara C gene and pBAD promoter from plasmid pNR64 (Addgene). These plasmids did not end up needing arabinose for induction and were constitutively expressed.

[0321] RNA Sequencing Analysis of Acsrl: MH258 and MH258 ΔcsrD cultures were grown overnight, subcultured 1:100 in LB media, and grown to mid-log phase (approximately 2 hours) as measured by optical density (n=2). RNAProtect (Qiagen) was added to the cells per manufacturers protocols before RNA isolation. Total RNA was isolated from each cell type (in biological duplicate) and purified using RNAeasy RNA extraction kit (Qiagen). RNA was then DNAse treated (TURBO) to remove all DNA and submitted to the UChicago DFI Metagenomics Core for Illumina RNAseq Library Prep. Illumina compatible libraries were generated using NEBNext® Ultra™ II Directional RNA Library Prep Kit. Ribosomal RNA depletion (NEB) was used prior to library preparation. Libraries were sequenced using 2×150 bp reads on NextSeq 1000. After sequencing reads were filtered for quality (FastQC), they were aligned to the MH258 reference genome (Bowtie). Aligned reads counts were binned to reference annotations using featureCounts (Rsubread) and tested for differential expression (DESeq). Differential expression analysis directly compared the wild-type and mutant cell types, generating lists of significantly up- and down-regulated genes (adjusted p-value<0.05 and log 2 (fold change) either >2 or <−2). MH258 genomes were further annotated via PATRIC to add KEGG Pathway and SEED Subsystems. Enrichment analyses was performed using the GSEA( ) function from the clusterProfiler package to search for pathways and subsystems significantly enriched (P-adjusted <0.05) between the two cell types. All analysis was done in Rstudio and plots generated using the tidyverse R package.

[0322] Macrophage Phagocytosis Assay: Murine macrophage line RAW264.7 cells were propagated in DMEM without antibiotics and seeded in triplicate in 24-well plates (Thermo) to 5×10⁵ macrophages. Bacterial overnight cultures were pelleted, resuspended in 1×PBS, and diluted to approximately 1×10⁸ CFU/mL. Each macrophage well was given 10 μl of bacterial suspension (MOI=20), spun down at 380 g for 5 minutes, and incubated 2 hours at 37° C. with 5% CO₂. To remove extracellular bacteria, the cells were washed three times with 1×PBS, and treated with 300 μg/mL gentamicin for 30 minutes, followed by three 1×PBS washes and lysis of the macrophages with 0.2% Triton X-100 for 20 minutes at room temperature. A final volume of 1 mL 1×PBS was added to the wells and serial dilutions were performed to enumerate bacterial CFU on LB carbenicillin plates. For phage-treated cultures, the bacteria were sub-cultured 1:100 and grown at 37° C. to approximately 1×10⁸ CFU/mL. Cells were infected with an MOI of 1-2 of phage stocks and allowed to grow overnight to saturation.

[0323] Uronic Acid Assay: The uronic acid assay was adapted from previously established methods (Dorman, M. J., Feltwell, T., Goulding, D. A., Parkhill, J., and Short, F. L. (2018)). In brief, cultures were grown to saturation and measured for CFU/mL. 500 mL of culture was mixed with 100 uL capsule extraction buffer (1% Zwittergent 3-10 in 100 mM citric acid, pH 2.0) for 20 minutes at 50° C. The cells were then pelleted at 14,000 g for 5 minutes to remove debris. 250 μl of supernatant was removed twice to a new tube, where 1 mL cold 100% ethanol was added and the mixture allowed to precipitate on ice for 30 minutes before centrifugation (18,000 g at 4° C.). The supernatant was removed, the samples air dried, and resuspended in 200 μl sterile water. Capsule quantification was measured by mixing 100 μl of suspension with 0.6 mL tetraborate solution (12.5 mM disodium tetraborate in sulfuric acid), compared to a standard curve of glucuronic acid. Samples were incubated on ice for 10 minutes, heated at 95° C. for 5 minutes, and cooled on ice for 5 minutes. Sample absorbance was measured at 520 nM with 175 μl of sample before and after addition of 2.5 uL 0.15% 3-hydroxybiphenyl in 0.5% sodium hydroxide.

[0324] Directed Evolution of Bacteriophages: Phages were passaged over a period of seven days and ran in triplicate for each phage. On Day 0, a saturated culture of wildtype MH258 (for ΦER16) or MH258 overexpressing csrD (ΦER46) was diluted 1:30 in LB broth. 3 mL of this dilution was inoculated with approximately 10⁵ PFU of phage and incubated at 37° C. overnight. For Days 1-7, 1 mL of the phage-infected overnight was treated with 100 μL of chloroform, incubated at room temperature for 10 minutes, then centrifuged at 400×g for 5 minutes. The supernatant was saved at 4° C. to be used for further passaging and kill curves. The remaining 2 mL of overnight were passed through a 0.22 μm filter and stored at 4° C. for later use in sequencing. Then, a new overnight of MH258 host was diluted 1:30 and inoculated with 3 μL of the day's chloroform-treated phage lysate. These samples were incubated overnight at 37° C., with this process repeating until Day 7. The chloroform-treated isolates were serially diluted 1:10 in PBS and titered on LB-agar plates for every day of the protocol on 0.6% top agar lawns of ΦER26, a capsule mutant of MH258. ΦER16 and ΦER46 were plated on ΦER26 because they had been shown to form clearer plaques on this background. Plates were incubated overnight at 37° C. and titers counted the following day.

[0325] Antibiotic sensitivity: Overnight cultures were diluted 1:30 in PBS (approximately 1.5×10⁸ CFU/ml) and swabbed onto an LB plate. Antibiotic disks (Oxoid) containing the following antibiotics were firmly placed on top of the bacteria layer: Aztreonam—30 μg; Colistin—10 μg; Tigecycline—15 μg; Cefepime—30 μg; Tobramycin—10 μg; Amikacin—30 μg; Ciprofloxacin—5 μg; Piperacillin/Tazobactam—110 μg; Meropenem—10 μg; Imipenem—10 μg. After 18-20 hours incubation at 37° C., the diameter of the zone of clearing next to each disk was measured. For strains carrying a complementation plasmid, the cultures were swabbed on LB streptomycin plates to maintain plasmid selection. For phage-treated cultures, the bacteria were sub-cultured 1:100 and grown at 37° C. to approximately 1×10⁸ CFU/mL. The culture was then split, the cells were infected with an MOI of 1-2 of phage stocks, and allowed to grow overnight to saturation.

[0326] Mouse Decolonization Experiments: Gnotobiotic mice were bred and housed within the University of Chicago Gnotobiotic Research Animal Facility (GRAF) associated with a stable consortium of 14 microbes (see Table 2). Strains were selected out of an internal library of 65 human-derived bacterial species using a simple, unsupervised feature selection heuristic that maximizes functional metagenomic representation (KEGG, Metacyc, CAZymes) as compared to healthy human microbiome from the Integrated Human Microbiome Project (Lloyd-Price, J., Mahurkar, A., Rahnavard, G., Crabtree, J., Orvis, J., Hall, A. B., Brady, A., Creasy, H. H., McCracken, C., Giglio, M. G., et al. (2017)). This selection scheme resulted in a community that contains all major phyla in the gut microbiota and recapitulates ˜75% of the metabolic pathways found in the healthy human microbiome (Franzosa, E. A., Mclver, L. J., Rahnavard, G., Thompson, L. R., Schirmer, M., Weingart, G., Lipson, K. S., Knight, R., Caporaso, J. G., Segata, N., et al. (2018)). Each fully genome-sequenced, human-derived type strain was introduced into germ-free C57BL6/J (B6) mice to generate a colony with a known, stable microbiota (Akkermansia muciniphila, Alistipes finegoldii, Anaerostipes caccae, Bacteroides thetaiotaomicron, Bacteroides uniformis, Bifidobacterium adolescentis, Escherichia coli, Limosilactobacillus reuteri, Parabacteroides distasonis, Phocaeicola vulgatus, Roseburia inulinivorans, [Ruminoccocus] gnavus, Subdoligranulum variable, Turicibacter sanguinis). Community composition has remained stable for >3 years and is vertically transmitted to pups, as monitored by 16S rRNA sequencing of fecal samples with the aid of the UChicago Duchoissois Family Institute Microbiome Metagenomics Facility (DFI MMF). For 16S rRNA sequencing, DNA was extracted from fecal pellet with QIAamp PowerFecal Pro, V4-V5 16S was PCR amplified using barcoded dual-index primers, libraries were prepped with QIASeq 1-step amplicon library prep, and 2×250 PE MiSeq was used for sequencing at 10⁴ reads/sample. Resulting short reads were analyzed using dada2 and BLAST to local database.

[0327] Gnotobiotic C57BL/6 mice were bred and housed in Trexler-style flexible firm isolators (Class Biologically Clean) within Ancare polycarbonate mouse cages (N10HT). Gnotobiotic mice were weaned at 21 days of age and were fed an autoclaved, plant-based mouse chow (LabDiet JL Rat and Mouse/Auto 6F 5K67). All mice were housed in cages containing autoclaved Teklad Pine Shavings (Cat #7088) with a 12-hour light/dark cycle at a standard room temperature of 20-24° C. All mice were euthanized by CO₂ asphyxiation followed by cervical dislocation as a secondary measure. All experiments utilized both male and female mice. All experiments were performed in accordance with the Guide for the Care and Use of Laboratory Animals (8^{th} ed.) and were approved by the Institutional Animal Care and Use Committee of the University of Chicago (Protocol 72610).

[0328] 8-12 week old C57BL/6 mice colonized with the defined consortia in the UChicago Gnotobiotic Animal Research Facility were given a gavage of 200 μl Klebsiella pneumoniae MH258 at 1-4×10⁸ CFU/mL in PBS on Day 0 and monitored by fecal collections for 15 days. Samples were sent for 16S sequencing at the UChicago DFI MMF and plated for CFU counts on LB carbenicillin plates at room temperature. On Days 7 and 8, mice were gavaged with 200 μl of either PBS or a 5-phage cocktail (ΦER12, ΦER15, ΦER16e, ΦER39, and ΦER46e at ˜10⁹ PFU/mouse). Cell titers were determined by resuspension of the fecal pellet in 1 mL PBS and shaken in a PowerLyzer 24 homogenizer (Qiagen) for 2 minutes at 2,000 rpm, followed by a quick 30 second spin at 300 g. Phage titer was determined by serial dilution of the homogenized fecal slurry supernatant after a 10-minute spin at 10,000 g. Phages were enumerated on differing lawns: both ΦER12 and ΦER39 formed plaques at high titer on MH258 and were further distinguished on a lawn of ΔwaaH, which prevented plaquing of ΦER39. Both ΦER15 and ΦER16e were counted on a non-capsulated ΔwaaH derivative (containing a truncated wzc gene) but were not able to be distinguished morphologically. PCR on plaques confirmed the presence of ΦER15 or ΦER16 and in different experiments, one predominated over the other. ΦER46e was enumerated on galU::IS, which prevented the other four phages from forming plaques. The capsulated status of a strain was visually determined by observation of colony morphology.

[0329] Data Analysis and Statistics: Statistical analyses were performed using GraphPad Prism version 10.0.

[0330] All of the methods disclosed and claimed herein can be made and executed without undue experimentation in light of the present disclosure. While the compositions and methods of this disclosure have been described in terms of certain aspects, it will be apparent to those of skill in the art that variations may be applied to the methods and in the steps or in the sequence of steps of the method described herein without departing from the concept, spirit, and scope of the disclosure. More specifically, it will be apparent that certain agents which are both chemically and physiologically related may be substituted for the agents described herein while the same or similar results would be achieved. All such similar substitutes and modifications apparent to those skilled in the art are deemed to be within the spirit, scope, and concept of the disclosure as defined by the appended claims.

### REFERENCES

[0331] The following references, to the extent that they provide exemplary procedural or other details supplementary to those set forth herein, are specifically incorporated herein by reference.
[0332] 1. The Review on Antimicrobial Resistance (2016). Tackling Drug-Resistant Infections Globally: Final Report and Recommendations.
[0333] 2. Services, U.S.D. of H. and Human (2019). Antibiotic resistance threats in the United States. Centers for Disease Control and Prevention, 1-113.
[0334] 3. Murray, C. J. L., Ikuta, K. S., Sharara, F., Swetschinski, L., Aguilar, G. R., Gray, A., Han, C., Bisignano, C., Rao, P., Wool, E., et al. (2022). Global burden of bacterial antimicrobial resistance in 2019: a systematic analysis. The Lancet 399, 629-655. 10.1016/S0140-6736 (21) 02724-0.
[0335] 4. Snitkin, E. S., Zelazny, a. M., Thomas, P. J., Stock, F., Henderson, D. K., Palmore, T. N., and Segre, J. a. (2012). Tracking a Hospital Outbreak of Carbapenem-Resistant Klebsiella pneumoniae with Whole-Genome Sequencing. Science Translational Medicine 4, 148ra116-148ra116. 10.1126/scitranslmed.3004129.
[0336] 5. Keith, J. W., and Pamer, E. G. (2019). Enlisting commensal microbes to resist antibiotic-resistant pathogens. Journal of Experimental Medicine 216, 10-19. 10.1084/jem.20180399.
[0337] 6. Federici, S., Kredo-Russo, S., Valdés-Mas, R., Kviatcovsky, D., Weinstock, E., Matiuhin, Y., Silberberg, Y., Atarashi, K., Furuichi, M., Oka, A., et al. (2022). Targeted suppression of human IBD-associated gut microbiota commensals by phage consortia for treatment of intestinal inflammation. Cell 185, 2879-2898.e24. 10.1016/j.cell.2022.07.003.
[0338] 7. Taur, Y., Xavier, J. B., Lipuma, L., Ubeda, C., Goldberg, J., Gobourne, A., Lee, Y. J., Dubin, K. A., Socci, N. D., Viale, A., et al. (2012). Intestinal domination and the risk of bacteremia in patients undergoing allogeneic hematopoietic stem cell transplantation. Clinical Infectious Diseases 55, 905-914. 10.1093/cid/cis580.
[0339] 8 Willems, R. P. J., van Dijk, K., Vehreschild, M. J. G. T., Biehl, L. M., Ket, J. C. F., RemmelzwaaH, S., and Vandenbroucke-Grauls, C. M. J. E. (2023). Incidence of infection with multidrug-resistant Gram-negative bacteria and vancomycin-resistant enterococci in carriers: a systematic review and meta-regression analysis. The Lancet Infectious Diseases. 10.1016/S1473-3099 (22) 00811-8.
[0340] 9. Yuan, J., Chen, C., Cui, J., Lu, J., Yan, C., Wei, X., Zhao, X., Li, N. N., Li, S., Xue, G., et al. (2019). Fatty Liver Disease Caused by High-Alcohol-Producing Klebsiella pneumoniae. Cell Metabolism 30, 675-688.e7. 10.1016/j.cmet.2019.08.018.
[0341] 10. Atarashi, K., Suda, W., Luo, C., Kawaguchi, T., Motoo, I., Narushima, S., Kiguchi, Y., Yasuma, K., Watanabe, E., Tanoue, T., et al. (2017). Ectopic colonization of oral bacteria in the intestine drives TH1 cell induction and inflammation. Science 358, 359-365. 10.1126/science.aan4526.
[0342] 11. Hsu, B. B., Gibson, T. E., Yeliseyev, V., Liu, Q., Lyon, L., Bry, L., Silver, P. A., and Gerber, G. K. (2019). Dynamic Modulation of the Gut Microbiota and Metabolome by Bacteriophages in a Mouse Model. Cell Host & Microbe, 1-12. 10.1016/j.chom.2019.05.001.
[0343] 12. Citorik, R. J., Mimee, M., and Lu, T. K. (2014). Sequence-specific antimicrobials using efficiently delivered RNA-guided nucleases. Nat Biotechnol, 1141-1145. 10.1038/nbt.3011.
[0344] 13. Mimee, M., Citorik, R. J., and Lu, T. K. (2016). Microbiome therapeutics-Advances and challenges. Advanced Drug Delivery Reviews 105, 44-54. 10.1016/j.addr.2016.04.032.
[0345] 14. d'Herelle, F. (1917). Sur un microbe invisible antagoniste des bacilles dysentériques. CR Acad. Sci. Paris 165, 373-375.
[0346] 15. Chanishvili, N. (2012). Phage Therapy-History from Twort and d'Herelle Through Soviet Experience to Current Approaches 1st ed. (Elsevier Inc.) 10.1016/B978-0-12-394438-2.00001-3.
[0347] 16. Onallah, H., Hazan, R., Nir-Paz, R., and Israeli Phage Therapy Center (IPTC) Study Team (2023). Compassionate Use of Bacteriophages for Failed Persistent Infections During the First 5 Years of the Israeli Phage Therapy Center. Open Forum Infectious Diseases 10, ofad221. 10.1093/ofid/ofad221.
[0348] 17. Strathdee, S. A., Hatfull, G. F., Mutalik, V. K., and Schooley, R. T. (2023). Phage therapy: From biological mechanisms to future directions. Cell 186, 17-31. 10.1016/j.cell.2022.11.017.
[0349] 18. Corbellino, M., Kieffer, N., Kutateladze, M., Balarjishvili, N., Leshkasheli, L., Askilashvili, L., Tsertsvadze, G., Rimoldi, S. G., Nizharadze, D., Hoyle, N., et al. (2020). Eradication of a multidrug-resistant, carbapenemase-producing Klebsiella pneumoniae isolate following oral and intra-rectal therapy with a custom made, lytic bacteriophage preparation. Clinical Infectious Diseases 70, 1998-2001. 10.1093/cid/ciz782.
[0350] 19. Doub, J. B., Johnson, A. J., Nandi, S., Ng, V., Manson, T., Lee, M., and Chan, B. (2022). Experience Using Adjuvant Bacteriophage Therapy for the Treatment of 10 Recalcitrant Periprosthetic Joint Infections: A Case Series. Clinical Infectious Diseases, ciac694. 10.1093/cid/ciac694.
[0351] 20. Cano, E. J., Caflisch, K. M., Bollyky, P. L., Van Belleghem, J. D., Patel, R., Fackler, J., Brownstein, M. J., Horne, B., Biswas, B., Henry, M., et al. (2021). Phage Therapy for Limb-threatening Prosthetic Knee Klebsiella pneumoniae Infection: Case Report and in Vitro Characterization of Anti-biofilm Activity. Clinical Infectious Diseases 73, E144-E151. 10.1093/cid/ciaa705.
[0352] 21. Kuipers, S., Ruth, M. M., Mientjes, M., de Sévaux, R. G. L., and van Ingen, J. (2019). A Dutch Case Report of Successful Treatment of Chronic Relapsing Urinary Tract Infection with Bacteriophages in a Renal Transplant Patient. Antimicrobial Agents and Chemotherapy 64. 10.1128/AAC.01281-19.
[0353] 22. Ichikawa, M., Nakamoto, N., Kredo-Russo, S., Weinstock, E., Weiner, I. N., Khabra, E., Ben-Ishai, N., Inbar, D., Kowalsman, N., Mordoch, R., et al. (2023). Bacteriophage therapy against pathological Klebsiella pneumoniae ameliorates the course of primary sclerosing cholangitis. Nat Commun 14, 3261. 10.1038/s41467-023-39029-9.
[0354] 23. Nobrega, F. L., Vlot, M., de Jonge, P. A., Dreesens, L. L., Beaumont, H. J. E., Lavigne, R., Dutilh, B. E., and Brouns, S. J. J. (2018). Targeting mechanisms of tailed bacteriophages. Nature Reviews Microbiology 16, 760-773. 10.1038/s41579-018-0070-8.
[0355] 24. Huiting, E., and Bondy-Denomy, J. (2023). Defining the expanding mechanisms of phage-mediated activation of bacterial immunity. Current Opinion in Microbiology 74, 102325. 10.1016/j.mib.2023.102325.
[0356] 25. Labrie, S. J., Samson, J. E., and Moineau, S. (2010). Bacteriophage resistance mechanisms. Nature reviews. Microbiology 8, 317-327. 10.1038/nrmicro2315.
[0357] 26. Jung, H.-J., Littmann, E. R., Seok, R., Leiner, I. M., Taur, Y., Peled, J., van den Brink, M., Ling, L., Chen, L., Kreiswirth, B. N., et al. (2019). Genome-Wide Screening for Enteric Colonization Factors in Carbapenem-Resistant ST258 Klebsiella pneumoniae. mBio 10, 1-15. 10.1128/mBio.02663-18.
[0358] 27. Gurney, J., Brown, S. P., Kaltz, O., and Hochberg, M. E. (2020). Steering Phages to Combat Bacterial Pathogens. Trends in Microbiology 28, 85-94. 10.1016/j.tim.2019.10.007.
[0359] 28. Oromi-Bosch, A., Antani, J. D., and Turner, P. E. (2023). Developing Phage Therapy That Overcomes the Evolution of Bacterial Resistance. Annual Review of Virology 10, null. 10.1146/annurev-virology-012423-110530.
[0360] 29. Wyres, K. L., Lam, M. M. C., and Holt, K. E. (2020). Population genomics of Klebsiella pneumoniae. Nature Reviews Microbiology. 10.1038/s41579-019-0315-1.
[0361] 30. Li, Y., and Bondy-Denomy, J. (2021). Anti-CRISPRs go viral: The infection biology of CRISPR-Cas inhibitors. Cell Host & Microbe 29, 704-714. 10.1016/j.chom.2020.12.007.
[0362] 31. Goodman, A. L., McNulty, N. P., Zhao, Y., Leip, D., Mitra, R. D., Lozupone, C. a, Knight, R., and Gordon, J. I. (2009). Identifying genetic determinants needed to establish a human gut symbiont in its habitat. Cell host & microbe 6, 279-289. 10.1016/j.chom.2009.08.003.
[0363] 32. Mutalik, V. K., Adler, B. A., Rishi, H. S., Piya, D., Zhong, C., Koskella, B., Kutter, E. M., Calendar, R., Novichkov, P. S., Price, M. N., et al. (2020). High-throughput mapping of the phage resistance landscape in E. coli. PLOS Biology 18, e3000877. 10.1371/journal.pbio.3000877.
[0364] 33. Timmermans, J., and Van Melderen, L. (2009). Conditional Essentiality of the csrA Gene in Escherichia coli. Journal of Bacteriology 191, 1722-1724. 10.1128/jb.01573-08.
[0365] 34. Klein, G., Müller-Loennies, S., Lindner, B., Kobylak, N., Brade, H., and Raina, S. (2013). Molecular and Structural Basis of Inner Core Lipopolysaccharide Alterations in Escherichia coli. J Biol Chem 288, 8111-8127. 10.1074/jbc.M112.445981.
[0366] 35. van Aartsen, J. J., and Rajakumar, K. (2011). An optimized method for suicide vector-based allelic exchange in Klebsiella pneumoniae. Journal of Microbiological Methods 86, 313-319. 10.1016/j.mimet.2011.06.006.
[0367] 36. Huang, T.-W., Lam, I., Chang, H.-Y., Tsai, S.-F., Palsson, B. O., and Charusanti, P. (2014). Capsule deletion via a λ-Red knockout system perturbs biofilm formation and fimbriae expression in Klebsiella pneumoniae MGH 78578. BMC Research Notes 7, 13. 10.1186/1756-0500-7-13.
[0368] 37. Sharan, S. K., Thomason, L. C., Kuznetsov, S. G., and Court, D. L. (2009). Recombineering: a homologous recombination-based method of genetic engineering. Nat. Protocols 4, 206-223.
[0369] 38. Baba, T., Ara, T., Hasegawa, M., Takai, Y., Okumura, Y., Baba, M., Datsenko, K. A., Tomita, M., Wanner, B. L., and Mori, H. (2006). Construction of Escherichia coli K-12 in-frame, single-gene knockout mutants: the Keio collection. Mol Syst Biol 2, 2006.0008. 10.1038/msb4100050.
[0370] 39. Patro, L. P. P., and Rathinavelan, T. (2019). Targeting the Sugary Armor of Klebsiella Species. Frontiers in Cellular and Infection Microbiology 9. 10.3389/fcimb.2019.00367.
[0371] 40. Tsai, Y.-K., Fung, C.-P., Lin, J.-C., Chen, J.-H., Chang, F.-Y., Chen, T.-L., and Siu, L. K. (2011). Klebsiella pneumoniae Outer Membrane Porins OmpK35 and OmpK36 Play Roles in both Antimicrobial Resistance and Virulence. Antimicrobial Agents and Chemotherapy 55, 1485-1493. 10.1128/aac.01275-10.
[0372] 41. Yu, F., and Mizushima, S. (1982). Roles of lipopolysaccharide and outer membrane protein OmpC of Escherichia coli K-12 in the receptor function for bacteriophage T4. Journal of Bacteriology 151, 718-722. 10.1128/jb. 151.2.718-722.1982.
[0373] 42. Clavel, T., Lazzaroni, J. C., Vianney, A., and Portalier, R. (1996). Expression of the tolQRA genes of Escherichia coli K-12 is controlled by the RcsC sensor protein involved in capsule synthesis. Molecular Microbiology 19, 19-25. 10.1046/j. 1365-2958.1996.343880.x.
[0374] 43. Hirakawa, H., Suzue, K., and Tomita, H. (2022). Roles of the Tol/Pal System in Bacterial Pathogenesis and Its Application to Antibacterial Therapy. Vaccines 10, 422. 10.3390/vaccines 10030422.
[0375] 44. Esquerré, T., Bouvier, M., Turlan, C., Carpousis, A. J., Girbal, L., and Cocaign-Bousquet, M. (2016). The Csr system regulates genome-wide mRNA stability and transcription and thus gene expression in Escherichia coli. Sci Rep 6, 25057. 10.1038/srep25057.
[0376] 45. Mike, L. A., Stark, A. J., Forsyth, V. S., Vornhagen, J., Smith, S. N., Bachman, M. A., and Mobley, H. L. T. (2021). A systematic analysis of hypermucoviscosity and capsule reveals distinct and overlapping genes that impact Klebsiella pneumoniae fitness. PLOS Pathogens 17, e1009376. 10.1371/journal.ppat. 1009376.
[0377] 46. Tal, N., Millman, A., Stokar-Avihail, A., Fedorenko, T., Leavitt, A., Melamed, S., Yirmiya, E., Avraham, C., Brandis, A., Mehlman, T., et al. (2022). Bacteria deplete deoxynucleotides to defend against bacteriophage infection. Nat Microbiol 7, 1200-1209. 10.1038/s41564-022-01158-0.
[0378] 47. Hsueh, B. Y., Severin, G. B., Elg, C. A., Waldron, E. J., Kant, A., Wessel, A. J., Dover, J. A., Rhoades, C. R., Ridenhour, B. J., Parent, K. N., et al. (2022). Phage defence by deaminase-mediated depletion of deoxynucleotides in bacteria. Nat Microbiol 7, 1210-1220. 10.1038/s41564-022-01162-4.
[0379] 48. Ernst, C. M., Braxton, J. R., Rodriguez-Osorio, C. A., Zagieboylo, A. P., Li, L., Pironti, A., Manson, A. L., Nair, A. V., Benson, M., Cummins, K., et al. (2020). Adaptive evolution of virulence and persistence in carbapenem-resistant Klebsiella pneumoniae. Nature Medicine 26, 705-711. 10.1038/s41591-020-0825-4.
[0380] 49. Burmeister, A. R., Fortier, A., Roush, C., Lessing, A. J., Bender, R. G., Barahman, R., Grant, R., Chan, B. K., and Turner, P. E. (2020). Pleiotropy complicates a trade-off between phage resistance and antibiotic resistance. Proceedings of the National Academy of Sciences, 201919888. 10.1073/pnas. 1919888117.
[0381] 50. Bulman, Z. P., Krapp, F., Pincus, N. B., Wenzler, E., Murphy, K. R., Qi, C., Ozer, E. A., and Hauser, A. R. (2021). Genomic Features Associated with the Degree of Phenotypic Resistance to Carbapenems in Carbapenem-Resistant Klebsiella pneumoniae. mSystems 6, 10.1128/msystems.00194-21. 10.1128/msystems.00194-21.
[0382] 51. Borin, J. M., Avrani, S., Barrick, J. E., Petrie, K. L., and Meyer, J. R. (2021). Coevolutionary phage training leads to greater bacterial suppression and delays the evolution of phage resistance. Proceedings of the National Academy of Sciences of the United States of America 118, 1-10. 10.1073/pnas.2104592118.
[0383] 52. Burrowes, B. H., Molineux, I. J., and Fralick, J. A. (2019). Directed in vitro evolution of therapeutic bacteriophages: The appelmans protocol. Viruses/1. 10.3390/v11030241.
[0384] 53. Friman, V.-P., Soanes-Brown, D., Sierocinski, P., Molin, S., Johansen, H. K., Merabishvili, M., Pirnay, J.-P., De Vos, D., and Buckling, A. (2016). Pre-adapting parasitic phages to a pathogen leads to increased pathogen clearance and lowered resistance evolution with Pseudomonas aeruginosa cystic fibrosis bacterial isolates. Journal of Evolutionary Biology 29, 188-198. 10.1111/jeb. 12774.
[0385] 54. Eskenazi, A., Lood, C., Wubbolts, J., Hites, M., Balarjishvili, N., Leshkasheli, L., Askilashvili, L., Kvachadze, L., van Noort, V., Wagemans, J., et al. (2022). Combination of pre-adapted bacteriophage therapy and antibiotics for treatment of fracture-related infection due to pandrug-resistant Klebsiella pneumoniae. Nature Communications 13, 302. 10.1038/s41467-021-27656-z.
[0386] 55. Castledine, M., Padfield, D., Sierocinski, P., Soria Pascual, J., Hughes, A., Mäkinen, L., Friman, V.-P., Pirnay, J.-P., Merabishvili, M., de Vos, D., et al. (2022). Parallel evolution of Pseudomonas aeruginosa phage resistance and virulence loss in response to phage treatment in vivo and in vitro. eLife/1, e73679. 10.7554/eLife.73679.
[0387] 56. Torres-Barceló, C., Turner, P. E., and Buckling, A. (2022). Mitigation of evolved bacterial resistance to phage therapy. Current Opinion in Virology 53, 101201. 10.1016/j.coviro.2022.101201.

[0388] 57 Storms, Z. J., Teel, M. R., Mercurio, K., and Sauvageau, D. (2019). The Virulence Index: A Metric for Quantitative Analysis of Phage Virulence. Phage 1, 17-26. 10.1089/phage.2019.0001.
[0389] 58. Sorbara, M. T., Dubin, K., Littmann, E. R., Moody, T. U., Fontana, E., Seok, R., Leiner, I. M., Taur, Y., Peled, J. U., van den Brink, M. R. M., et al. (2019). Inhibiting antibiotic-resistant Enterobacteriaceae by microbiota-mediated intracellular acidification. Journal of Experimental Medicine 216, 84-98. 10.1084/jem.20181639.
[0390] 59. Pires, D. P., Cleto, S., Sillankorva, S., Azeredo, J., and Lu, T. K. (2016). Genetically Engineered Phages: a Review of Advances over the Last Decade. Microbiology and Molecular Biology Reviews 80, 523-543. 10.1128/mmbr.00069-15.
[0391] 60. Ando, H., Lemire, S., Pires, D. P., and Lu, T. K. (2015). Engineering Modular Viral Scaffolds for Targeted Bacterial Population Editing. Cell Systems 1, 187-196. 10.1016/j.cels.2015.08.013.
[0392] 61. Latka, A., Lemire, S., Grimon, D., Dams, D., Maciejewska, B., Lu, T., Drulis-Kawa, Z., and Briers, Y. (2021). Engineering the Modular Receptor-Binding Proteins of Klebsiella Phages Switches Their Capsule Serotype Specificity. mBio 12, 1-12. 10.1128/mBio.00455-21.
[0393] 62. Yosef, I., Goren, M. G., Globus, R., Molshanski-Mor, S., and Qimron, U. (2017). Extending the Host Range of Bacteriophage Particles for DNA Transduction. Molecular Cell 66, 721-728.e3. 10.1016/j.molcel.2017.04.025.
[0394] 63. Yehl, K., Lemire, S., Yang, A. C., Ando, H., Mimee, M., Torres, M. D. T., de la Fuente-Nunez, C., and Lu, T. K. (2019). Engineering Phage Host-Range and Suppressing Bacterial Resistance through Phage Tail Fiber Mutagenesis. Cell 179, 459-469.e9. 10.1016/j.cell.2019.09.015.
[0395] 64. Huss, P., Meger, A., Leander, M., Nishikawa, K., and Raman, S. (2021). Mapping the functional landscape of the receptor binding domain of T7 bacteriophage by deep mutational scanning. eLife 10, e63775. 10.7554/eLife.63775.
[0396] 65. Squeglia, F., Maciejewska, B., \\c atka, A., Ruggiero, A., Briers, Y., Drulis-Kawa, Z., and Berisio, R. (2020). Structural and Functional Studies of a Klebsiella Phage Capsule Depolymerase Tailspike: Mechanistic Insights into Capsular Degradation. Structure, 613-624. 10.1016/j.str.2020.04.015.
[0397] 66. Pan, Y., Lin, T., Chen, C., Tsai, Y., Cheng, Y.-H., Chen, Y.-Y., Hsieh, P.-F., Lin, Y.-T., and Wang, J.-T. (2017). Klebsiella Phage ΦK64-1 Encodes Multiple Depolymerases for Multiple Host Capsular Types. Journal of Virology 91, 1-16. 10.1128/JVI.02457-16.
[0398] 67. Romero, P. A., and Arnold, F. H. (2009). Exploring protein fitness landscapes by directed evolution. Nat Rev Mol Cell Biol 10, 866-876. 10.1038/nrm2805.
[0399] 68. Hsu, B. B., Plant, I. N., Lyon, L., Anastassacos, F. M., Way, J. C., and Silver, P. A. (2020). In situ reprogramming of gut bacteria by oral delivery. Nat Commun 11, 5030. 10.1038/s41467-020-18614-2.
[0400] 69. Lourenço, M., Chaffringeon, L., Lamy-Besnier, Q., Pédron, T., Campagne, P., Eberl, C., Bérard, M., Stecher, B., Debarbieux, L., and De Sordi, L. (2020). The Spatial Heterogeneity of the Gut Limits Predation and Fosters Coexistence of Bacteria and Bacteriophages. Cell Host & Microbe, 1-12. 10.1016/j.chom.2020.06.002.
[0401] 70. Weiss, M., Denou, E., Bruttin, A., Serra-Moreno, R., Dillmann, M.-L., and Brüssow, H. (2009). In vivo replication of T4 and T7 bacteriophages in germ-free mice colonized with Escherichia coli. Virology 393, 16-23. 10.1016/j.virol.2009.07.020.
[0402] 71. Baaziz, H., Baker, Z. R., Franklin, H. C., and Hsu, B. B. (2022). Rehabilitation of a misbehaving microbiome: phages for the remodeling of bacterial composition and function. iScience 25, 104146. 10.1016/j.isci.2022.104146.
[0403] 72. Meier-Kolthoff, J. P., and Göker, M. (2017). VICTOR: genome-based phylogeny and classification of prokaryotic viruses. Bioinformatics 33, 3396-3404. 10.1093/bioinformatics/btx440.
[0404] 73. Zerbino, D. R., and Birney, E. (2008). Velvet: Algorithms for de novo short read assembly using de Bruijn graphs. Genome Res. 18, 821-829. 10.1101/gr.074492.107.
[0405] 74. Sánchez-Busó, L., Yeats, C. A., Taylor, B., Goater, R. J., Underwood, A., Abudahab, K., Argimón, S., Ma, K. C., Mortimer, T. D., Golparian, D., et al. (2021). A community-driven resource for genomic epidemiology and antimicrobial resistance prediction of Neisseria gonorrhoeae at Pathogenwatch. Genome Medicine 13, 61. 10.1186/s13073-021-00858-2.
[0406] 75. Lam, M. M. C., Wick, R. R., Judd, L. M., Holt, K. E., and Wyres, K. L. (2022). Kaptive 2.0: updated capsule and lipopolysaccharide locus typing for the Klebsiella pneumoniae species complex. Microbial Genomics 8, 000800. 10.1099/mgen.0.000800.
[0407] 76. Lam, M. M. C., Wick, R. R., Watts, S. C., Cerdeira, L. T., Wyres, K. L., and Holt, K. E. (2021). A genomic surveillance framework and genotyping tool for Klebsiella pneumoniae and its related species complex. Nat Commun 12, 4188. 10.1038/s41467-021-24448-3.
[0408] 77. Bouras, G., Nepal, R., Houtak, G., Psaltis, A. J., Wormald, P.-J., and Vreugde, S. (2023). Pharokka: a fast scalable bacteriophage annotation tool. Bioinformatics 39, btac776. 10.1093/bioinformatics/btac776.
[0409] 78. McNair, K., Zhou, C., Dinsdale, E. A., Souza, B., and Edwards, R. A. (2019). PHANOTATE: a novel approach to gene identification in phage genomes. Bioinformatics 35, 4537-4542. 10.1093/bioinformatics/btz265.
[0410] 79. Chan, P. P., Lin, B. Y., Mak, A. J., and Lowe, T. M. (2021). tRNAscan-SE 2.0: improved detection and functional classification of transfer RNA genes. Nucleic Acids Research 49, 9077-9096. 10.1093/nar/gkab688.
[0411] 80. Laslett, D., and Canback, B. (2004). ARAGORN, a program to detect tRNA genes and tmRNA genes in nucleotide sequences. Nucleic Acids Research 32, 11-16. 10.1093/nar/gkh152.
[0412] 81. Bland, C., Ramsey, T. L., Sabree, F., Lowe, M., Brown, K., Kyrpides, N. C., and Hugenholtz, P. (2007). CRISPR Recognition Tool (CRT): a tool for automatic detection of clustered regularly interspaced palindromic repeats. BMC Bioinformatics 8, 209. 10.1186/1471-2105-8-209.
[0413] 82. Steinegger, M., and Söding, J. (2017). MMseqs2 enables sensitive protein sequence searching for the analysis of massive data sets. Nat Biotechnol 35, 1026-1028. 10.1038/nbt.3988.
[0414] 83. Terzian, P., Olo Ndela, E., Galiez, C., Lossouarn, J., Pérez Bucio, R. E., Mom, R., Toussaint, A., Petit, M.-A., and Enault, F. (2021). PHROG: families of prokaryotic virus proteins clustered using remote homology. NAR Genomics and Bioinformatics 3, lqab067. 10.1093/nargab/lqab067.
[0415] 84. Chen, L., Yang, J., Yu, J., Yao, Z., Sun, L., Shen, Y., and Jin, Q. (2005). VFDB: a reference database for bacterial virulence factors. Nucleic Acids Research 33, D325-D328. 10.1093/nar/gki008.
[0416] 85. Alcock, B. P., Raphenya, A. R., Lau, T. T. Y., Tsang, K. K., Bouchard, M., Edalatmand, A., Huynh, W., Nguyen, A.-L. V., Cheng, A. A., Liu, S., et al. (2020). CARD 2020: antibiotic resistome surveillance with the comprehensive antibiotic resistance database. Nucleic Acids Research 48, D517-D525. 10.1093/nar/gkz935.
[0417] 86 Ondov, B. D., Treangen, T. J., Melsted, P., Mallonee, A. B., Bergman, N. H., Koren, S., and Phillippy, A. M. (2016). Mash: fast genome and metagenome distance estimation using MinHash. Genome Biology 17, 132. 10.1186/s13059-016-0997-x.
[0418] 87. Cook, R., Brown, N., Redgwell, T., Rihtman, B., Barnes, M., Clokie, M., Stekel, D. J., Hobman, J., Jones, M. A., and Millard, A. (2021). INfrastructure for a PHAge REference Database: Identification of Large-Scale Biases in the Current Collection of Cultured Phage Genomes. PHAGE 2, 214-223. 10.1089/phage.2021.0007.
[0419] 88. Darling, A. E., Mau, B., and Perna, N. T. (2010). Progressivemauve: Multiple genome alignment with gene gain, loss and rearrangement. PLOS ONE 5. 10.1371/journal.pone.0011147.
[0420] 89. Lutz, R., and Bujard, H. (1997). Independent and tight regulation of transcriptional units in Escherichia coli via the LacR/O, the TetR/O and AraC/11-12 regulatory elements. Nucleic acids research 25, 1203-1210.
[0421] 90. Gibson, D. G., Young, L., Chuang, R., Venter, J. C., Hutchison, C. A., and Smith, H. O. (2009). Enzymatic assembly of DNA molecules up to several hundred kilobases. Nature methods 6, 343-345. 10.1038/nmeth.1318.
[0422] 91. Dorman, M. J., Feltwell, T., Goulding, D. A., Parkhill, J., and Short, F. L. (2018). The capsule regulatory network of Klebsiella pneumoniae defined by density-traDISort. mBio 9. 10.1128/mBio.01863-18.
[0423] 92. Lloyd-Price, J., Mahurkar, A., Rahnavard, G., Crabtree, J., Orvis, J., Hall, A. B., Brady, A., Creasy, H. H., McCracken, C., Giglio, M. G., et al. (2017). Strains, functions and dynamics in the expanded Human Microbiome Project. Nature. 10.1038/nature23889.
[0424] 93. Franzosa, E. A., McIver, L. J., Rahnavard, G., Thompson, L. R., Schirmer, M., Weingart, G., Lipson, K. S., Knight, R., Caporaso, J. G., Segata, N., et al. (2018). Species-level functional profiling of metagenomes and metatranscriptomes. Nature Methods 15, 962-968. 10.1038/s41592-018-0176-y.
[0425] 94. Callahan, B. J., McMurdie, P. J., Rosen, M. J., Han, A. W., Johnson, A. J. A., and Holmes, S. P. (2016). DADA2: High-resolution sample inference from Illumina amplicon data. Nat Methods 13, 581-583. 10.1038/nmeth.3869.

The application's sequence listing, which the Patent Office published only in electronic form, follows.

SEQUENCE LISTING (74 sequences)

SEQ ID NO: 1 - DNA, 157838 bp, unidentified
  source 1..157838: mol_type = genomic DNA
cccgtctatttcaaaattatcaatcgggacctgtacaccactgttgatagtaacgaacccggtgataggataaaatggcagggaaaggaaagtttctccgccgttagttgaagtgtatgtgaacgggatctggtgtggtgctacgaccaccccaccgaagatttcttctatgtttctggtcatttgaaaataccccataaggcgttaccaatatggggtatttagttgaaatattacattacgtataaaccgccgtcttctgattgtgaaatttcttcttcatcttcagttgacccttctgggataggattgtgagaaacaacatggatttcaccagtcgtcggatcttcaatagtctcttccatataatcccagtcaccgatattgataactttaccagaactatctcgaataactttcattttcattatttcgccacccaaccggtattaccggttccagattctttcacatagaaacaagtacctgccgttccgtccaaccgacgataagtcgacccaacaccagcagttacaaccccttctgggctaccattaccagcggaatcatatactgtcgcagtatattggcgcttcacgacaaaactggcagatatcctaaaccctgattgccccaaagtgaatgcgttatcggtcgtcgggttaaatgctgccgaacccatcacccattgttgggagttgcttacagcgttgaaatacacacgaccaattgtatcaaaggcgatatagccgccattacctgacagtcgccttgtagctgcagtccctgccaatgcccctagagtcaagtccgctgccgtcaggatattaccacttgtatccatcgtcatcaaatctgtaggcgtacttgaatccgctatattggtagaatacgataaatgcaaaaccccggaattatcagtatagaaagaatattctttcttcccgtctagactgctgattcttatgtctttggttatcgggcggctggtataatccccggcggtgacgccctgtaccgtaaatgattttatcccttttgttgcttccgaataatctataatgttgtcaatattatggcgctcagaagatatgtcattataaggcccgatcaaatgggtgtttatcaaattcacgttctgtgaagtacccgtgattttgataaacttggtatcagaaacgccaacagaagccagtctgttggtagtgccaatccggcaaccaaacatattgacgttctgagagttctcgatgtaaacaccccggtaaaccgttgttatcgggttattgtcagaatcgatagtaggcccgttttgtgaaaaaactgtgccgaacatgttgacattatagccaaatgcaagattcagcaacttagcttttaagttatgcgtttcgaaatggccgccaaacaaattaatagcatggtgtggtaatgaagttgaacggcctgctacgttgaaaagtatagaattgtctgctttcgcagtttcaacagtagggcgaataaacaccaattggttagaatcatcaccggttccgtcaccagcagtcccgccattagcaggaccctcatatttttctatggttataccataggaaacttgagtaccagtaacatccattttagatatattctgtacaaatatatcctcaaaggtagaatcgaatgcgaggtaaatcaccagacccttaccaaatccagacgctcccactcgagtcatattacaatggaaaactggtttccacaaagttttatttcccaagaccaaacatgtctggtaatcagccccagaacggaaaccaatgtctctaaaattgattttacaatcttgtacagtgaatgctatctgcccttctgtcatcggttgaatgatagtcgatgtcatccctgaaccgatgaacataaagatagtagcaaggctccctgtgctgcctgctatccgttccaacaaatagctattttcgattttgaacacacccggcgggaacaccaacgggaatttagctttcatattggagttaacaggtgtttgattaatcaaaatccctgtatcgtctaaatatgcatgtatcgcgggatcccaaacccaagtggtctgatcgtttggatctggacgattagtaaccagatgagcatattccataatactaacccaggaggaactgtacaacagacctgcagtagatactgcaagtacagcttcacccaaaggttttcttttggcattgagcaaaaatgacccgtaatcagaacctaattgagattttagagaataagccgaaggaatttctatgagatttacgctaacgttgcctggcgtatacactaaaatattcccgataacacgatttattttcgcaccagccggtatccctgttggaattctccaacttgtttgggccaccacgtcataaacaatgttcttaccgtctaaaactgtattcgtctcagtgctgaggatgacttcagagttcttgacgttgttggcccgcgccacttcttgcggagaacgatcgatttggttgtaaacggtggggtccccattaataacaacgacgacgtcgtccccagcttccagttcatccgccagagtaatcgtactggtagcaggatcaaatgtgaacccacgtcctatctgttgacgggaaccacggatgtagatctcagatactgagtccacgaccacatccaacacgatttgggtttcgccgccgatagctgaaccgccgttgtattcccaggtgattacagtgccaccagaacccccaccgcccgcgccgagctgaattgggatgtactgaataatctgcacatcagaaccagaggccaacgccggatcaaatttgacttcatacccgtcgagagtatacagggattctttcaaacgttttccgtcaacatacacatctacaatagatggttgagtgctcagagtaatagatggtgttgtcgctgacagaatttggctgtaaatttcgcggctgtaaacccggccttgccccagaccgacgcctgatgtaataacccagccacgggcttcaccagtccatgtgaaagtcgcactgacattatcggtagaaatcgtcatgctatccgcagagccatagatcgatttaccgttaccgtcgacagtcagaggataagttgagaatttaccaaaaaggtcacacacagtgatgctatcaccaacccgtttaggggaagggaaaaccaccgtagaggcaccgtcgatgttatccaccagatatgcacgaccaatctgtaataaggatgaaggggcatgcggaaggagttcccagcgcccaccgttaccgccaccaagcggcaaccagccgccttcgttgtaatatccttcaaactggtcgtcgtcttcgttataacggacagcagaaggaaccccagatgcgtcaggagtttctggcacagtcattactgcatctgggccatgttctacaacaccattattcagaataccttcttgaaatacggattgatcttgtgattcaagcccaagcggaaaatttggtttcgtgggtttattagccatttgaaaatacccctagcacatgtaatctcgtctaggggtatttagtttaagatttagaaagaagcacgaagtgaataatcgacagatgctgcggttgttgtattagcattggtcattgtcaggcgtagtttacctgaaacaacagaacctgcgaacgacaaagtccccgccgtacttttttgtgtcaatgacgtcgcctgaagagtaccgtcatacgtcattgtgaccaagaatgtatcaaccaatgtaccccatttagccgtaatcaaaatttgacacagattcaccaaagtgaaatcaggtaacgcagcactaccagaagccgggacagaaacactggtggtgttggttttagccaattttaccgaacccgccagcgccaaattcaaggcgttcatatcagtagtgtacgtcgatacatcgactttgtttgaagacaggccgctgatttggctgtcaaggctggtcattttggtgtcatacgtggatttgtcgactttgtttgaagacaggccactaatttggctatctaaactggtcattttggtgtcatacgtggatttgtcaaccttattcgtagacaggccgctgatttgactgtcaaggctgatcattttcgccgtatacgtcgtattatctactttcccagattgcaaattcgctatctgagaatccagactggtcatcttcgtcgtatatgtcgcagtatccagtttcaggtttatacggttgttgacactggtgaattgcgtttcaatgttcagcatatctgaatcataatccacgaccttcacgtaatcgttgaaacgagtgtcagcgaatatattgttaaacaggcttgtcatagaccatatttgtgacccacctgttggtgaatacacagccagcgattgagggagcgctgtgcctgtcctcacgacaagattggagagatcgacttctaatttgttgtaaccattgggaagcaacgaaatcttcagaccagaaccagaaccaacggagtccacagtgctcagtccatgttttttcaacatgctgaggttcaccgcatccgtgttggccgcaggttcatccgtgatcgttatggagcgttgggtcgggactacgatgccaccatttgcattcaccacagacgcaaaagtctttttcccgtttatcgtttgttcttgcccatcggtccgaacaactttgttggacaaaacgtcgttcattgtatcgatagcagatttcaagacgaacgtaaggtgtgctgacgccggggacaggtcgtcatctaccgtgatatcattcacgacatcagttttgttcagttttccatcgaccgcatctagaatattatctatctgctggcctgtatatttgctcagataatcagccattttcttaactcctagtgctttcgaggaatactttgaaaccagatggatggaagtgttgacggaacacgcgatcgaatacaccttcgaaatctgcgacgtcgccaggtattcttatgacatatgtgtattcgtcatagtagtaatcatcacgaagaccaacttcaccatcacaatcaaagttagcatccagaccagccaaatcttcttttggataatacacagtaacaggaacaccgaaataaatccagaagaacaattctatcgctttctgtgttccccgtattttatagatatgcttcaacaatttcagccagcgggtatggtctaatgtccggcggcgcgttccctcgatataaacagagaactgattgccatcggatgtaataaggccatcagagccttctggtacaaagaatccaaattcaggaaaagatttgtcaaccgttctttgaaacccgaattctttataccaggcgtcaatacttgaattcttgtcttcaggtgaaaacaatggacgaccatcagagtccaacaattcttcagtatcaagtgccatcatttgctcaaatgtcctgaccaaatatttgtcaaggagcatatcacgcgcagcagtaccgggcgtcttctgtatcttcaggtctaccagctgcatcagcgggctggcgtcactatccggattcagccaactggtgtctgccaggtaagcaaggatttcttcttcagtgaaaccattttggcggtacagccaattgaagaacgtatccatgaactcaatgaacagagggaaatcgttctggtagaacaacggcgtctcatacttgacgcccagatgtccgttattaagatctttggacatagcggacctccgcgtctacggtcacatcaccaatacgaagaacctgattggacgcaacctggatgttctgattcaacccttctggggatacaacaatagccgcgccaccttcatcatagtttgacactgtgatctgctgaagttcaacgacgccatttgcgtaatcaacgacaccaacagcctgcaccagatattccttcgtcgtatcagaagtgctgaccttgtacatattgagaacaccatttacatcccggatgtaataagtgaaatcaacttcagctggaagcggcttgaacccgttgataacaaccgagccagatttgatggaacgaccgaaatcaaacgtaaagctgtcaagaacaccatattctggtttgaagtgacgcttgtacgcgacagaagtaatattggaaacgatggaacgctccatatctgttatggcgttttgtaaaacttctttgtcaaacagctcatcaaaattgtcgagattattggttccccaggttacaacacctttcttgacgagagttttcaacccgtcttcagcatacgctgttgccgtcgggtcccagaatatcgtggtgttgacctgaatatacgtgacttcggcgtccacaaccttcggagttatagaaccaacattgtatttgtcaagagtagacacgatatcggctttctcagcatcggaaagtgtttcacccactgttgggattacagcgatgtaaacataaccagggtccggtggattgagcgtatctccaccatagcctttagcccgtagaacgttcgagaagagtttctctgtcaggtaggcatagtctgtttcggctactgctgcgccgtccgcctgatagctcagaggggcaagacgcttggtatcctctatggactctggatcagtaccgcccgcgcttctttccgatacgagttcgatatctaccaggttgttcccagcgatcgcagtcgcggatgaaactgaagtaatatcgttgccgtccgcgccggaagtctccagatactgcaagaacacgacgttcccgtcttcaacacgacgacaaatataaccatccccaaattcaaaagtgtagaagccatcaaggcccaattccacgaaataaagacgagcgtattgattcagatcaaacggactgttgtaacgatcaaacgtgtaagacacatcagaagtctcagattcctgcacgttgacaaccagatgattgatatctacattagtagatgggatcttgtatgtactgatcgcgctaccttcaacatcatacgttttgtaaagccaatcaccctgaatgagttttacattctcaaaaagataatatccttctggtcgcagggttgtggacacaggtttttcaacggtgaagttgtaagacttcccatctttggccccaacaaacataaccttgcgatccatgatgatttcgcttggtgctgtggccgcatcgtagggggtgactttaacatttgcatacatgtacgccgcctgatagttctcaggggtgtacgacaagaatgcagatgacaagccaacattagaacgttgttgggctgattggaggtgactttctccgttcagcatattctgcataaagccgatagcattcgcgtcagaggcaagcagacggatgatagcactgagaccagatccttcaaagtcataatccttgaaggtcggatcagctttcatacgctgcttgataatgtattcgaaagccctgacgtcgagtgaaggaactgtttgtgtagccatgttgatctccgtcacacaagtttgaatatggtgttggagatatttagctgttgaagacagagaaaggaatttgttctcgcgcgcgttattatcaaatatattaatcaactcgcttcgctcgtaagaccgccctgtgcgggctggcacccttccacagccagggaggctgcttctcgttgttcgttgacactcacaactcgaagggcacagcgttagcatacagtctagagatgtgttagaaaagtagtttctgcctattaataaaacactcctgtaatttagagacaaatattcaataacattcgttctattataatgatggcgtttatttcaattctacaagaggatcttattatgcacattaacaccgcagttatgaaacacatcattcctttattagaaaaatatgaaggacaacaagccaccaaaatttctttgacgacaattgctgaggaagttaaactcctgacaaataaaggggtaaatttccgtcgcgttatcgacaatgcggtttcccttgctcgttccgatatgaaacacaacaccttttcatttaacatcgacgtcacgagtgagttccgcaacgaactggaacaatcttccaccgcccgccgcgaccgcttccgtcatttatatgttcgtcccaacatgccggaatgtcgtattgggatcaaactggaagccgtccgcacggacactgcgttcacaatcaactatgttctggaaccagaaagccagcgcatctacttcgttgcgatcatcggcttctacggtaatgccatcaatggctggtgtgaccgtgttaatctgggcgaaacaacgaattcacattctattccgtctacgcattatatgtcgaatgcagctgctcaggaatatgtgtttatcctagagaaggttgtgaagttttctgtggtaaaataacgctttattcaatacagaattacagtaaagtaagttgcatggaagggagggaacagtatgacaatcatagcgttactccttatcctcatcatcgggatggccttcactctcctgggaacacccgatgtttactctggtaaagcgccttcgatagcgcaccgggttttgagcagaggttcgccgcaggattttgggtcctgttgctcaagaggagaggacttttcaaattagccgtgttgtagtatcataaaatttcaagggaaacagcacagtgggagtaggcttgaacccgaaaccagttaacccctagtctcaggggcttgtgtgaatagaggcagcgcagtaaccctgctggtgttggtggacgcactaaccgtcggagaacgaaactccctgttgaaagtgtgattagctcagaaaagtatccgcaaagcggaggcgagagcatcccggcggcgagtcgacaccgcacgatgggaaggtcgagggctggtaatcctcatcacaccgacaacattatgagtcttctaaagagggttcataatgttgcgtcaaagggcaacacaaaggtttcctgttggtaacataattgttcctactgtcttcccggattctaggagcgccaacaggacgaggccggatgcgtaagttccggcaaataaaaagttttgtcaataagagttaacagagtatagttaacccactgagagaaaagctgtttgggcattagacaaacacttcgatgtgaacccaggacatggtgtcttgtgctcaaacaggttttcgttctcgttgtgtgcgactttgcgggtttttagaaactgaccacaaagataaatgcaaacgataatacgttcctggcagtagcttaacagccatacaccagcaaggtcttccgactccttgtcaatgaattcggcgcactaacaataggcgggagggtgtgattaataagctcccgccgactaaaacggctccatctttgagggcattccgcgtcagacgcgaaactgcatggaacttcaggggaaaggcaacttaaatccgacgccggaatagcgctagtcaatatcggagcctgttgtacactgaatgccctcaaagatggaatgcaaggtaaatgcaaatcggttctcacttgtagtggctcaccaccgtgaacgtgattcaggactgagatgacatttcattgtgcaaggtttgaagacatgttgcggttcataaccctacagcctctgttcaaaactgaacacaatgtctggtgatctggcagacacccggtcttgcatgacatccacacaaatcgaagtgccttgacaatttatcttaaacccaaaggttgatctacaaagtggacggccagcccggtagacgataacaatatgttgggccacaactgttgagtcagggcacttcgatttgtgaacttgagagagcattgggtgaaaaagaccatgccttgcagattgcgatgcctacacattccgggcactggtgggcaccaagaagaactcagtagcagacgagccatcagggttagctacccggcgcggcgaggactgggaggccgaactaaggggaaacccgagacaggcgtagtattctcaagttcacaaaatgaagagcatttaaagagttcgattctctttcaggccattcgtggtgtggtgtgagtcatgaatgttcttcatctttgggtgattctatgttgccgggctatcaacccatgcttgctggagcaaccagcggctctgaatcaaccagccagcctcgtttggtccgagcgttagaggacaagttgcttctgtatagatgctgctatgtttggtgaattctgctaagcgcaagagggaacggaatagtctcatctccttgagtctgatggtttcatcacacccggccttattttccgtggtaaggtcatcgggaggcacccgacaccaaacagcttggtctagcgaatagacaagtgcctgactttcacttaggtgcgagttgcgacattggttgcaactttgaggatactggcatccgaatatcagttatgggtgactagtagacgtcgtcagtgtcctcaaagttgtgtccaacccgatcttacaagcccgtatcccggtctggttaagacttgtaagtggaaagccctggaaaaataaactcctgggatgagcctggcagcagggcgatgacatccagaagagttgccgtaaggtgcttgataagactcgcatgaactgatcatgcgcaaacgggataaaaggtctagcagcccttggttgatcacaactcaactattacaacccggcccgccataagtgcggtcaaataatgataggagaagcaacatgacttggcgacagcgcggttacaaacctgtagaattgatctaaaatttgccggcgccctggttgagtgagagatcgctgcccaaaccgggaggaatgggggaggtaaatcctcccccagaccaaagagtaagtagttcatattgtcgtgggtaatcctttaggccgtactgatcaaacggtttatgggtcgctataggacaagagattccaaccctctgtcttggtattgtccacgacaatatgaattaaaagattttggtcctgtagctcagtggttagagcagtcgactcataatcgattggtcattggttcaaaaccaatcaggatcaccatatgtttccttagctcagctggatagagcaacggccttctaagccgtcggtcacaggttcgaatcctgtagggaacaccaaaataagagattgaacatgaaaggcaaagtatcattaaaagaaaagattcgccgttcagaacagtctttgaacgaaaaatctgatggtgttttgtataaagatggtgatggcaataatttcactatgacaaaaactgctgttggttacagaataaataaaccagttgttcaataaacaattggtgagtatgatgaaatcgttcagtgattatctcagtgaatgtaatgacgagccgatagttgagtttgttgaaaagcgtggtgatcattgggttgtgttggatcataccaaaacaaaggttttgggaacacatgactccaaagaagacgctgagaagcaacttcgagccatagaatcgaataaataggaagattggcagagcggtattgcagcaccctgctaaggtgtacaaccgaaaggttgcacaggttcgaatcctgtatcttccgccaaattgatgatggtgtagttcagtcggtagaacggtggactgttaatccatatgtcgcaggttcaagtcctgccaccatcgccagataatgggtgtgaaacgaaagcgagtaagcacgaagtacgcgaccgacaagttctttggaacaacgtccaatagccgaacggaatctgaaaccgacgaaagtaacgcccaccaaatctggaacccggttgattagctgaggaaggatggccgatgtcctcaagcgtggcccagaaccgggttccggaccaaattgaagtggagtgtctcgaagcgccttcggaagtgcgaatcgcgcgatagctgccaatgtaaggttgcaggatacagacacccaggagagtgattcccacttcatacaaattcagagtgtagaggctacagtagtgcgcacctcacggaatgctacaccggacactctgatacaaacacagtaagcgttgcagccagctgtgtataaaatgggatgactccacatcggaaacgatgccccaactaccagaaatggtttggcgcgaagcctgtaaagttccaggagatcgaaccagaaggcactggttgccggttaaccaatcggcgttacgacgcggggagttgggctacggcagatcaaatgcacaatcgggtgagaagcccgtccaaattacaggagcatagccaagcggtaaggcaatgggctttgatcccatgatctcaggttcgaatcctggtgctccttccaaattatgggtgcgacttcctgcgggaacagtaaggtgtgcatgcccctgtttcttaatctggagttgaggaagaataaatcacagaaccgtaggtgaaatgcacatagctttctaagttctgatgactctgggttcgattcccggcgcactctcccaataatctgtgtagcataactgcgaataggccatgtgattttggtctttatcaaagcccggtaaggataccgggcttctttttgtctataattctgaatccccagataggttaatctataaccgattcacgctataatttattgtccaatatgaactgaggaaatactgatgcgcaatgttactatctgggaactgaacgacgtggtcgccgacgttcctccctttgtccgtatgtacacttacaagggctacaaagggactctcaatgagtttttgtatccgaactttgttcaccgtgaagatcacatcgtcccgcgcaaccgcaacactccgggtaacgccatcccctgtaagttgttccagaaaggtatgaccgtcattgtcgggtactcttcactggattgtattgagaaaggcgacggcattcccatgctggtgttcaacacatttgaacaagctgtgaactggatggttcgtaacaattacgactactatggcgaagagagttctcatgcccgccgccggaaagtgaaagcagttgatttcttcactgagcgccggaaatatattgagatcgcccgtgactatgaaaccatggtgcgtagtcgtgaagttccggtgccgccagctccgcctgtgcctccaaaaactcgtgtcgtcaaagatgatgattctttgtctcgtcaattacgtcatgacagttctatcccggttcctgaatctaagaaaccgattgaacacaaatcgttcttcagacgcctgatggatttcctgacaaagtaggctgagattctccttttctatactcctgtagatacgctatgatatgccaatgtctacaggagaaatagaatgaacgatacccaaactgaaggtgtgatctcccaacaccacaacaagtcaattttcaacaccctatccctggaccgaaatctggtgcactgggaagactatctctataaacacaccccatgtgaactcgttgccaaccccgtaaccaaccaacaggtctggttcaaacgtgaagattacttcgcgccgttgtccaactatgcaaacggacaacagggtatcaacggaagcaaactccgtcaggctatctggctcatggttgagcatattaaggccggaggctcccccgacatcatccatggtactgtcgttggtagtccgcagtcccctatggcgacggcagtctctcggcacttcggcgggcatacgactacagttctgggtgcaaccaagccaaccacttgcatgaaccacgacatggtagcaatgtctgcctggttcggtagcgagttcaacttcgttggctcgggctacaacagcaccattcaaccgcgctgcaaaaagctgattgagcagcagaatccaaaggcatattatctggagtatgggatcactctggatcataaattgcattccccggagcgtatcgcaggcttccatatgctgggtggtgaacaggtcgccaacatcccggaccatattactgatctgatcatccctgctggctcttgcaactcctgtaccagtattctaaccgggctggcgatgcacccaaaaccgaatctgaaaaatgtgtacctgatcggtattggcccaaatcgcctcgacttcattgaaagtcgcctgcgcattatcggcgaatatgccaatctaccgcatattgtggacttcacccgtcactaccacgacaacccggactacctgtatggcaagaaggactctccgcagtcccctaagagcgtttcactggctggcctgtttagtcggtacgacccaaaagaactggagagagggactggttctccgcgctttaatgtccatcattgggatttgcacaccaccaattgggttcgttacaacgatctgatggaataccaatggggtgacattgaacttcatcctcgctatgaaggcaaggtgatgacatggatccaagaacacaaaccagaactgttgaatgaaaacacattgttctggattgttggcagcaagccctacgtagaaccgatgaaggcagcatgtcctgagttggttatccctgaaaatgttcctgtgaatgagtttaaacctgaatgaaaataaagaaagtcgtccctcaacaacagaaaaatgtttctccactcaagcagaagccgaattatggtggcttctgtagcacttgtggtcgcagagacaacgatggtggtcctctctgcgggaacgtgttctgtcctggtggtaactgatccttcctaaataccccatacaatccgtgtggggtattttatgaaaacctttcttgatttcttgcgtgaagaaaccaaacctcaattcaataatttagaactattccacggttctaatgttgaattcgacgtatttgacttcgaaaaatttggtcaaacagattcggggactatgggtgcgggcttctatttgacaggtaacaaagaagaagcactgcggtatgctgaaaacgccgtccgctatcgtaattcgggcacaccgcatgttatgacatttaacgtcaatgtccgttcacctctcattttggattccaataatgtatccgcctgggaagatcgtatgcgtgaattgggtatcccgccagataaactccatgccaatgccaaagaactaatgaatcggggatatgactccgctatgatcctggatatggttaatttgccaattgtcagggaaattgtcctgtataaacctggtttggcaaagagaatcagctaaataccccataatccacactgaggatcactgacatggcaatctccactttattcgaatctgagtcaatattggacgctccaatctggactggcgttcaagacggcacaaccatagagttttttgagcgcggggaaactggcgctgaagagatctatgcgtccgtagaaggcaccgacgttgttcgtgctgctatcgccctggcaactttcctggaagacgctccgattgatggagttcctttcgaggcacacgtcgaccccgatgatccaaccagcatcatcattactgttcagggcatggaatatacgtcgtacagcattgagcacgacgaagaaagcgatgcactttttatcgccaccgacctgcagctcgaagatgatgagatcgaatatttgaaacagaatggcaaactgccggagtattcggatgaatatctggatactgaattggctgacgtcgatgatgacgatgatttctgggaataagaaaaggggcgaaagccccttctttatgtagacctatgtttcaaatttggataggaatcccccggaggggctttacctgatattagaggcggctatccagccaggcatttttctcgttctgccattcccaagcggcctgaccacctgccatcagaatttccagaggaggggtattgtcgtcttcgccgccgtggagatccggatcaaacccgtcatcttccggatcatcttcacattcgttctggtatgcggaatattcaatccaatgtgcttcggcgtccatatccatatcgcccagagcggcttcaagagtcattttcccttcggcaatcagttcggcagttgcatcgtccagcccggcgtctttggcttctacaaaacgctcatggcgctgctggaacaggaagaactgcatggcttcaacccgagaatcaaagtattctttgcgtggaatcataatttcacgaccgtcgactttgctcaccatcaggacacgcgaaccatactcaaccaaatagcgaccacctttctctggcgcttcaccagtgatggtgccgtagttaatgatgcagcgaccttcttcagtgccgtacattactgttttgcctgattttgattgaacgatgatttcgatgcccatgatgtatttccttctcttcaatttgttgtttgttcgtactacaatttgaagtatacgccagttattgaagaagtaaagtttttcaataaacattttaataaattttgaactctgcccctcgatatgtcgcgaaccctcgttctaagaggccatcgggaacaatgacatttgtgggccaaccaccatctggcgctttcactttcagtctagttttgtgtgagccgagtttagtttgttcataaatccggcctcttactatcgtcgccccgccctgggtgacgagcaatctcttgtttaccacatccattccttaacaccaaaagaaaggggccgaagccccttgaacattatttcttcagatcaggccacgcaccagaggtcgcagtagacccagctgggggagcagactcaagatcgggagaacccgactgagtaacaacagtgggatctttgctaaccactttgacgccgaattgtttaagggcatcgacagcttgcgccttgcggctgttgcttttaaagtggttgtagcctttgataccgaatgatgcactaattgctgtcaataatgaagcagtataccaatcaggcgcggtatctagggcttgcatgccaccgactactgctttgatgaaatcccctttatgatattcgccggggaacaaaagcagttccacaacaggagctaacataacgaggatcgcggggaccgcaagaacgatagtccagaactcatccttccaagaaccaccaacttctgtgatcttagatagttcccagtcggaagacgatttgatcgcttctaacttgacatcgtgtttggcgcttacaatttcccgcttatattgaatcaaatcagttcccagattccagagctgtttcaaagcgccaggaatcatgcttactaaggggattgccatataaactccttggtcaatgaaccctcctcggttaaattatgggaacgtgctaacggcacggataacctggagaatacaatgactgttttctatactaacgtcgcccggcaaggcaacgacctgttagttcgaattgcagatgacatgggcaaccgccgcatgctcaaaaagaaattcgaacccactctatatttacccacggctgattattctaatgttgaaaaagtcggcctgttgaacgaacctctgatttctaaaaagtttgcgtctatgcgtgacgccgacaactatatggaggaatacaaggatgtagaaggcgcggcgatatatggtcagaccgactatgcctatcaattcatcgcccacagttttcctggtacaattcagccagattacaacaacatccatattgccaaccttgatatcgaagtgttctctgcagggtgggtcgatgggcagatgactaaaggtccattcccgcacccgacgatagaactacagacgttcaaagggagcgcggcgcgtgtccgccagttccataaacgtatcttggccaaccatgcgttcgtccgcgagcatttccccggctcctttatctccaacaacgtgaccgaccagttccccatcattgacgccaatggtaagattactcagaatatgaatgcggcattcccgattacgctcattcagctccaggatctgaccaataacaaatatatggtctgggggatgccgtgttctaaggatcgccataaattcaaatatgacccaaatgatgaagagatcggtggtctggaagtagaatatcaagagttcaccaccgaacaagatctgctgcggtcatttgttgattactgggaagcgcgggcctttgactgctggacaggctggaacatcgagcaatttgatagcccctacctggtagaacgctgcatgcaagtattgggtgaagccgacaccaatcgcctgagtccttggggtaagatcaaaaagcgtatcatccgggataagaagggcgacatcacgacttatcagttcgttggctgtcctatgttggattacctgcaggtctacaagaagcacacgtacaccacacgtgagagatattctttggactggattgcgtattgcgaactcggtgagaagaagatggattacagtgagagcaaatcactgtttgatctgtacttcaatgattactgtaagcatacccggtatggtatcaaggacgtcaaactcgtctggcgtctggaacaaaaactgcgtctcattcagctgatgtttgtcctggcgtatcgcaccaaatctaactttgaagacggcttgggcacggtagccccgtggttggccatgtgttattacaagctgtacgaaaaggggattgttcccaaagtccagcgcgtctatgatgggccgacaaactttgaaggcgcatatgtcatggaagtggcgccggggatctattattgggtcttctcagaggacttgaactccctgtacccacacatcattcagcagtacaaccttgggcctgaaacgattatcggcgataaacacacccgtcgtgaaatcattgaagccatgtgtgaagagcttgctgctaagatgaacgatatgacgacgccgatgcataaacgtcgccatatgaagaatcttcatgacaaactgctccgcgcggttgatgaacgcctacaggttgtagatgaactggttgccctgggtgaattccggtttgaaaccctcgtgcgttacaacgtgtcgtttacaccgaacgttcagttcttcagtaatgagaaaatgtccttcctgtctgagatcatgcgcggcatttacgctgaccgtaaaggtgagaaggccaagggcctgaagtatgagcaatgggcgggctggtgtaaggaaatgtctaagggtgacttccaccttgaatccgcgatgaaatcccgctactttgaccaagactggtatgaagagcacaaaaacatcgaccttgatcacctgtccgaagtgatgcgcaaatgggaagaccttggcgttgcccaagacacgttacagcaaggtctgaagatcttgatgaacgcaggttatggtgcaatctctaacgtctggtttaaagaatactttaacctcaacattgcggaagcgattacaacttcagggcagttgatcaataagtggaacaagcgttacactgacgattatcttaacggattgtgcgggaccagcggcctggattatgttatcgcgggggacacggactcgaactatatctgtattgagcgccttgtcaagaaattgtgggaaggagaaactgaccaccacaaacttgttgataatatcgaccaatggatcaaggagaattatcagcccaagaccaatgaatgggcacagatgctgtgtaatacgatgaatggctatgagcaacgcatggtttgggagcgtgaagtcattgcgtctgctgcagtatggcgtgccaagaagatgtattgcatggctgtctatgacagtgaaggcatcaaatatgagaagccgaagatcaaattcaaaggtcttgaggcgcgtaaatcaacaacaccagaatggtgtcgtgaacgtctcatcaagtgctatgagcgcattcttttaggcacggaaagcgaagtccaagacctcatcaagacgtataaagatgagtacatgaaactgagcgtcgatgatattgcgaaggcatcgggtgtatctgacatcgagaagtgcgtggctcctgacggatcctttatctctggggcgcactttgctgcgaaggcatgcgtcggctacaaccgcctggtagagaaacatgaagaactcgatttaccgttaatagaatccggcgataaagtcaacattgttctgctgaaagctggtaatccgttcggtcagaactatttcgcctatccagagttcttccccgaagaattagatatggcgaagtgggtggattacaacacggcatttgagaagtcattcatcgaaccgatccagtctatactgacggtcgttggctggtctcacaaacgtcgagtaaatctattggcgatgatgggtaagaaaggttgattcaataaccgacagggggatataattccccttgttgtttccctttgacaaagaataggtgattaagatgaaactcaataagatccttctggtatgcgctctggcattctctaccacggcgtgttccactcttctggatgttcctgacctgagcgggccggacttcactcaagaccaggctcagaccaaaatggatgacatggttaaagcacatgccgccctccagggtactactcccggcccgatccagaccgtttgcaattacgatgacagcgatccaacaacggagctgtaccattgttccactttcgtaaaagactccatggttgtcctgtatggcgactgccaggccgatggttgtaaagcgacaggatatgataaagtggaggaagataaatgaacaacctgacttgtctatacgatatgaactcaaaggtcggaggcctgtaccgagttttggtggacgttgatctgacaatggtcgatagtctatcgccttgggtcaaatggtttaatgacggaaacctggaagcccaagcaagtctcccggatgggattgttggccccgctaaattccagccgatcaccaagcaatgttatatgaaccatgcgggtgatttggcaatcctgatgcgtgaacgtgctcatccggcatggtctcattcatatgtcagtatcggcggtaagacccattatatgtcaaacggacgcgacccgatggacttttggcgccaacctgatctgtactcccgtatgcagccgttgcccggtgcggtagagttcttgaacaacttgcatgatgcgctgctcatgaagtttgaaatggtggaatttgttgctgtcaccaaatgtgaacctgagcacgaacgcagcaaacgtcagttcgtgtatggcaagttcccgaacatctttgatgggtttatcagcacggatgaaaagcacatggttgctggcgatgttttgattgacgacaatccgaaatatgtcgacccgtgcatctggaacaatgttttcagcatcttcgttcctcaggggaattatgaaaaactggatctttcggattcagaaaacatgatatatgttaaaccagtagaaggccgcaaccacttcgactatctgcgtgagaattttacagaagtcgttgaccgcctggttgcacattatcaatttgtccgtcaaggagtctgaagtgtctaacgaattgctgaaagtggtagaatgccctgacaaacgttccggtgatagtgatatggatggcgtcatcattcatatcaacaactacatccgttctcaagagaatccttcctctgttggagcggctaaagaactgaagcgtgtcttgagtgagattgggatgtctcctgatgacgaagaaatattctataactttgacgaccagtataaagtaaagtttgaagaaaacggtattccgcaggtggctgtcttttgggcaccgtggattggtggcgtgagctggcgtattgaggatgacaactaatgtcaaaactgattgtaatcaaaggcacaagcggcacgggcaagggtactcgtgtggtacagttcatagaatggctgcgtactcgccttgagccgcgcgaggtcacttataccatcggcgataaaacgcgcctgtttggtctggcctttgatgaactgaaattaatgtttgtcggccagtatactgcgtcaaacaaatccggtcttgcctcgtggacctcgatggacgctatccatgccgcgacaggttctggtgatatcgcccgcgaactggtcaaagaacatctcagcgcgggatatacgctggtctgtgagggtgaaccgctgatgctgtctgataaatggcgtccagaatggatgtttgccaattatcctattgagcaactggcgctgttgtacttcacgtatccggatcgttatcaatatgatgctcgtatccgtgggcgttctggtaaagaagccggggattcgggctggactcggaatgagtcttatcagaaagaatttgaaaagtctaaatctgaaatggtggcggcgggttgggaagttgttgtagattcatacagcggccaggacgtcctctacaaaaagaacggcgttggcagcgaagttgcccaattgccattcgatgcaccgctgtgggtcattggtaatgccattcatcacatgatcatcaatgaagtccgtgatgctgggttcgtcttcaaagaattctataagtattgcgaagaccatccaatgacccgtgaagttggtggttcagacccgctggcgcatcgcgtaccagaaaaggctacccgccgccaggttgtcaagaagacggctgatgaaaagaaacagctgtccaaaagttctaacgtgctggctatgatgttgaggaaataaagatgaacagcaagtggttggatgctattttattggtcggggcgatcacttgtttagcctcattattaaccatgatagtgtatcattatggtttcattgatctgtcagaagcagaaaagaaaaccatgaatgtggtttactggttcggcttcttatcgttctttatacctgttgtctacaaattatttttaaaggaaatgaaatgaaaattttgattccccgcgatgccgtggctatcgctattgattataagggcgatgccaagatgatcaatgctgtccgttattacccggaagacaaccgggtaatcccacagtttcagctgaacactaacccggcgtctaaagattttggtcagtggcgccaggtcggtctcgtccgtaccaacgccaatgcccaggcgttcattgctgaccgttccaataaagccaagcgcatgtgggttgtgacttctgacaaacgctttgtcgatatctggaactctgcattcggcccggtcaccgcagatcaagtgcaactggagccagttcagcctcatcctggagatgaagaactttcaagttccgtcggcgaaaaggattgatgtatggcacatttatctaaaatgccgcaggggtataaagcccctgagcaatggaagtacccgattgatctgaaggttgactaccgcaagcctgagaaccggatgtatctgctcaaggcgtgggtcgaagcgctgtcctatactgaagagcacaaccagcagatgcgtctgatggattatgctattgaagtcacagaaggcctcaccaacctggaaaagatcgagcgcaagatctggatggcgttcctttggggttgctgctataatgcgatcggcccgtggacaatctactctgagttcccggttcctcctcagaccaaagaagaaatgcagcgcttctcggactggtataatctgaactttgaacgcatgcgcttcgatactgattgccgctaccgcaagtccaagatgatcccatgtgttcaatcctatgtggattggctgggcggcaaaactcagatggattctttccgttggatgctggaatgcaccatgaaggaagaccagtttactgagttgtgggacacggcgatgtcctggaaatacttcggccgcctgagcgcctggaacttcctggaagccctgaacatggtgttcggtaacatgtgggaaatcgatgtccctggcttcatgctgcgtgaccgtgaaggcagtgaatcgaatcgcaatggcgcggcgtttctttctaaccgtgatgattgggtgaccaaacacgggaagaaaaagatcgatggctgtcctattaccgatgaagagtgtgacatcctggaagccgatttggaaaaggcattccatgaatgcgttgaagaattcggtcacctgacattcatcaaccgtctgaactttgagacttctggcgcgtgttggttgaagaaattcttccgtctgaagaacactcgttatatcgggtgggatgcggagcgtacctgggatgaaatcgactacatggaacgcatttggccggagtactcctgcgcggcactctgggaggcgcgttcactttggctaccagataccctgttatgtgagaaggctcccgcagggcacgtcccaggcgtccagaaatggaagatgcctgtgttctttgagacgggcgttccactccacatctggcatctacagaagggaacacgttgggaacctgaagagcgtattgaacgcaaacaggagaccgcccctgtcgggaagagcgttaatctgatgtcactgatgaagaaataactgagcaatactagtttcttcaataatgggaatgggcttatatttggcccgttccctttttatcgctaaggatcaaaattatgactcacacagatctcatcacgtgcccaaggacgttacagcgggctacggcgcacgttctccattcagtggcaaccatcatgtttcgccatcacctatcgtttgatgaagccatggacccgaagtaccatgaagaacgttgggcgctcttggtcgccaacggcgcggatgaaaaacacaaagaacaactgttgggtatgacgaaggcccaactcgtgggtggtgtattatgatctatctctttttcatcctgccattggcgatggcggttgctttcattgtcaggcaccaggccgaccacaacgttaaggagacggtctatacgacccttatcggggttggtttgtcttgcctgatacaagcgggtgcatacgcagcattctccttggggagtgctgctgacgtggaaatccttaatggttatgttacgggtaagactcgagaaaaggtctcgtgtgagcaccagtatcaatgtggtcagacatgttcaacggatagtaaaggcaaccagtcctgtgtcccgatctattgtgacgagcatgattacgacgttgactgggatgttcaaacgaccgtcggtgatctgaccattaagcgtatagaccgacaaggtttgcgtcagccgccgcgctgggcacaggtgaaggtcggggaaccagctgcacaagatcatccgtatcagaactacgttcttggaaacagggattcattattctcccgttcggatgaacaatttgcccagaagttcaaagattacatcccggcgtacccaaaggtctatgattactatcgtgtcaaccgggttttgaacatgtccggtttgaatcttcctgtcggttactggaatgattatttgaacggcgttctgaaaactctgggtgccgagcgtcaggtgaacatcgtttgggtgataacttcaggtcagccgattgaatatttccaggggctggtgtatgcatgggcgggcggcaagaagaatgacgtcatcgttgttaccgatatcaccaaggatatgaagataaattggggcaagagcacttcttttgcagatggcatgaacaacatggaattgcattcccgcaatggattatcccttactggacagcccatggggatagcagtcttccaagaagtcgctaccaatatcagcaagggctacaaccgggtgtctatgaaggagatggattatctgaaatggcgtgagttgaagacctgggaagccctgatcgtgtctttactcggttgtgtgccgttcggtgtattattctatcttggcgctgggccatataattttagtctaaatcgtcgtttcccattctaaacaagaggctacaaaaatgtcaaaaagtatcagtccttctcttatcgtcgtcggtgctaccgttggtttgatcgcaatcatcgccgggtttcttatcagcacgttcaacggcttcaacacgctggagaacaatgttaagaagttcaacaaggactcggagaactatctgagttcttataccctgaaagtgcaggaaacggcgcgaatcccggacatgtacaagaacgggttgaaggaagtcatcaagggaacatttgaaggccgctatggcgccgacggttccaaagcggtgatgcaatggatccaggaacagaacatccagtttgattcgtccctgtacaaagaaattcagatcgtaatcagcgcgggccgcgatgaattccgtattagccagaccaaaaaactcgatgcgtgccagctgtatgagacccggctccagcagttcccgggcaatatcgtggccggaatgtttggtttcccgcgcctagatctggaaaagacctgccaggttgtaagtgatagccgtacccaggcagcttttgaatctggcgttcaggctccgattaacttcaaagggtgatatcatggccattaacatcaacagcgtgagactcaccgaatcattgagtctggatcaacaacaggctctcctggacgaaatcgttatttcggcggttaagcagggaatcatcaaaggagatactttgctgacccggccagagatgattcatcatctggttgtctgtctgggtgaagcggataaccatcgcaaaaagatcgtaatgttcaaagaaggggttatccatccgaccgggcgctgcgctttccttactctggttggagcacacccgctgactgaaacgaacgaagtcaaaacttctattccggtgacgccgtacaccaaagacgttaacgaactgacgtggttcgaaactatcaacaccatctatatcatggcagttggcggccagcctattcaggatctgcggggcgatttgaactacacgcaagctgaatagacttaattcttcaataaacagggatagggtattattactctatcccttttctttggagcaaaatcatgtcagaacccaaaaagatcgtgatcatcgggggcggtcaccacagtattatcatgaaggccgcattacaagatcttcatccggaatgggaaataaagcagatttcgatcgaagatcatatgtcggctcgtgaattggcacgtcgtgaagagaacgacaaacgcatcgtgattttggatgaaatctgttctgaatttgatgtgaagcagcttatcaacagcctgaaatcaaggcgcaaattagatgacaatgattttattgaaacatccagagacgagcgtcagatgatgaaagatgctcgttatcaaaagcctccccgcctgcgcggggcagcacaaaataaacgtttggccagtaaggcacgcaacaaaggaaaaagaaaatgaactcgcagaccaaaccgacttaccagcagcttgttgatactgtaaaggcgtacgacaagttcatcaaatctatgattaatggcatccaattatctaaagagcaatcagataaattgatggaattgttgaatcctctttggggcgttgacaacatcgttgcccaatgtaatgaaatgagccaatctgatgaaccaacttatgaggcgttggtacaatcgctcctggcactggatgatggttggtctgatttgttcggtcaatgttgttcaaatccggtgaagaacgcttggggccaaaatgtcgacttcactgccttgaacaaagggcgagaagttgccagcaccacgatctataaactcagaagttccatgaaaacgtctgagtctaaaataccagaagtcaaacaaactaatccaccgaaatcgggtatccaggaatatctggaaaactttgacgaatattcttttactggtctgatgcttcgcgatctgatcgaccaggaagaacgtcggcagagcaaaaattgtccagaagtccaatctcgtgatgaaatcagagcattggtggaacgtgattttgactatggttctatgcagttggctgtgatgatcgtcaaggcattgtcctatgccgccaaaggagaattataatgggttccaaaaaggcattagttgccattgctatggctggtgctgttatcagtgcagaacaagcattggcgcgtagttatcaggaatcacgccatcgcggtgatgatatttggtattccaacaattcagggccgggaacgccaggccatggtcgaccatcggtgaaacgaccgaagaaagccaaaacgcatggaaagaacaaaaggaaacgcaaatgagtgatgacaccttaacagaagaacggctcctcgaaatatctgaaggggagccgaggaaggtaaagtgtcatgtcatgtttggtgaagggaaacagatggccgacgaaattctgtatcttcgagccgaactcgctcgattaagtaaacctgaacccgaaatttagaggatatattatgagttctattgaacagctgatcacgccgcagtacatttattctaacattgttgagcatctgcgctcacaattgaatatcggtacgttgaacagcagtgaactgtctgacttcaaaattaatgaagtcgagatcgccgccttcgggagccgctaccattttgagatcaagcgcactgttgtagagcaggtgacttccagccttctggatctgagtgcaaccaagcccaatcgtgccgagccgactgtagttgtcaaacaatacgtcggttatctggaagaaattctggaaccgggggcgacgcgcccgacctttgacttcaaagcatcactcgtttaataatgtgaactaaagcccctgagaaggggctttttcaattgaactgtcgccacgtatcatatccctgtgtaatccctttgaaactgataggacttcttcgttatgaaaatgcgcaagtcagagcacttcgtccgctcttcatcatctatatctggtaatgtgttcaacgtcaaaatgaccgataagttatttgaaacgttgttctccagcctttatcgttataaagaagcggcggcgcttcgtgagaccgtttgtaatgcgattgacgcccacaacatgcgtaaccgtttacagcgctggatgccgtctcattatgcctctctgtccccgatgccccaactgcacagtaagtatctggcgccttctaacattcccgtagaagtccatctcccggacgattacgagccatggctggaaatcaaagactggggtatcggcctttcgctggaacagatcatgggtgaacctattttggcccgtgaagatgaagtgcttctgtcgggcaacatggtcgtcaaagaagacgaaatcccagaaggttctgaagtcctgggtgtacccgatttctcttcgtattatggtggccaattggtctttaaaacccaagatggcgaaatcatccgttcccctgggctttataccactttgttcaacagtaccaaagaagacgatgatggccagatcggcgcgttcggtctgggttccaaatcacccttctctgtgtcggattcattcactgttgaatcccgctatgaagggaagatctatcgcttcctgatgtatctgaacgggaaccgtatcccaactgttgacctggtgactaaaaacgtagaaacccgcgaacccgcgccggaagacacagatgaatggaatggtttgtctgtgaaagtcccggtcaagaacagccgtttccgtgcgtttgaagaagagctgatccgtcttggcaaagttatgaagcccaacgagcgcccaaaagtcacgaatcactcatacaacttcgattgggaagacatcagttttaacaaccgggtggggaatacctatatccagccgaaggggacggggaatacccactatgcggtcatgggcggagtgtcataccctattgatctggaacaactggaacaagacgtttcttctattctggaaaagttcccgacgtcctataccttctttgaactcggtgagcttaatgtcccaccatcccgtgaagacttgtcttacgatgagtacactcgcgaaaccctgaatcgccagttcaagaaagtggcgaataaaattatgcaggaaaagatttccgaactcaacctggcggccagcaaaggcccgctggcgttgtatatgaagaaagacgaattcaccaacatgttcggtagcggtttccgcaaaatgatggagcgggacttcccggctgatacccgcttctacaaagggaaatatgtttacaacggcacccctgatatagaacgtaacatcgatgttgacgctccattccgtactgccgggaatccttattaccttgaaatatattgggatgccgggtatattgaatccaaggattcactcatgctgaatgacgtttatggttgggttggtgagaaaaaatctgttgctattattatcgataactccagccgcgcccgtaatctgaaaatcaggacggcgcgaaataatcatgatgttgtcatcgttgttaagcccaatgattctttactgaccaatcgcaatttattgcaaaaccataaaggcgcatacaagaatcacgaagagcttcaatcctattttgaatcttgggttggtaaacaagagacaactattgaccatttggtatttgccgataagttttatgaagttatttcggaaattctcgtgccaagtgaagtttatttcatgcatgatatgcagtatgtgaagcccccggtcgaaaaagatccagggatgtttgaatacgaagggttccgtttcagtttctataaggatagagaattatctgctgaagatatctccagtatcattgattctggtaagcaaattgtttatattgagatatcaggaactaacagcatccatgatattcgtggaaaacgtgttaatgaatacgttgcccggagcattttggaatgtatgcacaacactcccatggacgatgaggggaacaaaatatttgagttcatgaacttccataagaaagtcatccttgcccgccgtaaatcggttccgatgatgaaaaagttcccggaagtgttcgtgccaattgatgcggtatttgaaatgttgttgaaacgccatatgccgtatttcaaatctaagaatgcccgggaactgttagcattaagaaagcaaactcgttgtatcataaaccgtatcccgtatgcggagtcacttctggccaaatctcacgaaggtatcccagaaaagtttgcttatctgaaggataaaataacccagctggataagaataatattgaattgataccggaaactgaatgggattatctgaaggaaatcagtaagaacaagaaaggattatctggcgtcaaagatcttaacgaggcgatggaaaaattaaatttccatgttagtatcaaaaagaactttgaccaataccgccatgggcaggcgcgtatgattcaattgttctccagcatcaatgaattgctgaaaaacaacggttattgcgaaatcagctggacacgttctatttcgcagacccaaaagaaaaagaaccggtatcgcgtcgattgccataacttgttaaaacatctgatggcgacgtatacgcctgtggctcagaacccgattgaagaagacaaagagggtttcttcgccgctatttcaaaacgtattctcggggcataatagccccgtctaacacaaagtgggaactacaagatgactgctaccgaaaaaagtattttgcggatgttgaaggatggcaaaagccagaattctatcgctaacgaattgggcgttcctcgctcaatggtacagcgtgtgtccgaccaggagctgggcgttgacccggcttctctgaaatcgctgacaaccgaacagatcgaactgatccagtctcagagccaggccggggaaagcaacaccaccctggcatcggcttatggcgtcagccccaaaactatcgcccgtgcgctgatggtccgtatcatcaaacaagcaaacaacatcaccgtcatttcaccgattaaagaatcggacgccacgaaagaattcgaagtcctggaaggcggcgtggctgtatatgaaaaagacgacgaagagtggtatgtcggcaagttcatggagaaccacggccaattcctgtgtttgcgttatacagacgacagcagttatgctgggatcaaagcagctatgatcccgcgcgatcagctgaaaccgtctgagtcttccgacaaatttaattctaaaaatgacggcgataaaatcgttgcgctggccgaagtggcatctgccctggttgatggttacaaaggtgagacttctgagatcacggttattttacctgacgaagacacgtatccgatgcgcggctccatggacgcccgccgccgggttggttattacgacagcatcctcggtcgcaccctgcgtctggcgctgtcatccgtgactttcaaagtaaaattgaaagaaacgcagcaaatcggtgacaaacagaccaaggctgaattcggcgataaagagctgagtgtgttcctgaacgaacatcagatcatgatcctgccggagagcgtcgttattgtcatcgatggcaaaccggaaacgatcacgaccagccaccagtcgtatgaccgaatcgttgaagcgattaaatctcgtgacatcaaactggcgtatacgttgatgaagccgcgcgaagcgattaagaaatttgcgacaggcctggttgacatcagcaataaccgtgttcgttggtccggtcatgatatcactggcacgagcgtcgccaagcgtatcctgacactgatgctgcgtggtgattacagcaacatgcagcgcctgacgaacttcctggataagatgttccagaacccgagttcgtccctggtacagtctggccgcatctatgaattcatggcatactcggatattgagattgccgaagacggtgacatcattctgtacaagtcggtccgtggcaattacatggacaagcactctggtacgatcgacaacactccgggaacgattgtacgcatggcgcgttccttcgttaacgatgacaacaaagacctgtgctcctatgggctgcacgtctgctcgctggcatatctgaagcaatgcttcggccacttgggccagcgcgttgttcgttgtaagctgaacccgaaggacatcgtgtcgatcactgatgactacaagtccagtaaaattcgctgctgtgaatatctggtgttagacgactacaccactgaatataaccgtcaacacaaatccattgacgttgaagggctttatcgttaatcacgacagcgtaaaataaggggcttcggcccctttttgttggagttaattcatggaaaccagagatgtttatttcaaatatgctcgccagacatttgggccttatagaacgactgaaaagtttttaatagattcttttcaatttgacggtgaaatgcgagaatattcatacaaacatttcccggtcaggaatattgaagggagccaattcgtaaaattattctgtcgttgtggggcatgtgactttaatgacgacgggcgttgtatgcatgaataccaatgcaattgctgtggtaaatatatcaaagtctataggagaactgaacatggccaagacaccgaaagttaaagatactgctgttgttgatccaatcaccgcagtagaagaacagaaaattccatcatacctgcagcgcatcctggataacatcccgaacgttggcgacggcgccacggtatatgctggcgactacggttgggtgtgtgagcataaaaacggcgataaggagcttctggaggagctaaccgggcttgccagtaccctcaaacgttatggtcgtgacaaattcggccgaccgatagaaccgggcacggtcatcagcactgatattacagtagaaaccctcaatcttctggatatcaacgatctgtcagtattgggtgagcctctggggattgtagaaacagaccgggacaaactgatcgccaaattgatcgaaaaacttcagattaaataagtccagtgtacaacagctgaacttattctatatgcctattgttgatgaaagcaatttaatggaatacgctctgaggcattatattactccttgtgtctcaagagatgatttgatggtggacattcagcgaatttcgctaattaatcaatcattgaaacgatttgtccccgggaaaagtccccgagtccttatcaatcaattgattacgcttttcaacacatttgagactgaggcggtatgccgaatgttggtgttgaaaactgacaagtcccaacatcctcgtctgaaagcagcgttgttgacgttaggtgtatggagagatgatttatgttccggttcttatgaaccagataacgagctgatgatggctctgaacaacgatttggatgagtggaggaaaccatgccaacaatcaatgtattagtcgcgccgtatgttgtacgcaacaaaccggagaccgaacgtggtcatgttgttaccggggttgccaagggctggcagaaaaccagtctgaaccaagacccgaacgaaattctgaccgaatgtaaaggtcttgatgcactgctgaccaaatctaatctggaagcagacggcgtgaccaaaatcgatccttcgaagcccgtcggcttcctggtatcttacgaaattcatgatcccagcgcagtcctgactactggtctgactatcaccccggcaaccgccaatggtgaaattggacaggtggttgaacttctggcgacggtggccccggcgaatgcgacctataaaggcgtcaactggtattccggtgacgtgactaaagcggtccatatcggcggcggtaaattcaaactgcttcagtccggttccgttaccgtctatggcgtcaccgtagaaggcaaccatgtcgattcaaccgtcatcaccgttgcgggcgctttgtctctttcaaccgatctgacggcaactaaagacgtcaccagcggtgaagacgcgacatttagcgttgtcgctgcgggcggcactaccccgtacacttatgcgtggtatttctctgatgtgccaggtggcgcaggttcggttattgacgctggcaccaacgcgactgcatcaaccgctaacctggttgtgactgctgtggatgctgccgacgaaggcgaatattggtgtgttgtttctgacgccgatggccattcagtgacttctacccgttgtgaaatggctgtagtctaatatgaagaccttcaaggatttccttgaagattcttctcctcctgccaccacgaccgccgatgtggggaaacccgaaggcggtatggtcaaggaacccgtgaagaaaccgaaggatcttgaagaggaatcagagttcaagaaactcttcgggaatatcttcaaggatattgacttcagcaaagccaagaaatggaatttcaggacaggcaagtatgatgaataaaagaggcttcggcctctttttctttatgtgttactcggggtataatccaccagttacctattatcttatttatagaaacgccaatttgtttactctaagaatggttgtctttctcggctagataataggggctttggaccctattaatcaaccagaggaggtgtgaaatggtacgtttacgtcataaaccgaatcagttcgccctgggaatgatttgtggtatatcattcatgatatgcctggaaaacgcagttagtcttgttgcggcccctgacttccctttggtcagatttatattatctgggctgtttggtgctgtatctgtcgtcagtttcttgatcgcatccaggaaattataaatctgctacacacagcaatatattgatttgagaatcctatatcatgttcctattactcaatgttccaaaagatcgtatgacgccggatgatgaaggcaagacacattacaacatttacagtcggagccgcaccgagctggggagattcctgtctcattttgcataccatcccatggatactgtcgatggtgttttcaactcgatggaaggttactggtattggctcaaatatcggcacgatgacctgcgtagcctttatggaaatgatgccaaacaattcggtcagactctggccaagtcgcagattgtcgttctgtctcctgatgaccccaaatttaaacacgacatcattgcagcaacaagccaaaaattgctgacgatgccgcccaagctgcgtttccaattagcccacagccgccttcccctgatacatgcatatgaacaccagggaaaatatagttttcaaaactctatggactttatcatacagcatattaaccgcttccgtctagaaggatatttgaaatgaaatttctgcgtaatattttaaacacatcgtatgattgcactacgatgaacccctctcgttcttcagtatttgtattcagtaaacttgtagaagaaacgtgtgaattatcagacgtgttctatggtatcgccgcgtctgagcctttgaatggcgaagtagcagacgtcatcatatcagcgctggatttgctgtatgtgactgaatatcaacacgtccagcaatatggttccatgaccaaggacgaaatatttgattctatcatctatgcattggcccaggctaatcacacaagtgatttgtctgagcacacgttagaagattattggttttgcgggggtgttgaccccgttgataaacaactggcgatgattaaccatttcaaaggaagaatcactcgacttctgaatcagccccagcgttcaaatgatcgaatggtcgatctgattaacagcattatcaagcatacatcaaaatttgcgtgcgactgcaatcaaaaccatgtcagcacaattgtcaaggtggaacatgctattgagcacaaagtcgaaaagtggcggggcaaatttggtctataagccaatcccatacataatcttgtgtgtttacattgacgggataggaagatgaccagtaacgttaacattgaaagaaagtacaagaagctctcccatgtagagcatatccttcttcgcccagaacgccatctgggtagtatccgttcaacatccgggacggtttgggtttatgacccggtaaaagatcaggttgtattcaaagacaactttacctattccccggcgctgatcaaacagttcgatgagattatcacgaactgcgttgaccatagcaaaactcctgaggggaaacgcctcaacgagatcactgttacggtaatggcgatgaacggccagatcatcgttgctgacaacggcggcatccctgtggtaaaacacggtgagaccaaagaatggctcccggagatgctcttcggctccctgtatgctggtagtaacttcaacgatgatgacgaagagtacaacaacaagaaatccggtggccagaacggcgaaggcgcttctctcgtaaacgtgttctcaaaatggttccgggtatctaccaacgacggcaagaagtcttatctccagacgtttgagaacaatatgagcaaacgttcagtgccgacgatcagtaatctgaacgcgccgggtacgaccatcgcctggattccggattatgaacgtttgggtatcaaaggtctggataacaataatctgctgatgatctaccgccgggcatttgaagtagcggcgtgtaaccctcgtctgaagatcgtcctcaatggcaagcctatccggattgatcgctttggtcatttcgtggattacttctgccagggttcatctgtagacgaatcaggggattggtctgttgctatcgcgccgtccaatggcacgttcatgcatgcgtcatatgtcaatagtatcgctactcacgtcggcggcccgcatgttgactatgttgccgaccagatcgttgctgcgattcgtactccgctgtctaaaaaattcaagacagaattgaagccagcgatgatcaagaaccatatgatgcttttcatatctgctgacattgataacccccggtttgatagtcagactaaagagcgcatgaccacacctgtcagtcagtttgggacaacatacaaaccgtctgatcgcttgattcgtaaggcgctggaatatgttaccatcgggttgggtaaggaactggcggctctgcgtaatgatcaggatgatgccgagtttgaaaaggccaaaaaggaaatcaccaaacgggattatcgtgaaattgaaaagtattatcccgcgacggcccgtggtgatcgttcaggctgcgtactggtgttgaccgagggtgatagcgcgtctaaccctatcctcaatgcccgtgacaccaagaaaatcggtctgtttcctctgcgtggtaaattcatcaactgtttgaacgcttcgcgcgccaaggtcatggccaacgaagaattcaagaacctgtgtactatccacggcggcgcagtaccggggcaaccgattgacaccagccgttatccttgcacggttgtcgctacggacgcggacgatgatggcattcatatccgtggcctgttgattaccatgtactgtacgttctggccggaatatgtccgccaggggcgtcttaaacttctgcgctccccgtacatgcgtgtgtggtgcggtaaagaaatgcatgagttcatgaacaacgccgaatatgaagagttcatgaagaccccagaatctaaaaagatcacaaagaagaaatatctaaaaggtctgggcggtaacagcaccgaagatttcaaacgtattctaaacaatctggatgcgtatactacgacggtcgttctggatgatgcctacaagaattcattgaatgatgggttcggtgataaggcgtcggattaccgcaagacctggtttagtgacgtttgcttatttgaaacagaggatgaataagatggttgccaaaagcattactgtgacatcatttgttaacaccgatcataaggaattttcggttgttaacagcgttcgccaaattcctctgttaattgacagcctcaagcccagccagcgaaaaattttgttcgctgcgttggaatacggtaaggaagagattgttgaccgcctgggtatgttttccgccgcccgtaccaattacaaatctggtggtgagaacatgagcaacactatcgtcaatatggcacaggctttcccagggacgaacaatattccgtattttgatcgtgatggtcagttcggctcaatcatgggtaaagaagcgtcatcaccgcgatatatttctgtggcagtatccggtgtgattcgtaagatctatcggaaagaagatgaaggcatcctggaatacaattatcttggtgaggaaaggctggaaccaaagtttttcctgccggtcatcccaatgttcctcgtgaatggtatgaacggtatcggtagcggctatgctaccaaaaccccatgccatagcataaagtctgttctggatgccctgagagcgcttctccgtggcgaagacccaaatgacttgaaaccgtattggaatggttacaagggggagacaggatacactgaggaaggccgagtgtactgtcgcggtgtgtatgaacgtatcaatgccactaccctacgcataactgaagtcccggtgggctggttcgccaaggattatgaaaccaagattattcttccgctgtataaatcagggattctcacggagtattccaacgattccacagaagatggttgggatatcactgttgtgttcaaacgtggtgaattgtctaaactggatgacgccaaagttgaacagatgttccggctgtactcagctgaaatgccgacctggacatcctggaacgaatgcggtattatccaacgtttcaatggttggaaagatatgctgtatgcattcttcaactatcggctggaacggtatgaagatcgtcgccaatatctgttggctgacctcaactcccgtatccacaaaatgaacaatcgtgctctgtttattggttgggcagttgtgacagatatgcgtcgcagtttgactgaattgaaagcactatttcagacagactacccggactttgatggtgatcttgacgatttgttcaagatgtctctatcctcgattacattggacgcccgcgagcgcctgttgaaccagatcaagaatctggaaattcaacgggacgagttaaataagaaacaggacatagatctttacaacgaagatctagacgagttggaaactctgctcgatctataatacagggggcttttggcccccgccacctgcgagggctttaatatgttctatttccgcagcatttccgttcttgtattccttgcctgggtgcttgacatatgcatccctcgcttcatatcagaagaagtcgcattcgcccttgtagaagaaggggaaggagaagacttcgatgcctatgtccccatatgttctttgaaagatatcactgacgaagacgatgatgttgtcatggtaggcactatgcgttccttcaatctgttcggcttcgccttgttgcctaaacttatcggggaattgcgcccttacaatccatatgaggagatggacagctgatgagcagattcctgagttcaaaattattgtctatgggtgattctttatattttcaatgtcccggttgtaatatgcttcacccatatcgcgtgaagggttctccagaacaaggcccgatctgggcgtggaacaacgatgttgttgcacccactttcactccaagtctattggtgtttaaagatcgccccggctcacgctgtcatttgttcttgacaaacggcaaaatacaatttcttggcgactgttttcacgatctgaaaaatcagactgtggatatggtcgatattcctgaacctgaaatatggattgaatagattatgaaactacttggttatttccgtgaactccctggtggcactggacgattgttctctgaggtcaaaggaaccccggatgatacaatggttgccctgtacgctcgtgacctacccaaggaaggggaatggcagcgccgtgtcgtggccgcagccaacaaatatggtgacgtgatcgtggttgctgatcgtcaccacagcctattgatgaattcccagttaagaattctaaaagaagctggggtcattaccacaacccatagccgtgaacagggtttcatcgacaaccaaggcaatttcttaactcgcgaggaggcagcgatcgtcgctaaagaagccgggcaagtcaaccaagttcgtctgaagaatacccctttcaaacagcttttctccgaagacctttattgaataaaaaggcggtattattaccgcctaatcccataactggtaaatgaccatggccaaatttgaacccggtgatatcgcgcgatttcgggatatttcacgtcgcttgaaatcatatgaattaaacccagaagaaatcgatgaaaacgtgaaggggaattggtgatgcctgagttcgaaaaatattttgatccggcaaccacccctgcgtatctcaatcggatcgcaaaagaaatcgctttccgtttgatgtccaaagggtttggggttaatcttatcgccaccgacgagagaacatctatcatgtccatcaacaatagtgaaggacatggcggcgttttttgccttgaatttattgatgacatcaacattacctggagaagaattgtatgacaacgtatatcgttcgtggtgggaatttgttggaagccgcgaaaagtttcaatcttattaacggattcgcccatggcgccaattgctggtcggtgatgggcgcgggtatcgccaatttcgttcggctggggtttcctgacgtctggcgcgcagaccagaacgatgagcgcgggccggagcagcgtctcggtggcatgtcttatgcctttgaccgtgacacgggtgtttggggattcaacctgtatactcaattctatacaggcccaaatgctcgtatgccttccgttatcagttctgtacaagtgatgtttgaacaacttcacgagattatggaagcgaaggattctgaaacggtctatatcggcctgccagctatcggctgcggtattggcggtcttaatctgtatgacgttgtccgccaggtagaagcactggcagaaaccctgtatgaagacactcgccgccgggttgtccccgtgttctacatcatggaagtagacaagtttgcggaagacatggaaaatctgaacgcgctggatgatgacatcaacgtcgtcgattctgaagaagaaattatccgggtggagggtaacaatgtataaatcaaatattttggcggtcgccgatagtgaaaccctgggccgctgggatgatgctgttatgttatcctgggcgcagacagtagctgatttgaccaaacgttatactctccagcaactagtcgaagaacgtaccacattcattaaattgaatgtcaaagagcaaatcgacctcggtcgtgtcaaagagaaagtgactgtagactggtggctgggaaacgggaaatataatccatgtgatgccgcccgtgaagtcagcctgtatccaaaggaagacgatatctccatctatcagctggccgacgaaattcgcaaaggatgtcatcgcctgggggttgatcccagatcggttgactggtgtgatcgaaatctattcgatctgcgtaaagcccagcatatcattgaagtgacctgcgggcaatactccaatgagccgtgggattatcaccacacatttgatatcgtcagctggctgaaaggtgttggccagatggatcgctatgccggcatcaaggcatgggaactggaaggcatggtataccatgatcctcgttatgatgctgcgctggattggctccgcatccagaaaaccatggaagatctgatgggattaaaggtggaataatgtttgttttcactgctatcggtatgttatttgtgggatgcattgcgctcatcgcgttatatttgatctatagcaattatatccatccattgttccaggcaatcagcttaacccgctggcaaatcgcatgtgtgaaaccaactcggaaagtaactttcaaagacttctgggcatgcatatgccattattatgaagttggtggctgggtaggaactcgcacctggaacgatcttggtgaatggcgtggaataggccgatgggaagtttataaatctgataaagatgaagccccgtaaggggcttttctatatacgaaatgacgtattattgaagctaatccataatctaagagataaatcatgataatcggtatcgattttgatgggacatgtgttacccatgaatatcctctcatcggacgccatattggtgctgtagaggttctaaaaaagctggtggataaaaatcatcttctgattctgttcaccatgcgcagcgggaaacaacttgaagaagcggttgattggttccagtcatttgatatcccgctgtatggtatcaacaagaatccggcacagcatgaatggacagattcaccaaaagcatatgcgcaattgtatattgacgatgccgctcttggttgtcctctgagttatgacccaatgtctaagcgccccttcgtggattggggtgaagttgaaatcatccttgaaagagcgggaatattatgaaagcgaaagatactgttgtgaaaactcaaaagtggcctcgctatacggctcatcaattgaattatatgctgggtatgcgtaattttgaggacggcgttcgcctcactcgtcatggccgtcatgaaaaacgctgtgtcaagtcctggaagaacgaaaagggtgtccgcgtttggaattttaccccgagccggcatctgaccaacgtcctgggtgatccttgggatacccaaaccggggagtctctgctcaagaaagggttgattgagccttggtttactgtaacccatgatggcggtcatgacgcccctgacggcaattaccgctatgctcgtgggaaagtgatccaattctatcgcctgactgcgctggggcgagaaatctgcctgaactaaatttgaaagcgtattgaaaaaggagagtatatactctccttaattcattaggagatgccattatgatgccgctaaaagagttgtatgaacgtgtgttagaattgaaggccaaagaacgcctttattcagaagaagctgcggagttgtctgaccttacggacaaaatcgttctgcgtgagaaatatctgatgcgttatgtcaatcattatcctcatgccgataatgtcataaccaccgcgcttgagaaattcgcgggccgcgaagtgaatgatacactgaaagacgaaatgcgaaccgtcatcagcaatatcatccatagctgggtcgcatccctggcagtttcatgcaagttcgatggcgaggatttgatcttcatgttctcaaaagaggtcaatgtccatgattaagccaaggatgatgtttgctcatatgagagcagcccaggcatatggcaaaaccagttatgcccgccgtctccaggttggatgtgttatcgtagatcctcgggttgatcagccgttggctattggctggaatggcaccgcacccggcgctcctaatgtgtgcgaaatagaagtagacggccagctggtatctgatggtgttattcatgccgaagaaaatgctctgaaccgtttacctcaacatgcggcagattggtgtggcctggttatgttcgtcactcacagtccttgccctgagtgcaccaaacgtattattgccagcggcaagatcgataaagtgatctactgtgaaccgtacaggatcaccactggtatcgtagaaatgatgaatgccggcattgaagtctatcgtatggttgaccaatttgccattctgaaatacagttttaatgataaaggcgagctgaccacaactcccttttgcgtaaaccccgacaaataaggaaaacaaaatgcgttatgtagatcgtatgctcggccagaacgaacacgtgattggctttacccgcccgacctggtggagtggattttgggtctatttctgggtggttgtattcctcgttccgacttttggtatcagcctatttttcctgatccccacggtcattcggaacctgacgactgaatttgccgtcaccaacaagcgcgttatcttcaaaacagggtttatccgtcgtgatgcagatgaactccgtttgggtaaagttgaaaccgtaaaggtcgaccagtccatcaccgggcgcgtcctgcggttttcaacgatcagcgtcattggtactggcggcactcgtcttgttgccaagggctgtgccaagggtaatgatttccgtcgcgtgatttacgaccatctggataactgattatgatcgtgtctggttattcattggaactttattgcgattgtgctgactgcactcaatacagatcttctcaatacaacacgtcgtatcccaaaatatatgggggtgagacatatgctgaatgtgctaaagaagcccggaaggatggttggtatatcagtcgcgataaattaaaatgcatagctcccgggcatagctgatcataagttaaggcaacaagagaccatcatcacgttcctttggttcgttcgatttgatggtctttttcatttgttctttcagagccctgatgttctcttcccgccgccgatcttgtatttccttttctcttttcattttagatctgagagcaaattgcttcttgacatcaggatcttccccaggaacaaggtgctcttctgtccagataataaatgaccaacccatcttagcacaatgctctcgggttgctgtccatttagcctgattgactagataagtccgcatagaattattgaaggttgattccttcattgtcttcgttttcttcggttctttaatctgatctttaggtttaatttcgatcaacgtgatcttgagttcttcactattgggtgatctggtccatactttcaaatccataaaatagcgatgcggtcgaccatcaactggtgaaatataagggatgacgcaagtttctgacccccactttacaatggctggatttgtatcacagaatttaaatgccactaattccaaggaagaacgaaatacaatgtctttaacgtcgccaacatatttttggggatttattggcgcatacttcccttgaagatacatagccattatgctttcctccaacctttatgagctatatttctgccactgtgtacatgcctcatagaaccttcgctcaatctgttttcttcacaaaatttagcaagattgattatagtgactatattgtcatcaggatctatgaatttgaattccctggaatttgctttagatatagcattcttcccttctaccgttgttgggcctttacaattagaataatcaaccaaaccggattcaactaatcgtttattggattctcttatcctttctttggtagtttggtctaccgtacaaccaaatcttgggttgttctttcccgatctattcttaccaaaccaaaaattccgttctccaggaaatcccctagatttgtaaattctttctaattcttcttttggttttagatttagtgttttcagcgccttttcagaagcttttgctctaaccaatggatctgaatttatgtgtgcaaatgatccatatccaccgcatgttagattgtatgtgtcatccctgtcgataaattcttgggtaactatccgggattcttcctcgtacatttcttctgatgttttacacactttcaatatatctttgcggaaattctctaacccatatttcaatattgctctcgttatgacacgaccagaccccatataaccatcatctggtgttcctttgtggacaccaacatatattttattgtttatgagattggttatttggtatacaagatacatagccataattgagtcctaaatagtgtcaacattctatttctaattaagggctgaagaccatggcgaatttcaagtctaccctggataagatcaaagttctgaacaccaaaggcttgacacaggcccagaaacaattggtctatccgctggatatcaccgggggcaaaacccttggccattatgttctgttcaacatcaacaggatctctggttcttcttatgggagcaccgcaacacagacggttcagaatcctatccagaaccctctgggtaatacccctgtcgtgtatggtgccaagtcaggatctatcagcaaatatgcctgggcgcgtcacgtgcgttctaacgagtccattgtcctgtgtatgcccgaatccattacaaccaactatggcgtcggctggaacggctctgagttgggtctcgctggtatgggtgcccaattcctttcccgcgctgcccaggatatgagccagttcaaacttggtgatgctctcaacgttggtaaggaaatgggtcggtttgcggcgacgaaggctatccaatcggcttcagagtctatcccgttccttccgacgattaacgctcatgatactctggagttgttcaccggcactatgacgaatccatacgtggaaatgatcttccagggagtgcgaaaccgtgaaatcccattcactttcaaattcacaccgcgctctcagaaagaagccaaaatggtcagggagatcattcgtctgttcaagatgcatatgtatcctgaatacaaatacaacaagaactccagcgcgttttaccttcacccatcgacatttgatattacattcatggtgcaaggtgaacgcaacaaatggttgcaccggatttcgacatgcgttctgtcaaacatgttcgtcaacgaaaccccggattcgtcgtatgcagtccacaaagatgatagcattgtgtctacccaaattgacatgacatttatcgaactggaacctctgcacaaaggccgctttgataccgaaggcgacagcttctaatccaggagacgattatgaaattctttgagaaattccccctcgtctggcatcagctaattgattgtcagcaggatgatcaggttttattacagaacctatcgcgccgtgtgatgattatacagaagattaaggacatcgaagggcttctcctgccgtataacatctatgatggggaaaccccaaggtcctttgcagagcgtgtctatggctccttcgagctattttggataccatgtatgattaacagtataatggatatcaataatgactggccaaaaccagaacaacggattgttgaagaattgatcgctcaatacggtttggatggtatgtgggatatcaaatactatgtagatcagtttgggcatgaaacagatgccagagctatccgtatggcttacggtctggacggtatggatgactcccaaatcattgcaaattatggtttgaccgggatatcataccacgatgatgccatcaacaaaaaccaggcgaaacgtgcaattcaagtccttgatcctgattatgtttccatgtttgtcagccagctggaacaggagctgagtaaatgattgagaacaaagagtcacaagacggtattttaaccccgtccacgacgtttgatttgaaatatatggccatccttcctcatacaccggaaggaggaaccccaacgccatatgatctgacttcattattccaagaattcaatatctatcaagatttgggtttggaagagaatgtttcaccatcattgacagccaatgtgctgatcaaagaaggctgggacattctggacacaatgcctatccttggtggcgaagaagtcgtgatttcatttaaatccccggcggctacagattacaccgcattatcgttccgggtcagccgggttgggcgtgtcgctgatgagtcaaattcttcagccaagaaagcgttctggctgcacctggtcactactgatgcatataaagatagcatgctgcgtaaatcggttggtctccaaggatcatattccgatatggcggcaaagatatttgaaatgctcgaatcgcgcactaaatttgaagacatagatccaacttatggtatccaagaacgattcgcgacaccgctttggcctgtactcaagagcattgattacatggcccggcggtcttatgatgagatattcatgccatttgttttctatgaagatttcacaggatatcatttcaaaagtctgactactttgttcaaccaaggtaatcagactatgacggctgaagaaaaacaagaagccgctcttgaaaagaaattcttccgtgatccacaggacgccccgttgctgcaaaacaacaacttcaactctgagcgtttcatgaggacgataatcaaagcggaaaagaaattggcccgtgaccaattcatggcgaattatcatgatgtcctggctgtagacgaaagggtgtatgatttcagaacgaaaactgtcacgcctacttctcgtgtgtacaccgaatggtttgctgaaacagcgcatctggatccataccctttattctctgacgagtttaatcgtgagaacgttcgttatcttgaagcgcaaccagatggtgctgagcaggttgattatgcaaaacgtgttatcaaattcagtctggcatctacggtcatgcgtttgcttttggttggtgacaatcgtctgaatgttggtcaagtgtattatatcgaagatctgtcaaacagaccgaaacaaaatgaaaacctggctgagttaagtaagttatcatcaggccattatattataacgaaaattcgtcataaaatttcacgcctgactaacgattatcaatgtgttgctgagatcgctaaagacagtatgattgagaaggttctgcctcctcagacaaatcaggctgttgcatctcaaccgacgccagtccctgttgacaaaggacaatcacagaaggtgtaagaggtgagccatggctgagccagcacaaacatcccagactgaagttgctcaagttcttgacaagatcaagaaagagatcatggagaggaaacaactccgcgctcaaaatgagaccaacaagcagctggtgaagatgaacaaaaatctggagaagctacagactgctgaaaagcagaaagatgttccagaattccagttcaaaattccttcggtcaacgacttcgtcaatggcttcgctcgagtgagtccgatattcactcgagactatggtatttggatgaaagataccgttgatgttgctgttgatggtaacgaagagttgatgaaaatcggcgagaaggttgaccgtcttggggatcttatccgccagcccgctgatgataccaatactgaatatttgaacctgatatcagatcagttgaaagcagccaatgatgacagcctcaagcggttggacaatcaggaaggaactcttgtcggtatcagttcagatttgaatcgtattggcgacactctggacgaagtcagatggaatacagaaggtatcgacaagaactcttcagaacaactggtccggttatcttccattgagaagaaaataggcaagactggtggtcatatcgttaatgctcttgtccgtatttttgacagcaacgagaaatggcgtgaaaaggaagaaatgcgccggggcgaggaagggaaagaaggtaagaacaatccacgggcgacttccatcatcccaaaagatgatgaccagaaagacgagaactcatcagggataggtgctgccatagccgctatgttaggcctcaacgccctcaaagggttcctcctgaaaccgttcaaggcgatcggttgggccgtgggcgcattcattggtatgttctccaagattggggaagggattgttaagctcctgggtccatttggtaaagttttgaaattcttaaagatcggtccgctggcattaatctcttctgtatttgaattcggtaaaggattcatcaacgccaaagagattttagggaaagcatccgtaaccattgtagaccgggtccgggcgggtattaccgaattggtcggcagctttggggatttgttcgattgggtatccaagatctttgggtttgatactgacatgggcaagaagttccgccagttcactctctggatctctgagaagcccgctgagtggcttaactccatcgtcaactggatatccaacgatctgttcgccgggatcaccaagaacacctctctcactgatatccctggtaagttggctgataatctccagagtgaactcatcaagttggttgattgggtcactggcgggatcagttcattcattgatgacgggattgcagccgcgagtaaaacactggacagcatcaagaaaggattctctgagaatgtcaaaaagccgtttttcaacatgattaacgccatcgtcaatgctatgtttgacatcgtcgataaatttgtcagcattatccctgacgcattgggcggcgaaacagcaagacagaaaatggcagaagcccgtcagtctatgatgattggaacggaagaaccgaccaatagtcctgtaccacaatctgaccagcagaaacaacagcctgcagcgcctgaagtcaaacaggatcagacgacggctccggtactccctaaccaggatgcacagacgctgacgcctattccttcgggagtaacgtcagatgctgagaatgtcacagacaagacctctcagttgaaagaagcatatgggtctatcggtggtggaagtcttggggcggcgagaccgacacaggggcgggcggcggataacatcggacaaatccagtctgtgtacagccagccgcccgcttctgtaatcgctccgatccaacagaatgttgacaactctaagaaagtcagcacgacgaacaacttcaacagcaccaatctggaaccttccaaccagactgacaagactcgtctgctctgggattggtaacatcaaattccgtgggaaaggatcatctcacggaatttatttcttgcgtaatccgtgttctcattgggtactaccgcatccgtcttcttcaacaagaacgcttctgaattccaataaatgtcttctttcaacaatttatcgtaaaatgcgatgaacccggttattttgttcagtccgaccagaaaccaaatcggatattttttcatgatgatgtcggtcaatagtgccggatgattttgcccgtcacctttaagataatccaagaacgtgagaccgcgcccggcaatttctggaatcatattcttttcaaaaaagtcaaggaagtggtacgtgaagttgtcatacagcttccggtattcgttataattctcttgcgcctgccgagtcaacaaagtcgttacccaggtcttgggtgactttatgaaatttgcaatgatataattctcaacaacttcgccttgagaagtctcaaaccgccgggccaatcgagcaaactgtttccgcataccttctttggcaaagaatgtttcgaatttgtaattgctcatcgggccatagagaccgtaatcataatccttggtcgtgaaatggagtttgatggccataaagatacaataaacgttaaacgcccgttcatattccatcttttcccattcagttaccattttgtttctcctgttcacccacatatctcaagaactcagacatgagtcctttttgattgataaatttcaacatcaagatcgcccggcggaatgctttgggtatccgacgatagcctttcttccagaatccgactgcgttcgaacaatctaataatctggccattccgctatagttcacgcccaattccaaaacaactcgacgcaaatattcagaatcattttctggtaatgtctttaaattcgaagccatgatatctctccgccaatgaagaataacgtttgtcaggattataatcctgcttggcatagtgaattgttaaaataaaactcatgacaataatggctaaaaacatgaagattttatatttggcaacgtcagggaacgctatccacaccagcagggcacacaacgagctgataaccagggacagcgcgaaagtcattgtacacatcagggtgaataacgtatccattttatgcggcctctaatagaaccagaatgttttcaacatacgctttttgaatctcatagacttcagccagcgtgttggcaaccttcttgtcggtacgaacttccaccaggcgtggcaggaagagtgatttcaacgcatcatcagtcttgtcctgtacgccattggagaggacggcggcgatcttacccaggaactcgtcttggtgttcccacatatacttcctgagatcatctgagatccccgagacgccaacgatgagtaaactatcggaggtcttacaaagtagcgacccaaacgttttggaatgcttacctttggcgtcagcgggattaaatccgataatctccagatcacactcaatttccattttgagtttgagaccttggctgctcgtaccatcttcccaaggcatatctgctgccttacagatcgtgccttcttctttacgggatagcgcgtctttgaaatgctcgaccgcttctgcaaacgaatgaacaacacgggtttcctggacttgcacgaggccatcatcgtcaaacatttgggagatgatgttgtaacgggcttcatatgggatatcaacacgctcggcattgaaccatttttcatacggaacgatatcccatacccggtagataacctggaattgttccggtaaaggttcacccgtctggatcacgctgttgagtttaccgttgccgacagcacgaggcaggatggtattttgtttgaggtctactaccaagagttccccgtggaacacgctctcgccaactccagcatcatagatgatatccttaaacaccagggataggttgtccactgagccgccagcaataagagaaccagagcgggaacgaatttcgggttcttttccgtatcggcagatgatgttggcaaacatgccgtctgatttcagctgactgtaaaccccgcgccggaagtccatcttcttcagcaggtcaatcgtcatgttgtcataacgatgataggggagtatgttgatcagccgcccggtcccgcccgctgcgttgaatgccgcattgatgcccttttcagcaataccggctttaatgtccctgtccaggatcatctggatgagttcgtggtaatccgggtgaatattggtcgccgctttcgataattcatgatcggctttctgcccgctcagagtacgttcgctcatctggtcgagaacatcgtacacctgatcccagctaccgacgacgccgcgcgacagcatacgagggaaagcattcggtaaaaactttgtacggtaataagaaagaagtgggtcatacacatactgaagaaaatcgaccatgtccggattttctttcaaaatctgggtcaggacttctttcttggcattggtgcctttggtctcacgaagagtgtgaattgcttctaacagaggaatcatcttgagtctccggggttatttgtaatccaattataaccccaaagacttcaataaattattggcgggtgcgggagcgagcttgtttgatgatcgaatcgatatccactccagtatagcgagttttgattttcatatactgtttatggataaactcccagataacatcggtgttcagcaccatatacaaaaatcctgccgcatatgtcatatacagcacaaaataggcgatcattggcataattcgtcaccccaggaaaagccgtatttttccaattcatttaattctttgccatgggcacggcgtatgatggattctataggttcgtcgccatgcgctggtttacaaccagattcttcatattctttaaaaagatcgaataattttttggtgaattcaagttctttattaagattgaaaaaccaaacccggatccaattaccgtctgtgggatataccctacaagagatacattcttctttaataacaatatcccctattataggccacttcaaaccgtccatcgtataatagaagtattcaacggcagatgtatctgggtgccgtgcatccaaactaaagtccgtcaggtggtgtaaagaaccgtcatcatttctcttacgcatcgacaaagcgtatttcagactgggcaggtcggtgtacccccaacaaactttggccttcttttcacctttcttcttttgagcagctttgaaaaacttaaaagctgcgaatatgagagataaaactgccaacccccatataatatcgttcccatcaatgatgatcataaatccccctaatggattgaggggttatacccctcaatttattatttgatcagactggcgagataattgtcggcttcaatggtcgaagggctgttgaccgaacacttcggatcagagatttcagcttcacgcagaattgcgtcaacgtcaatattaaccatgccagcggcataatcaacgtcttccggaagtgacaatccgagttcgttagtctctttctgaatacggacgagttccaggctggatttgatttcatcaaatttatcgccgagttggatgatggccttattcagttctttgttactgttttcgatatcagtaactttcaccaacagggcttcaccgatgcggcggcggtgtaagataatcagagcttcagaacgagtaggtttaccaccacgggcaatggcgtctttcaggatttgttcgcgattgacagcttcacccaggttctcttccgcggtcttgcgcattttgattgcctggcgcacattcgagacacgggcttcttccaggcggcggatttcgtctgacagtttacgagcggccaggttcaggcgcttttctgtatcggtcagcttgtcaagccctgcagtgacgttggcttcaacagtggtgaagatgcgtttcagtaagtttttcagtgacatttgttcagcctcatttggttatatgttatcccatattatatctgggatttttatagattattctttcggtggttcacaagaagtaaacgattctttccatcctttgaatttttcgatcagggtttcctgacccaacacgccattagacacatcatggatataggcaaatgcaccatacccggatccatccatggcctggcaaatacgcaaggatacaagacaaccattgaccgaaaccaggtaatgatcacggcgatgattcagaggataatgattgtcatggaacttatcaatgatgatacagttcttcggttctacgtctgcttccaatccattggcctcagaacacccacggccaacgatgcagccaggaaataatgtttctacgagagttgtcatatcaatattcccaaaaacggcgcttgaaaacataaccgcgcttgattaattcgacctctaaattagtagagtccttggtaagttccccgagttcattttcgagcgctcggatagttttcattttatcgcgggcgataatttgagtttgtcgccacatctccttcaattggtcatcagtaacgtctttcataatccacccaatttagattttgaaaattcgcggttttggatttcacgcttccgagaatttctttcacgaaaccgcttggtgtgagcacacaatgcccggtaaaccgccttggcttcatgtcttggtaaacaatcctgcctgtcgtccagatcaaccgtgtaaccggaaggaccgttgacagtgtatgcatagacacggacgccattatacataacgggattggcacagagatatttcgtttcagccatcgtcaccagatcattatcgatggcatcgacgagatacttgacctccaggctcaattcctttacgaaaagattcttaagaaacttgaacattttatttccccatcatggacagcaaattgactgtctttggttgagcgcctggctcataccagacgtcctgagagtgcctcttacagaccggacagtctttcaaggcgattacacagggagccttttctacgcggaatccagcggcttcggcttccttcacagtggggtaacggatgtaagaactcgtcccctgccctccacatgaacattccatcaatctttcctcttaatcagatagatcagaacccatatggccaaggcaacggtagtgataccaaatatggcgagtccgatcttgagttcacctgcaatgaatttggttagcaccgcagcattcatttctaataatgtcataacgtcctcaactttgctctggtaatctgagtctgtttgacatcttcatactcagtcagttctttcacccggccccggataatcatctgtccttccaggtccgcatcaatataggaagtcttccatgtaatcgtactaccttcttcggttttgaagatatacagataggaatcaccccaatccccgctgtagaggaacttgcgatcaacgtaggtgacggtcttctcaatcatctccccgacttcacccacccaacgtgtttctgccttattggtacatgaacattcgcggtggaggtattcgtaatatttgacggcaccccagcgaacagtggtagaatccttgatcagatgatacccagcttcacacatacgggtcaggcgaacattgaagtcattggtctgaggcagcgatgcaatgaattccatcatatgatccatctcacttagggcatcaaagtagaacccctttgccttctgataaatctcccatgcttcagatgatttgtccttcggagcttcacctgctacaaagcaacccatgacaacagaatacaaattagacttgatgctgactccggtcagtaagatctggaacaccagacgcagatagctccgggtatcggcggtagtcgggatatggcttccgtagattccatcttcgtcctggttattaaacagctcttgaatggacaggtaataacccattacggcatccagggacttctggtgaggcacgtaatggtgcatgcagctgctaccgacgagcatttgcgctccgctggtttcattacgaaccacatatgtgttattgcggcgaactgatttattgcaatgctcacaccaagagacgttctctgcctcgaaccgttgaatgaaatgcgggacgatgtcgtcggtcagtttgttgagaatgacctttgggtattgatgattgaactggccgatgatagaccagccgccgtatgaaaccgggcggtcaatgccttcaccttcaagagaaatgtcccgccaccaacgatagaaaatttcgccagacgtagaatctttgtgttgggttctgtatggttcactgatggtcaccgtcgggaataccagccccagtcgatttgccgtgcgctctaatttttgcaggcgttcctggacaattacgacattgtcgagcgggatctgataggttttggcgtccatctttcacctcatgatttagaaacaacaattcaataaaatgaaatatagcgcggatgtttattgaagtaaaggttttgaaagtaagaaagcccaacgaacgttgggccttggggtctgtcattcaccggaagtattcggatcacgatccggcgcggcgttcgggaacagggattcgtagagatcctggtatttggcgctggtttcgattgtcttggtataagtaccagcggcgcggtctgacacgactttacgcagatcagctgctttgatgcctgtcgccttaccgatttcagacagtgcatcagtgatgtacgtctgttctgatttgatacggacttgggcggcgcggcagttttcgatggtgtcaaacagtttcttgcgcagcgccgggtcgttcgggatttcataaaaaccaatttgttctacagacatgttaagccctctattagatacgcattccggtcgggatgatatttgccccaatccggctcaggaagaagtaaacgatactatgataaccaaacttaggaataatgcgaacgccttcaatttcgtattgttcctgagtttcggtccgtaccggtaaagggaatgatggcaaatcgagttcaaccaattccccttcttgcgccattactttcacattgtggtctttccaagtatggcgtgctttaaagaattcgatagtctgagcgaagtctagattgatcgtatccttcttggtgtggcacacctgctcaacggcgcgtagcagatccgccatgaaattattgtgcaacatgatgtgctcctgggtttatattcagatcatgaagattatacctcacgatccgtttattgaaatcaaccaaagttccagttattgaccgtttctgctttcttcgcgtcagtcacaacgttccctgttttgttcatatcatgtttaatatgaacattctcaacatatttggcttcttcttcggtgagatctcgtttaacctcattccagtcaagatcaaacaaaatctgcttatcctgatccataccaaacaagaacgatttcaatttctgtttgttggcataacggtttttgaggatactggcgcgggccttcttgactgcagccaactcgtccggtgcatagaatgccataatgaagtcggcgatcttcgggataccgatagcatccgccaggtcactgatattcccgtctgtggctgattgcttctcacgattgaactgcatgccagtccacaccgggcaatcaaattcgaatccaagagaacggaattcacgagcaacagatgtatagtatacgttggtgttgttcataagatgagccggaagacgcgaagacgccgattcacccagatagtcgataatgataacgtcaggagagatgcctgttgatgagatatattccagaatatctcgacgatacaatccagtatgccctgccccagatgggtattccttgatgacgatatcgcctttcagagagccgttgtctcttgtccttaatttttggattgtcccgatgtactcttcgcgggtcatcttctcaacgacttcaaaatcacgtcgcataatacgggcgtcaagacggtgacgccaaatgttctcagcaacttccagggtaaagacgaaaacattcagcccctgctctgaataacctgccgccaggtctatcagggttgtggtcttacctgcgttgatagcacccgtaacaatgttcagggtctttttgcctacaccgccgcgcgtagccttgttgaatatctcaacagcgaatggaattttggctccagttgaattcatatggtcatattgctctgcagccatttcccaatagatatgaccaagatatgaatcaaaactgatagacaacgcttcttgcaggatggtggggatattattcatctcctcctgccgcttgttgtcaccatagatgttaacagctgtttttatcgcgttgtgtacagccttattgcgcgcccactgctcagtttcttttaccaaccattcctgattgaatgtattgtcattgatattagaaagagcggcgattgattgttcaaacacatgctcgttgagcggcatcttttctaacataatagacagagcatcaaccgaagggcgagcattatattctgacgaataatcgtcaattaatccgaatataatcttctcaccttcattttcgaaataatcggctttcaggtaaggcaatatttttctttggtattcttcattgtaaatcaattgggaaagcacgacagattcgagtaacattggcaactaccccaccaaaattttgttgtattcctgagcgttcttctgcattaagtctaataagatacggcctgacacttcagtgaacaagtcgttatttttcaaatcattaaagaaaagacgccaagatttcttcaaaatatccgtggtaaaaataagccggggtgcgtcatcagaccattcccaggatactttcccaatacggaatttgacaccacggaattggccctccaaaatgtggatgatggatatttggccttcaccggggtcgatgagttcgtaattaacgggggaggtgactccccctccattgttattcgctggtgttgataacatggtccatctgctccagcatattcgcaggcattaccgtaccgttggaaacgccgaacatctttttaacgtcatcggcgaagtccgggttttccagaagcggataccaaaagtcatcatccatttgacgcttctgatatttcttctctttttccggatcaaatccacctttggctgtccggacataccagccagaagttggcatatcgacatagccaagcgcccgagaaatttccagcatgccgctccaacgatcaataccaccgtcatacagaaccgtgacagggagtttggctttctctttaacatggcgacctttcatgatgccgatgttgaagttccaccccagcaggtctttgtcttcttttacctgggaacgggtgatgaaccaaatcaggttagatgataggaatccctgcttaccgcctttgatgttaggctcagcatattggttgccaatttcatcataatacgagttgatccagaccaacaccagctctttgctgttgatctcgggtgtaatgacgcgccagaagctgttcagggcgcgggcgcgggtcatgtcctgggtatctttgccagcgatggcgtcttctacctctttggtggaaggtaactggctgatagagtcgatgaacacgattactttatcgcctttcttcacttcctgaagaatctgcaacagacggatcttggtctgttcaacgttatcgatcgggacatacagaacacggtccatgtcaatgcccatggatgtccagtagtctgcgttggcacccttttcagaatcggcgaatacacagatcgcgtcggggaatttatccatgtacgctttgacgtcaaccaggccgaacatcgttttgaatgtacgagaatcaccgaccatcattttgatgccagagatcagaccgccatcaacacgcccggaccaggcgatatcaataaggggaataccagtcgagcagataattttcgggtccagtgcgtctgactgagacaataccgaagcctgatcgtcatgtttcttagcaactttcaacatgcgatccattaatgaactggccattttacttcctcttgtttgttaattgtggttaataattctgcacccagaaccttcttagacaaaatattaatcgcttcctgcatcgttttgatggataataatgaatcttcatccacttggttctggttatcatacaggaaatgattgcgtaaacgatagttatcacgccgaacgatacacccaaagttgatgttatgattaatcagacgaacaatatcagcctggctaacatctttgggcatggtatggagtgaataaatcgtctcactgaaatagatatcctgcaacggcgctggaacaggaatgtcctccgatgcccagcgctcaatcaagacgaatgcttcagttggggaaggtgttgtaaataacatctccgcaaccccgccttcaacgtctaatgtgcaattgagtatcacatgtcccaagggcttcatgtgctcaatgaaattgctaaccgatgactcaaggttatcggccgagatggagatgttaatcgtaaacattagaactccagggtcagagggatctctttggatttgtcgtagtcagcgccgcctgcagcgcgcagccgattacgatcatttttgcgtttgtgcgccagcatgtatgtctcggcgtccagtcccagataaccacaggcgcataccaagaaccgtacaaaccggatgatatcgggttgtcccataaacgacgtgaaccgttcggtgacatgtaccagattagcagatttgtctattacctgaccttccttgaagaaaagatcaaattgcatttcgatcgggaacgcagaaccatacccggacaatatggaagacagcataaaatggaccacatcaaccaattcatagacggcatccgttctattgaaatggataccattcccataaatcttccaatccttggtggtttcatcaaggaattctgcccattcacgataaattgagttcgttacggcaacgtgagtccaatacttttcccactcttccccaaagtaggccacattagtggcctcttggagttggagcagtcttttaatatgatctgctgttatcattttctgttcctgtagaattcaacaaaattgttacggccttcaaagttgttgacatagtcataatcaacaaccatttggtcgatataggcctcaacgtcgtcctctactataccagaacgattgggctttgaaatgcgcgtgatgggacatttagtactcagcgcccaattatattcctgcggagtacgcaggtcgctcacgatatagtgcacaccagggttagcctccacgagaggcaactggaagcgtttaaagaacgccaggaacagatcgggttgtacatagcgcaaaccacccttatcgttgcccagatggagccagatctgccttggcgacaggttatgtacgttatccggatgtgagaacggcagatccttgatggaatcgtctacgtcaaccgggagccaagggtaaatgtaattggccacccggcgcaactcatcagagaaagaaagacgatgaacgacacggataccccggtctgcttcaataatggactccaggcagaagtccttaccggagcgcttgcgccccgtgaagaattccagattaggatacatcatttgtcaccacccaaagaacgaggattcatatatttgcgatcaacaggagaatggcggagagcattcagtaacccatcatcagcaatatacatatggttgataagaacaccgttcaaacggcaccacaaacaatacgccatttgcatcaacaaccctctgtccgcgccatagcgttccaacatccccaatacagaaggccaggataatccactttcacacgcttccaacacgtcacggaacatatacaggattccgttctgctcttcaacaatttcattattgaaaataatcttgtctttgaacattccttcttccaccacgacggtatccgccgtgattttactcagctgtttttggcttacttcattgttgtaataatgaagattgttggagaacaacttgtactggccgacgttcacgcccaaaacattagcgatcacttcttgaagaatagagaattcaatgaagttaatcgaagacattccccaaagaacatcctggctacggttgatgacagtcatgttcagacagccgtttgtaatagagaacaaaagagccagattacagatcatgtccttggtcttggcttcgcctgtttcattatgagcggccaaaccttcatcagagtccagtgccgggtcgtagattgtcagataagcctggcgggtatttggattcttgcgcaaacggctgataacgctatccagctgcccgtgattgtacaggcgtgggccatacgcgccgcgccaggttacaccatcgtcagagaagttggccgcgcgggggagtactcgggaaaggaaacggatgtcattgcgacctgacagaacccagaaggtctcgccaatagcagccagcgcagaagaattgcgaccttcaacggaaagccagcggtcacggatatcagagactgttatggtcacgccatcaagaaaccgggtgccatcggtattaatctccgcattaccgggatcagactcaatcccatgttcacggatagccaggacagctttcttcagcatgtcgttgttgtttaaagcaaaaatttccatcaatcaatactcccaaaatcacgattgagaaacgcagatacagcctgatcaacggtcagaccattagacttcatcatacccgcaggaatgttagggaacaactctttatgccgctctcggtgagagttgacacgcttccatttctccaggacgagttcgtgtttgaagtcttcaccaccattgcgagaactcacacgcgccaggcatacttccttgggggtatccaagaacagaaccacaaggcggcgggtcgggcggtttagacgttcaatccacgtattgagcaaggtagcagggataataccttcaaagatcacatcatacccgatgtattcaggttgctcggtgatagacacagcgaatagcatctgctctgtgtcttttagagagtcaacccctttggatttcgatttgtcatatttgccgacacagatgatattaaatgatgggcaaacggtcagcatcaccttaccattgtgggtcacgacatatgcctgaggatcattctccgccatccaggacggaacggtagacttgccactaccgttggagcctttgacataataaagctctcctcttgccggatattccccgacaacggcaggcggtttatggaacaaatggacaggtcttttcaacagacctttgatcgtataagacatacaaagccccaataaacaaaagaggctgctattatagcagccccttcgtctattgaacggaatctgatttaaaatcagcctgcgtttttggcttcttccagagcgcctggcaaccattcattgatcgctttaaccagagattccgcatcggtctctttgattttctggcgtttggtgaaagatttacctttcacgtacagactgaaaccccagccgccggaagtgatcggcgccagatcgacgtaggtgttagtccgcgcatgcgggttttctttatcagccaggtcggtgaccgggaactggaaccagcgcatatccggattgacatagctcaggtaaacacccggaatgacgcctgcttctactgctgccaggatcgcgccgaaattggaagaacgtgcggcttcaaccatttcttcgcgtttgttatggcgacgtttgcgatcttccggcgcaactgccggggtcaggttggtcagcttagatttcgcagccagggaagcgtcttcggcggcattgccaccttcggccagcgcttctgccacgttagtgcccaggatacggcggcggacttcatctgcgtttgccacagcttctacttcctgcgggtcagcctgttcagcagtttccgtagattcttcggaatttgcagtttgttccgcttccggctggtcaacggtttcttcagcgtcaataaccgcagtggcatcgccagcgccttctttcacaccagcaacgtcagtcggctggacttcttcggccttcgcacggtcgagagcctccagggtttcttcctgctcttcttgagacagggaatcgatcagctcaaacccgttggcactttgcaggacgccgtcgagcatacggcggatggttacgttaccgatcagcagaccagcgtctttgatttcggactgaacgtcagacgcagttttaccttcaatatcaaatttcaggccggactcaatatggagaatgtaagacatagtgtagatcctatatgttgtaaatcggtcggctgacaaagccgtttcgcttgttttcaactatactgtagttttgaagattgtaaaccactttctataaaaagaatgttcagataacaaactttcttcacaaccctctatctgaaagagttcgcttcatcataaaccacatcgtctatattgaaaactttttcggcaggccagcatggtgttatctctacctgagaaaatgccggagcacagtatttacccgcctggttatcatacagactgtgctctatgttggccaggagcagatcgtcatcaacgacttcaactgaatggatcgttatctggtgatcatacaagaggaagtcgtcaatgtgctcgtttcctgaacggagatgttgtaagatataaaattctatcaatgattctagaacttcaaataccttctcatagacatctccaggcgcgcggcagattattttttatcaaagaaattgggcatttcgcttggttcggtcgatctgaaatcacttcctgcgatcacgtgttcacgaatttggcgaactttggattcgaaatgctcttcttgcataatcaaagcgatagcgacatataacgaatcattaattttgccgaagaacttcgtgagagtacggcaaacttcgtcagtgtaaaccaggtcagggtggatcttgaacccctgggtgccaccgaaaaagatattgcgttccttgacgatatgaacttcattggattcaatcgcgtcacgcaggttagaatcacggttttcagaatccactaacctcaaatcggattcaccaagagccgataacagatcgtccctgaagaattcaattgtttggcttcttgaacagagatattcaaccgcatatgaaaaacagcccaacgttttgttagccttattcttcaaatcactggagtgcgaccatcctgtgataaaatcctgcacgaagtcgattgtttcactatcgccgatgcgtagcaggtctttcatatcatattcggcttctgaatcttcgctgattcccatagcacgaatcatggaagcaaacgttgggggcactttaccgtttttgtagaaagaatcccggccgatttcaaaaccagtctttcctttagataacggatgtgttgcgtcaagacgagccggtgtaaattcaataccgagaatacgataaatagtagacattgtaaagcctcattgttgaagggaacccgttcgcgaattatcgctgcaaacgggttatagaactaatcactttttgggtttatggcgcatgcgagcatccttccagacgctggcctggctttgtttctggaagcgtgcagtacgcataaagaggacaacttcccaatattgtggttcgatttcataaagctgtgttctgaaccgatcagccctgtaaagtttgacacaatgttcatacagaggatggttggcgaaccgtttcaatgcatcccacgttaatcgcaaacgggttttggaacgatatgccctttcattcctcaatttaatcaggtcttcaaataccaaaagtcggagttttggcggaagataatgaaggttaagcccccacagataagtcacgccacgctcaccaaaattaatcccatcccccttggcaaaattgaagaaaaataccaagggatacatgtcccagtatggtaactcttcttttgtcagggcatcatatttgaaatagaacatgcgtccgatcatatagcggacaccctgtaccgggcgcttgttttcagcaaatgctttcatcatatgctgtggggtcaggttggcatccttagacacacgttccatgaaccacacgtgggagcggcgaatattacgcttggcttcggccccgaagtgctggcggtactttcggatgtagcgcttcaccaattcgggagcatccatttcggctggaagcagcagcggatcttcttcacccatcgcattctttgccatttgtcaactcctataaataccttcagatctattatttaagtggagtcctcatcgtggaagactatcgcaattttattacacagatgttgcagcgcggtctgtcaaggaagaacagattccaggtgactatccccttgcctgcaggcatctttgactctaatgctacattagccaatgatggtcaagcgtacacctcagatacaacgtcatttggtgacttgttccgttccacagcgcgtatcgtaaacgcattctttggagggacaaaccaaacttctcgttctctccaaatgatgtgtatggtcgcttcattacctggtgtcggtatcgacacgacacctatgaataataacggcaaccatatcaaaatgccgaataacaaatcaaacgttgatttggaactctcattccttttggccaatgactattatgaaaagtctgttatggacaaatggaagaatttaatcttcgatcctcttaccacaaagatgggatattacgaagattttgtaaccgatatttgcattgaacaattggatacagaagatcaggttgtccatcgggtttatattgttgaagcgcatcctgtaaacttctcgtctattgaacttgacaaaggtgccacagatcaatttaaccaatacaatatttcattctcatacaacaaagtcctatcggagacagaatatgaaacacgcagcctcgccagcgactttcttcctctgggtattgctgatgctcttgcttccggagattgggaaaccgctgcgtcaaaggccgggcagctttataagaagctcgagcaaggcaacttcacgggtgaagcccttcttgcctacaagcaactcgatcaattggtaaacaatatggcgggaataagcctggccgacttcgagcgcatctctatcggcatccagagggatattctcggcaatgacaacctgacggcatctgaaaagagtagtctgttggggatgttgaagagagtcgccagcaattaaaaagcccccagcgggggctttgtgttgttattcacgtttcaggaattgctcgaactcgtccagagacgacgtatgcttagcatcagcgccagtagaagaaggagtctgaacgctctgctgcgcttgcgacggctgagactgctgctggttcaggctatcctgggccgtcgggcgttgcggttcctgatgtaccggagccgtagcgacagttgctgcaccactttctaccagtggctggctgtccgggatagccagggctttacgcagacgcttttccagttcttcgtacgatttgaagttggccgggttgaagaactcaaacaggctgtgttctttttcccagatgtcttctttgtacttgtcgccttcttcaccttcgccgcccagggaagaaattgcatcccatttcacgttatccattagtggcacgagaccttcccaatttccgaatttgcgtttctcaccaaccaggttaagaatcaggttggcgccgccccacatatcaaacggatcaaacttcggatcagtagcgaatttcgggttctgggccgcgtctaaaaatttcttaatcgccgggccgaattccagcaggaatactttgccgttgttttctggggagttaacatccttgatcaccagaatgttggcataatacttggtgttcgggagacgacctttgagaacttctttcagtttttcgtcgttggtctctttttgttgcgcccacagcggacgatcatgatcacgcaccggatcttcgtggccgaaggtctgaggagagttttcgatgtaccagccgcccttaccttggaaggaatgacgcatgatcatcgcaaccggagtaagaatctgctcagcatcgatcttgccttcttcctgtgctttcagatctaccagcgggatagggagaaaacggatgatgttttcggaaataccttccttgttccaggtccatttccagatacgcggatcctttgctgcagccgaacgctggccctgttgttccagacgtttttgcagagcgtcagattgctgaccacgggattgcttcagacgatcaaataagctagacattctttctttcctcgatagtatcgccccagggggctattctgtacacattatttctttcacagcgggagtaattatacccccgcatatttgattgatttaaccgcgaagtaattgttctttcgggttaatctcaataatatcgaacacgtcagacaaagtgcgtttggcatcggtgtgagtgtggtattccacgacatacacaccgccttccggagtcgtgaatttgatccggtcagtttggtcttcgtgctcgttaagactacccacacgccagcgggtaacaccaggcaagaagccttgggccttaatcaatttgtagacttgttctttagtcattttaacaacctataaaattttcttggatttcagttcacctttcaacaaacgagcatcagcgcactcagctgttaaacgggataacagaggcggtgtaatcatcttgcgaatcttagattcctcaatatcatactcttcgcacacgctggccattgtttccaggaggctttccctggtggtctgtgcgcgcatcaataccatctctgaaaatgaatcaggcgtcaacacctgagcgatttgtccgtcagacatcgattgtgttccccttacccgatgtcttcttgatctgccgaagaacatctttgaacccgtccggagcagattgaggaccacggacaccggaaacgatttttggagcgccaattaccatagaaatctgaccaccacattcgctgcagggatcaagttcaggagtatggcgctcagcacaggtctttcgctggctgaaagaatgaccacatcctttgcatgcataatcatagaacggcatggatggcctccattacatatcgtacaaataagataaccgcaaacagcattgtggaaaacaaaacgattgtgaccgagcgttcgcgtaaatgaacatatttggacagatattcgctctgttgagcagcccgaatattctggtcttcatgcggtgtcacagaataatacgatatttgcatcgccaacgaagacaagaatgtcagcatcgcctttaaccaaacgaacgccgtcgccatcaataatgcgaacgtgataatattcgccaataaccaataatcaaccattgtgcacctcagaattaaattcgggatgattctctttgaaagcagaaccgcctaccatattggcaaacccatcgacaagatcatcgattggcttcggatctttaacttccaacatatccattataccgcgcatgttaacgttgaacagcttctcgaagtgggcgatcatcaccagcttgtcagcatttcccttcccagtgaaattctttttggtataagaaggagtgattatctggaattccatattattacggcgcattgcttgcttcaaaagagaagtgttctcagcggtttggcatatgttgttggagttcttagagttgcccatcgcataaccctcgagggtaatgaaatcaggtttctctgtaagaagaacagcttctgcccatttggaaatgttatagaatctttcttcaggggaggaatatgcaggttgcttcataatgctgatgttcggtcggatagggcgacaatatttttctaccgtgtaatatgcatagaagcgaagggaattaaattccaaaggatctttgtcgtcccagacacaaatcgctgggcaaccataagagtagtcaattccgcaatatttcataaaaatacccataacatagtttcattggtgttatgggtatttagaccgatttatcgggtgacgattttgctatccggcaggatcaggcgcggcttgatgctttcctgctctttctgcatctcacggatggtgttcagcaaaacgctagtttcaacgtggcgtttcactttacgtgcttcgtcaccataagcgatctgcccctgaggatccacataatggccagtacagataagcagtttgtacccgatttcactgatcgcttcgttaatgtccatcacttcggaacagagggattcggcttcaacgcccatgttcggtgaataacgaacagaaccgctttccaggatctctttatcgatcatgatcatcccggcgacggtttggatgaccggattacccatgtcgtcggtttggaattcatcgaaaataccttcaaaccccggcgcgacttcacctttatcgttggtgacgacggcctttaggcgattgatgataactgttttcaactgctcaagatcggcgcgtttttcgttttgcattactattctccagttcgtagtctcgttctttcacatattcatatacacgggaattgatttgttggctattgccagtcgtacttttaacaacccaaccacttgtgaggacatccataataacggacgcttggccttcttgaaaataacttttaatcgtttgaaggcgtcttcttttatgaaaatacggaatgatctctccgatcacaatgcaatcgggatagtatttgtgtaatgtttcaatattcctgtgtacacccacgggtataacgtcttcatcctgaatagggctatagacaggatctacgacaatgacattgaatccatatctcaataaatcttttgtccccagtttaccaaatttcatgtcatctttagacattgcgatggtgtctacacccaaatgtctcgcataatccgacaggaataaatagaaatcagtaccagcatcaggatgaagtattgtcaattgctctccgatctggctaaaacagaaaccatgcattttcgttcctcactataaatatctgtacaaatataccgtggagatacattatgaatttaccatcattgcctcgtacagaaagaacgctcaaaagccaattttggcctactgtcatcaagtatcgcgcgtttactgcggggcaacaaacttctttacttcaggtggctgacccaaacactcctgatgatgaacgtatcgcaacgatggaatcattattttcgtcttgtgtagacgctggggttccatttgccaaactcccgatcggtgttgtagaagaagttttccttcggatgcgttgtatatcaatcggtgaagtaatgaaaatccggtacaaatgcaacaaccggatcaaagttccttcggttgatcctgattatcctggggacaatttagaagcatgcggtcaagaactcgttgttcctatccccctggacaaggtggcggcgcggggcgtcgaggggtttacagaatgcttcgacctgccgggtggctatcacatcaagatgcgtcaaccatccttctctgatgctggagtgcttcagaaagtggtttctatcgaagagagcattgctacattcatcgattgtttgtatgacgatgacggtcaggtttggcggtttgatgatcctaatgaaccgggtattgatcctcaggtagcagttgctcgtaagaaaactcgtgatgagtttgtacaatgggttggcgataacctggaaacggatattatccagaaaattaaagacgatttcttttccaaaataccgcgcatccattttgaaaccaagattaagtgtcctggttgcggtaaagagcataagatcgaatttaatagtcttgaagagattttcatttaatttttgaaattgatttattatcctacttcgtgatgtgtgacgaattgaagtcacaaggctatagcatatttgaaataagcgaattaatgccctggcatcttgatatgcttacagagacattgaaagctcgtcttgctaaaaagaaccaaaaccccgcatgagcggggtttttattgcttatttgttttacaggtctatttgttgtttcttgaacgcaatttcttataatgtcattgttcttgaacaaactcctggcttctaagctattgaatgtttaggatggaataaaaatcgtttttctacggacattctgtgctgtatggttgtttcctcgccttatgcctccctggcattggaagggcgctgtctgcgtaagacggtctttcacgagcaacgcgagttgaaataaatcaaatacaacggatgctgacgcatcctataatattatattcgacagagcataaatatcttcaacatcctctacacatttggacatcactatgttagaaaatatgcgttggttttatgggcgcgttgaagacgtgaatgatcccgaagaaaacgggcgcgttgccgtccgtgtatacggcgtacacacccaagacactactctcctgcctactgagctgttaccatgggctgtgctcatgatgcctgcaacaaatgcgtcctcggcaggtttaggctggtctccgactggtattactgtcaacagtgaagtcatggggttcgcccttgacgaagcataccagaatttgagaatagcttgggtatggccagcagccaaccaggttaatggttctgacaccaacccgttggctctcggccaggttgtgcagtctattgaacgtcaaaaatataatgctgttacagatgttcctgtaaaaatagaagacgaacctcaacctgacccagagccgcccaaagatggatatgatcctgaaaaatggatgactgtcgctcgaggcgaattgggggtgaaggaatatgctggtaaattcaacaacaacccaaggattgtagaatatcacaaaaccacttctcttggagcatctgaagacgaagtgagttggtgtgctgcattcgttggttgggttctcctccaggctggattcacatctacacgatctgctttggcccgttcatatcttcaatggggttctccgttgtctgaaccaagatatggggcagtggtcgtattccgccgggggaacaacccgacttttggtcacgtcgcgtttgttcaaaagtttgatgcgaattatgtatggtgccttgggggcaaccaatctgacagcgtgaaggtcagccgtttcagtcgttcttcggttttgggttatcgttggcccggtccagcgaacacgaaggcggctgctccagcacagcaaaacagcaaatggtctgaacctattcctgatcgcaccccaaaagtacaagagaccccgccgccatctggtcgggtacaggatattgataacacaggtgaaaccatagttccatctgctggcggttcggtgtatccatacaacaatgttatggcttcccgttctggtcacattatggaagtagacgatacgcctggtggtgagcgtctccactggatgcaccaatcgggttcctataaacaaatgttaccgaatggtgacgtggtcaataaatcagtaaaagaccactatgatattgcgatgttcgacaaaagatattatgtcggtcgtgaccataacctgactgttggtgggacggaagttcagcgcaagacaggcgaagtttatcatcttcattccagcaatcattcacacgtggttgccgggacatctttgatgaaatattctcagcttgccgaaatccaggcgcagaatattttccgtatcgtttgtcagatgttagaagtgtcaggtacgttgaaggttcctaagatcctcgtgtccgagatcatcgctgataaattgacggtagcccagaccatcgacggtaatatcaaatatgccgaaggcgcgggccgggccagttctcttagtggtgcaaccccagcgtcaccgacagggccgggcactatcgatatcaaaccggaactggaagacaatggcggtaattttggttccagccaataaccccatacgattacaccaggagaggcagataatgcctctccatgctgctgagggagcctcaacatgaaagattataaagatgtggacctaaaatttgggatgcatcctgttaccaaagacgtcacgatgaaatctggaaaatgggctgtgttacagtctgttcggaatattgttatgtcgtcggcaggtgaatggcggactctaccagacatgggtgctggcctttatggaatgctcggggaaaacacgacgcctactattcaggtggatgtgaagaacaaagttgaagatgctattgctctttatgaaccgagggcagaaatacagtctgtcgaagtatctctgtctgatgactaccattccctggcagtcaccattacgtttaacgtcgtgaatgatcctgaaccgattactgacaccatctggttacaacggaccaactgacggcgcaacgtcataaaacataaaatgcgatatcaagtacatgtaagttgatttgccagcaggtatctgtattaccacaggcttgatatcgtataaccgaattggtggttttgatttgaaaatgaaacccaattccatgagagtgttagcctcaattggcatttgagcattatagtccattgcccaatacgcatcatcctgaaatgagcaactcatacagcgcccgatatcttgtccattatgttttaacggaacttccatgccttcttcaagcatctgtttcatgatttgaaacggaacaagagaatccacaggaagacggaattgggtattcaagactaaatcgctcatagcggcttactccactaatgtgatcacaaccatatttaagactgtgtcctttggtacaccagtttcttcatcgtgaagagtagaagccacaaggtgaacgtcagagataaagttgtcaatatgcacacttgacaagaacgggcggtgctgggaaaccgggcgattccgtgtcacatattccttcagaagaacaaagaattcgcaatttgtcgtatcaatacgaagaaatctttgttctctggtggttcgcaactcggtggccttgcccatatattgcaatttgcccgtttccccaaaccggtacatgacatccacttctgatttgaatatctctcgttcaatgagggccgctggagaccaacaaatctgttctttgtcttcagggtataaagtgtcgatgaccaacgggagttggatgtatccaaaatgatggccggggttgcgtaagatatttgacatgatatagttcctgctattcaatatttggtgtgtacaggaagtataggtctggctttttcaaaagtaaagcccccggaatgggggctttatatgatcagcgtttaacgcttgcggcgagaccagcaacgtcggtcacagtctggtcagcgagaacgataacaggcattgacatgcgttgtttgcccgtcagagcttgtagatcttccaacttgtagtccttttcaagtttgaggatacgatgctcaataccgcgaatgcgacagatgttctcagctgtaacacactgtgcacaaccttgtttggaatagatcgtaatcatttctcacctttatgcaaatttaagaccgtcagatactgaaccagtcagtatgcccatcagataatcaggagcttctgcttcctgcaatgcgtattgcattgtagtattatctagccagtcgttaatccacggcaccggattgtctttgcgcggttccccaggatacggatggccgatagcacccatacggtgtgtcgccagccagtcaaccatctggtgaaggatcttggcgttcaggcccaggatagaaccttctttgaacagatagtcagcccactgtttttcctgattcacgacatccatgaacatctgcgtcatctcagcacgaagttcttcacgaatgacagcaaagtccggatccatcaacggaagacgattcaggaatgtctgagtgaggatcaggtggtcctgctcgtcgcgggcgatctggcgaatgatcttcgcattaccttccatcttttgaaggaattggacgaatgcccaggagcatgcaaacgaaacgtagaagcggatgccttccagcgtgttggcagcaaacagggatcgccagaatgaccgcttcgcattcatgatatcttcacgggtgaagatccggcccgccatacgcatacccgcccagcgcacagattcatcgtagcaggtgctgatttggtgtgcacaatcaacaatttcagctacgtccagcacatggtcaaacacgataccagggtcattgaccgtgttgcgtaggatatgggtataggacagagagtgaattgcctcttggcgggtccattccaggatagcgaactgcgcctccggggtagaagcccaggcaccgaatgcttcaaacggggccgcgccctggatagagtccagcatggtctgccgtttcaggttggagaaatagatatgcttttcaccatcgcttagagtggcaaaatctgccttgtctttggtgatgtctacttcttccgggcgccaaaattggctgaggcctttttcataccacttctgtacaaacggccaagcaacaacgtcataacgctggattgataccggatcaccaaagaacgggagtccctggttattcgatgtcgggtcgaaaacggaaaattgcttttgttcagacataattctttcctgatggataatggggtgaattgctccacccctgataatataacacagtgagatatagacctaacttacacgatgcacgaatcgcagccggggtcttctgctgctttcaactcttcatcttccttggagtctttgtttgtgttgtagtacagagtcttgccaccccacatatagaaggataagatatcctgcatcatcttggcgcgggggatctttcctcccgggaacttctcgggatcatagaaggtattggtactgatagattggtcaacccagcgctggaacaccgccgccgtcttcagatagtcgatacattccatgttccacttgagatcatagataggctcaagggtttcgacatccggcacgatttgcttgtagatgccgtccttgcttgccttaatgctcaccaagcctttcggtggctcaatcccattggtagcattcagcacctgcgaggagctttcagtaggggctatcgccaacagggtagcattgcggataccaaatttggcgagcctattttttaacccatcccaatccagaccgtatgcgtccccaacaggctttttgccattaggaaggaggtccagtggcagaggggccaggtcagctgttaccataccgcttgaatggattgtttctttaccacacgggccaaacatttccgccagcttgttggatgccttgaccagataatagtgaagatgtgccatccattcatcaattagctgtaacccggcgggcgaaccatatccggtgaagttccgcgccaggaagtgagcgacgttgacaacaccgatacccaggggacgatattcctgaacagccaggcgggcttggcgggccgggtaatcttggtattcgaggagcatgtccagcgcggacactaatacgaatgccacatcttccatttccgtcggatcatcaaacgccgtcaggttgaatgatgccagagtacacagagcgatacgaccactttcatcatcgtattgttggaattcacgagtcggcagcgcgatttccagacataaattcgagctgtaaatcgtgtcgaggttgaacgggctatacatgttcatgtgatcaacgaatgcgatgtaaatgcgcccggtatcggaacgctgatccagcaacgtctggaatacttcttcagcctggagtgtcttggctcgacataacccggcgtctgctgctttgatcatgttgtcgtacagagtacggaattgatccacgtcgctgaaatatgcctcgtacatatccatgttgtctttcggatcgaacaaatacagaggttgtttgttgaccagacgttcaaacatgacgcggttgatctgaataccatagtcaatacggcgctcgcggttttcttccgtaccacggttgttcttcaacacaacgacatcgtcgaactggtaatgccacagcgggatataagctgtagcagcaccaccgcgaataccgccttgagagcacgacttcagtgccccggtcaggtatttgatgaatggcaccagaccagtgtggaccatctccccgccccggataggactgccgataccgcgaattgcaccaacgtcgaaaccgatgccagcacgcttgctcacatagtctacgatagatttggctgtcgcgttgatggaatccagcgtgtcgccagttttgatcagaacgcatgaactgaactgacgggtaggagtacgaacgcctgccatgatgggagtcggaagactgaatttgcctgtgctggcataattgtagaactttttgatcatatccaggcggctggccttgtcccaattagagaacagcgccatagcaatcgccatatacatgacctgaggagtttcacaatagactttcttgtctttttgagaacggtcacgcaacaggtacttctcagtcagctggcccatggccgcccaggtgaagttcttatcgcgtttgtggttgatggtggcctgaagttcatcaaactcttcagtggtgtacagatccaggaattcccggtcgtatttaccgagtttgatgttcttgacaaagatatccagcagatggggcggcttgtactgaccataggcgattttgcggagatcgtatgacttcagacgcgctgcgacatactgatagttcggcttttctacagagatgagagacgcagccgcctggataagaatatcctggatgcggtcggttctcatattatcggtgaattggatctttgatgctgcaatcacctctgacattgaaaccccgtccagcccatcacaagcccggtcaacgacggtgtgaagtttttcaatatcaaaggagacagaagatccgtccctcttaatgacgttaatcatagagatcctcggtttgtgttatatgcaggttgttattatacgccgccctcgcagattgaaggcggcggggaatggtgatgaggtatttaaatgtcgtacaggtcattgacctcgagcatcagacgagtgaaattgccgcgaccgttgcgatcatttttgttgaactcgatgatgctgaaaggttgaacccaatcaggatatgcatcacccggctctacaccgtgaacagccagagtacccgcttccagtttctggttgaaatcacggaatactttgacatacgtgtcaagggcgctatcacgcaggcgtttgttcgattgcttaatgtcaccgttgacgaaaacgtatgtcgagtcagaagatcgggtgaggaggttcttcagctgctccatgtcgcattcttgagcctcttcgataatcaggaaggcatcatcaaaggtcatacccttgatagtctccagatcctgaatttcgatgatgtgcttctcccacagatagttgaagaagccgtcgctgccagtatcggtcttcaacactttcttgaaggtttcgatcagcgggcgcagatacgggacgagtttttcatacgtgtcgccggggcggaaccccgcagtctgtccggttggcaacggcgaacgagagatgatgattttactgacacggcgatcaataagatgtttgatagcagcggcagcaccgcaataagatttgcccgtaccagcaggtccgattgtgatggtcagattgttttcaagggcagattggtaggcgagattctggttgtcagagaggccatggaatggagcgattttgaaatcacctttagagaacttcatccattcgtcttcgcgctgggttacttctttcttgcgcgctgatttggtcttaccagctggcttcatggatactactttgctcgcagattgcatgtgaaccttcctatttctacaggggttatctcatcacctttaattaagcgacgcgcccagcataactctatcatacataaagaaaaaggccgtttccggccttcgactaactgaatgatttgtatgctgcagccagcttggtgtcgtactggttctgtgcatacgccgggccattgtaacgccgagcaaactcagtccaattcttgtccttcaatgctttccacagattggcgtcagccttgatgaacttgacaaatgccatgagctgagcacgttcaccagtgagaaagtcgttgaacatctcctcggcattggcatatccgcaaataacgcagttgaaccccatgatctggaataacccgtaggaagcgctctcgtaggcgcaatctttatcgatcgctattgcaccatggagtcgttccaactccgcgtctccacctgtgtatcccccggctttggcgttaaccaacgtcgggtaaagctgggccagagcattggcttttgcctgaccgaacttggcattcagctttttgtacatgatgtggcgttcaaacaatgtcttaatctttccagacttggtgaagccagtaccgcgcgattctacttggttgactgccttgatgctagcaaggtcaacagacaattcacgagcagcgtcaatcaagtcagcctcagtcagatgatcctgatgagactcccctgcgttgcgtatagcatacatggtcttggggccagcaataccatcaacgaccagtccggcacccgcctgaactgccctgacggcgttgtcagtcgctttaccaaatatgccatcggcaaccagattgaacccgattttgttgagactggtctgaagattcttaacttccagacctttgctgccaatctttaaaatggccataagaaaatacctccgcaatgtttgcagaggtatttaagtgaaagtgaattacactcgaggaaatttcgttacatattgtcgtaaatttctttcaactcgtcaatggactctgcaacagcagcctttaaaccttcgtatgccattattgcagaatcaacataatcgctggtaatattgtcgtcatattctctaaaaccagcaagccaagatctcgtggggagtagatgctgaacatacacatccccacaagaaaggacaatttgggagaaggaacatgtatctatctgccaattttttaaagtatgtgaagccagtaattgtgcggtttcttccgcaatcttagtcgcttctgtgctgctgaatttattcatcgatttattcctcatctttccaggatgggggagtttcctcccccttggcgacttatgccaggcgctcgatcatgttctgcacttcgatcagagtcagtttgcccattttgacatactgagatttagaatcaccaccgaccgctttcaggatatctgtgttgtcgtaaccttttttcgggaataccatcaccgagtaggttccgttgttcagcgggttcagctgcacccggcctttgccgacgttcagagtgccgtaggtttcggtcttcgcttccacgatgtggatgttcaggccgaacattttcagcatgctgactttgtcagaggatttagccactaccgcctggtcaaccacaatctggtctttcatggtgaagccgcaagcagtttcagttttgccgctcagcaggttcatgaaggaggtcttaccgccctggaaaccggcttcctgtgcaatgcggaacatttctgctttggaaacttcggtgttcagttcgaaagatacagagccgttggtgatgatggttttgatagttttcatgttaaatcctcattatgtagttggtgcttttcacttttcattcggcggggtgttgtttaccgccctatgtgaactataataggccagctttattgaagagtaaagtctttttcaataaaattttaaaatatttttgaattattttacgaggcctcgtagatagaggcctggagggaagaattatttttgttcgcgtagttgcttcagatagtttcttgccgtatccatctgatcagcatcaggctgacacgccccagaatcaactaccccattacgccaaccatgtacgaaactcggtgattcataaccactgagaacatatccggctcgggcttgctggtatccccggaggatctcctggtcatccagtttatcaagttctttcatatccatcacactttcctcaaatcggcaaatcgtaaggaagccgcaagtccctggtagacattgtcggccataattttcagaagatcacggatagggatattccctttgctcgggttcaccatatcgttgatatccttccagcgtatctctcgcgggaacaaaacgatcttgacacccttgtcgatcatcttctgtatgccatcacagacctgcgggtttctatattggttgtcaggcacatagatgtcccccttggcgctcaatagatcggcatctgcggtcgccaggcaatttggtaagaagagactatccagcggcccttcaactactaatttcacccggttcatcaaaatgcgttcttctccatagaccttcgtgtcttcattgcgcggtttgacagttgcataccgcaacatcccttctgggaggttatcaccaaatgcgcgcccttggacaatcttcattctaccatcctgagtccagaaggggataaccagtctgggatcatcagggatcttcttctgcttctctgggtcagtctcgaaattgagaagatccttccggaagttctcactgaaatataacaaagagagagcgctctccggcattcccctgccttccacatattggcgagcaaaatgtgttgggtcaagaagatctagtcggatcatattgccgaggtggtcctcatcccgcttcgccacttgttgaccgatacgcgccgtctgtgtcagtttcttcaagggtgccagcttttgcaccgggcgggcgcgggtatcccccatgaccttaaacttctccatgctgtactcgctgtacagacggtcatcgaatttcttcaaccagaactcaaaagcccaaccgctcatctcattgcaattgaaacatttaaatctaaacacatcttcatcatgatcatagaagaaatgtcctcgacgtttgctggcgtgtttttgagaatcaccacataagggacaacgaaatttcgcaacggaaccagttctttcccagacaaatttttccaatctcggggcaagataattgataaattgttcatcaagaaatttcacgtttgttctccttgacaaagacaatccaatcttcgtcttctttaggaacccagccagcttcgaatttcaatttcatagttgtaactgtcgtatacgaagtctgcatatcgtttccattgagtaaatctatgactctaacagatttgttattacaccatttgttgtatattttatccgctatcaaccaatttttatgagaaccccgttttatattagtcggatttctccaaggactggtccccttcattgggttattaacccctttcatagaatccgaaatagatttcttcgtaatttctgtatgttttcggccttttattttatcagaatgagcctttctgtttctttcagttttagcgttgtttccagaaatagtgcataacatttcccttcttaatgaaaactccttgttattggatggattggatgtaagatgtttcattttggtaaatgctttgttcataacttcaccaaacatcttagccaacaacatatgcacaatataatgttctgacgctgtcaaaaccaccatattaaatttcctatctttaccacccatggaaagaggaatgatatgatgtttctctgtgtaacccgaaggcagtgaccgattaaccgccctggaaattatggagtcgtgtatccttttatagttcatatgtttggcctctggaatacctcattgacagtatacgccacaccacgggtttgagcaatacagagctggcgccaagcaccatagaggatattgtgttcagcgacggtgttctttacgacatggccgaagtcttccaccatcttttggtaatggaggagataaggaggcatcttaccattcgggcttcggcgggctatcatattcagatagtgctggggagaatacagggaagatatctgcatgtcggggacatggatagccttcaatgattttcgaggcgtgaaatagaacaacccccacttcggtggtagatcttcgatccggatgactccctcaggacatgcataaaaccgatagctgcccattccctgctcgggattgatgcgatgaggcttcttggcatctgctcggaaatcatcccggctgactttgacctcgatcaaaatactgcacccatcggggcggaaaccgattgcatcaggggattcagaattggtatgaggattcggttcgacaaatacggcaccgcaattcatctgcttgtgaagatatttggctgaaatctgacagccttctaaatgagttggaacgaagattttgcccatctttatctttatccatggttgacaaataatgggcaattatattatcagaggagtctatagactacgccagttgcttcagtttatacagcgtctgatagcaaagggtcttgatctcgtctaacgtattttggagatgagaatcacactgccgataaatggcgtcgacgtcgataacgatgctctggatatattggatcgggtctgggttgaataacttcgtgttctcgaatccgggagtataagtcccgcccgcgccaatatatgcttcggtgaaggtatccagcaagtcctcaaggtcgccatagaactccccgagtgccttatgtttggaatatgagtgcgtggtgaagtgaagtgcatgagtatgtgctatcgccaacagaccacggttgataaatgcgctcgcattgaccattttaaacatcctcagaaaaagaaatccccctgtatttaagggggattgtttactaaccggagatttactgaggcttgacacccaggtacttggcgatgtcgacagccagcgttttacctttgctgatgtcctgttgctttccgcccatggtgacgatcacatacgggtcgtcttcgccaccgaagtcgatagcaacagatttgccgataccggggatgcccgaatattcaaattcggtacgcccgctcttgcgagatttaccgacgcccagcgccttaccgatcattttgtccatattggcgagttcctgagcatatgcttcagtgacctggcctttgtcagcagatttaccaaagaagaattcgaaaccgtcatgaacggctacgacttcctgtccctgagacaccgcgtgtacctggtccggggtcagcactgctttgacggtattaccatcggtcagctccaggttataggtgtcagctgcattgtccggagtgatctgggtaacagtaccagagcaccactgagtgccgtcagcttgctttttgatggtaacacttttgccctgtacaccagcatgggtcacaggctgcgctgcttgttcggtaaagaattcgagaaaggtcttcatgggtttatctcctaagaatttattcataattagcccccgcaggggctaatcattttacttcagattaattttcagactgccgccgattgactgctcgtattcggaatacgcgtcttcgccattcatcatagccatgtcatcgctacgttgagcatcggacatcgccatcaggttcggttgttccggcgcatagcctctgctcttagcatcggcatatacgtcttccagatagcggttgccacggtagacctgagcgctgaattccttcatggcgccgacacgtgtgttgcggcggaaagtaatttcccaatcaacctgcaaggaattgccattgttggttaagtatacccgccaatcaaggtcacgcccctttggagcactttcttcaatcgatgccgcatatgttgccaggtctgcagctgtcttccctttgccgccctccttctccagacgactattttcgtcattcaaaatacccaacatgaattcagtagtgcggcgatcagccatgtcgtgcccgcgccaaaggactgaaccgttgtcgtcgacaacaatgtcgtccaaaaatacttgtttcggattataggacttgcttttcagagtttgcatattccgagataaaatttccattttcgaagaaatttcatcgatcacggcttgaacaatagttttcttcaaaggaagttcatatgtcttcggattgttcagtatccgccctttctgggagatcatcggcgtgaatgcgactttgtctttatcatagtagtaggtcacattagttgtcaatacagcgccaccatatttcccagtttccgggaaattgatgccggaccaagttatggacataccgttgacagtctcaccaaacaccgtggcgttgcgtggtatattcagagttccggagtttaccagatcaccactctgagcattcagatcaatggaaccgtagatggctccgctgcggtcttttaacatcagagtcttgtcgcccttctctggaatgatttccagcaggtgcttaccgcgcagaggctctttgttgagttccaacagagcggtattccctggtttcacgcgattcaggatagcatcggctactttcagagtccagttcgcggtctccacataaccccagccctgagaacggcgaacggctttgatagggtatggagcgctcatcggcactgcgttgatttcccattcgccacgatactggtgttctgcgacgtatgtgatcgtttccatgatttcattcgcgacgcgacgcgaatcacccgagataacacccggctgagattcgatttcagagaacacattgtaggtgaggttcttaccgtccactgaatcgaagctgacaatgatcactagaccgcctttggtttgataacgcgcctgcccgatcctcttaatgctttctcctgggaggtagcttgctttctgatcaatattggtatcaatgatacccaacacacgggcgatgaaaccgctgtcacgcaattgatcgatactggttgcgccgatcatggtattagagtcaacaggcgcagacttctgttgagaacctttccagaattttgtggacgccttggtaaaatcattcaggatactgatagggacttgcggtaatttcaactgacgagcaatgaaatcagcactttgcccacgcacagatttctcattcatgtatgcgccaacatacacgcctggctcattgtagtggggagcgatatttgccgtgttcatgcggcctctctccttaccaacccatatcaacatgggctgatccccgtttgaagttaatttccatccgttggaatcatcaacagaagatgaagcccccacatctggagtattgttctgaaccgggacgtcaccgaccttgtctggatcatcccaggtgataccctgcatcttcggaccgtcgaatacctgagccgggtcttttccttttttgaccagccaaacataaccacggtcagggacaggcgcgtaggtcagatccatgacgttcagtttttgtttgaggccggattgacgaatgattttcgggatcagggtcataccacgatccagcgctttcttagagaagttgacggcatagccatcgatagtcttacccagaggcgtcgccatgaattgtttggtggcttcgatcatgctggcgataacgcgcatcgggttcttgaaacgggcgatggcatcaggataaactgaaccacgtttctgtccgatgaagacctggcggacgtttttacccagaccttgcggggtatagaattggatacggtattctttatcatcttcatcgatgaaggtgaagaaaacgtccccagcatttttcttgcccatggtgagttcataaggagctgagttgaacgcttcgtccaactggtcgcgctctttcatgaaatctaagaagttcggtatagacatggtggttctcctgataataaaacggacggtttccattaattagcgaaaggaaaggggcattatagtccctattgtgtcaacggcgaaacggacggttggcgttttcacggttgttccagttcttttcagcgatggccaacgcagccggactccattcgcgttcccactctttgtcaacttcagcctggttggtcggctcaataacttcaacgccggggaagtcacgtgccagaatttcgcggagttttgcatcttcgtgggtctgggcgtgtaccagggtttcgccttcgtacaccttcgccatcagatatttcttgccgtagtggatatatgcgtcgaggataattttcataatgtagttccttcgtttcaatttgtttcatcgtactgcttatgtattgaattataggggtagttattgaataagtaaaggggccgaagcccctttttattgaattattttatgctgtgggatttactaccgggatgtagaagcggataccatctacgaccgctttcagatgtggatcccatccggacacaagacgctcaagggcgttagaaccagggtatacgataatgatgtcgctacccgttacgccatgctgagggaattgcgcaaggtactgctccatggtaacgtcaggatcaataagaactggtccaacatcagatgaagcatatgttgccccaaggccatctttaccccaagccaggatcccccaatcagggatattcgcttcagaagtgatcgtataaccgaacacccgattcaatgctgagaagtcatagatatcatgctgtgtgtcataagccagatatcctttggacagcatatcggcaaagatctcgtcagtatcggttgtcgccagggtaggcacgacaaataacagttctccagcaggaggggccgggtaagtcccaacagcatatttggtccatgccgtgatacatttcttgataaatgcttcgctggccgtgtagtcgatcaagcggacggtcccgctgtattctgaagttatgatgccctctttggctccctgaatagccaggaagaccatcaggtgctcataacctatttgagatggggtgatattcattatcgcgtcctcttgagtttctctatagtgcgcttgttcatggctatcacctgaggatcaactttcgaactcgcgggaatgcctttgaaagacacacatctttgcagatatttagccttcttcactacatcggcagcatacgaattcgatttgctgttgcgtgcgtgcccggcattatacgatgaaagagacttgcgtacattctgattatgttggttcatccagaaattcatctcatccagcgcggcgttggcagcatactcctgatcaatcaaaagtttcacagctacattggcatagcactttctgttcttgcatccttcccgatccccaacactttgaactttgttttgaaatgctcccatattggcggctttgataccagatcgcatagacacgacgtcttctcccgcacgggactctctccaggatatagctgccagggtgtaaccaagagattgggacttgcctacgtggtatgcagtcgccatggtggatagttgttgctcagaaaaatcatagtcacattgtgatgtactttgggaagcgtgcacactcccgctggcaatggtaaaggtcacgaaagcagccatggccttcaacgttgtcatcgtcatgatggcgttccttatttgtttgtcgacttgcagctcgattgagcctcctgacagggttaaaagataaagggcaccagataattagcgccctttatcattattcaaatttggcgttatagcattcttcgatgcattctaaccaggcatacaccagttccatagggtcatcaaatgaagttttgtaattcccgatcttgaataatccgttgaattcatgcccatcacggtaaaagttgattttcccgtcaacaaatatcacgtatccttcaagatggtatgaaataacaccaatggccacaggaaacttcgggttattgctattccaggtgtcacatgcaatctttgatgcctcgaatatttcgtctttattctttcccatctgaaatactccaggagttcaaatgattattgcattggttgtataaactttccaacagatatgcaaatgcctccgtcgtatgagtatttgccaccatgttgatagcttcaaatatattgatcacagcatggcttaattcatgtacaagtaccccagaatcggaaatgaatagaccgatgaccattttgctcctgctctcattagagctaaccatcccaatggtatcaccaaaatcttggggaataccctcttctcttattttggatacttgttgtgagaagagaacacggctattggtaaaccaaacatcaggaaaatatggttggcaatcaagttttacaagaacctttttcataagtttgtctcaagtgctctacaaaggatttacccatcaatcggaatagtttaatacggttgaccactttgacataaacatcgccgtggcaagggcgcggcttacaccaacaccctaagacctttccgtccaattcaaggagttcatcttccgtgatatctccatttatcaagcgtcggtaaagatcatcttcaaataattcgatgcaattaccgcgcccatgatctttgacctcaaacgggttcccccattttccgggtctcccgatgtagatgtcatatggttccttcttgaaatggacgactttcatgatcactctttgctgatcacctgggtcataccatttcgcagaccataacgaatgttatgagaaaagtattcctggaattcctgctcacgttggctgatgacgaagagattattattgctgaatttgtatttcagcatctcaatgcattcttgtacaccgcgctcagaaaggttctccagcacttcgtcaaacaccagtatgttacattggacagatgctttcaggttagcgacgtcacgcagagccatggtgatggcaatgttaacacggacgcgctgaccggaagataagctgaagagactttgccctttacgcccggcggttcccatggtgatatcaaacgtatcgtccacagaaatgtccaagaacatattcatcccttccagatattcattgatcttcttattcaagaatggcaggtacaaggagataatgcgggccttggtctggtcatccttcaagaagtggagaagatgattatgatcctgaagttcttcatctgtcgtttggcgtcgttcttccagatctttcagagattgttcaatacctgtaatgactgcttccaggtcggcagttggagtcggctgtacggatagtttacgctccaaatcggcaatcgaagcaacgagaggggcacgacgggctttcagctcgccgatcttatccttgacagttgcgcgcccctgagaggctgtctctaacgtttgttgtaatgatgccgtaatgtcatcgaacctggtgttcagcgcctgacggttagacaggatttgagatttgagttcacggtcaagagaagccttctcaatttcagcagttttgtagaactcttgaatatcccgtttaatcgtttcaataccattatgcgcttctgccgcttggtctcgcagagaacttaactcagcatcgatttcagcgacttggcgaacaaattcatcatccttcgctttgtgctctgctatggtggtattgatttcttccagcatagtttccagtcgttcaatacgggaatctacatctttaattttgatgttgccttcgtattggacctgggatttagcttcttcagatacttcttgttggcaagttgggcaagtacccatatcatggaacttctgaatggattcctgatacccttctttttcggtttggaatttgatcctgaaaccttcgccataacgcagcctttccatcgcttcgttgagaacattcagattctcattgcgctggttgagtacttcgtttttgcgttcagtgaccttacgggcttggtctcggatatcgttaagcgcctgctcagccgaagacaattctatacgctcatagtcctcagctttatctgatgcaatgtcatctactgctttcatcttctcggcatattgtgcctttaggttttctatctcttcagtagattcttgattgagacgactttctacttcaccaatttcctttttggtgttgacttcgacttcctgtaaccgggccatttcatcttggtaagaagaaatatccgcatccagactggaaagccggatccgttcctgctccaggatttcggcagactgttgttggatgcggttattggattcaatgatctgtgccagctgcgtctttttgttggtatggtcgatcattttcataccaaactcattggagatatcttccaacgttttgttgagcactttgatctttgccttgacgtcttcgttcatcaggctgaagaagccgagatcccatatcgcttccaccatggtacggcggtcagccgtatacatttccgtgaacgggatgaatttctctttgcccagaaccagggagttctcaaacatcttctggtcgatgcctatcaggttgacgatatacttgttcatgtcggctttagccgcttcgtttacaacctgtttccattccccgtcaaccagctgatgaacttcaacgaagtcgggtttgatcccacggcggaccttccattcactaccccggcaggcgaattccacttctcccacacagtcttttttgttctgagagtttaccagtccggccttcttctctttcttgctgtatgtatcgttgtacaggacaaagaataacagccagaccagcatagtggatttccccgcgccattatcatcagatgtaacgagggttgctgggtttcgttggtaatcaatttccatgaattcattaccaatagaacggaagttcttcgcccgccccttacggaaggtgagtttgtgggtaacatcaccacgcacatcaaatggaaccgggatatcttccggcgtcgcagcttcttttaacaggttgccaaatttttcaaggatatctgtcatcgttatgcatccagagtattaagacgttgttgggcggctgtatagaatgcttcggccagtttacagaccgattctgggcgctggatattgtcagcagcgcggatatcattcttcagaacttccacggcatcggtcgcgatcatttcttcggtgacttcaaccttttcagccgaaacagtcacggtcttatcgatgaagttgtagtcaatacatttacagcgcttcatcgcatcacagaacttctcgtaatgcttagaattatcgcgattggttacgataatcttaacgatctgtccttcaatacccaacttggtgtttagccattccggatcaatccaattaccttcgtcatcagatgacagtttggtgtaatcatattccacataccggaatagagtttggctggcgttgttggggatgaacagctcaccaccttctgtcaggtcgtccacgtagaatccacggttatccccgtctttgtggtcttcccatgtcagatgatacggcgttcccaggtactgaacattcccttcaaacgaacgggtgtggaagtgtcctgtgtctacacgagtgaatttactcaacagagacaaatcgatctggccatggtcacaagtggaggactgatacattttgaaaccagccagttccaggtgtgcaaagcagaactctgcatcagtgtcttgcaacatctgtactgaccgcgcataattctctttgttgatccacgggagcaccagaacttttttgccctcgaccataacttccgtcggttcggagtaatatgtgaacacatccggggccatatcgacaaggtaagaaggccagttgatgcggttagattcttccagagtgatgtcatggttgccgacaagaccgttccacttgataccagcagcacgcagcgccgggaccaactcatcttttagccaatctttgtcgcggccatacatgaatttccggacgtcaaatgtgtcgccgaattgccagacttctttgatgtcggcatcaacgagttcaggaatgaaatagttgatgagataattcttaatgaagtcacgaacataacgagagccattgcggctcccgatgtgtaaatcgccgatcttagcaatcgccattattcttttctcctgataattcggatagcagcgtagggctatccattatttcttcaaggctgaattgggttttgccgaagtcttgttctgaatcatcttcggcctgtgcggtagcattattttgcggtccacggagacattgaagtataccttttggaatctttttattcttttcgtcttctttgaggtcggcttgtttttgtctttccttttcacgctgggattctttcttattttcgaagtggcctatccgctcacgaaaatccattgtaatcccggtgttgtcaacaaatgtctgagtctggaagtctggatcatcactgaacgccgcaaagccacccgcgtcttcgaatgaacgcaatttgatatatgtgtgttcttcttcgatggtcaatttgcgggcgaatgaacgatcagcgcacatggtgacccaagagaagaaattgatcttccctttcttgccgacatggctgacgtcgaaggtgtgtaaatatcgaagaatattggcgacggcatcgctcaccatatcttcacggaaaggataatctctgtagttgtagcgggtactcattttctggatgatcatatggactttagtggccacataatttgggatcttgggtaggggcttcccttcggctatcgcctttttccttccgggtatccagtcacgtaatattgcgatgacacgctcattgtcttcgtcagtgaaatatttggtgacgttttcccctctgtctacgaaattcatgcccatgatctaaccctcagagataccgataaattgattgaatgaaccgacgactttcttgacgcgaaatcgttcattttccaggaccatactgctattttctttggcccggacactccactgatccgcaatttcgttgccgattgtacccgcatggcctttgacccattttagttcaagttcacaaattgaacaaactttgtcatacatattgaacaaatcaagaagcaattcagtattcttcggaggcatgccctcatattcccatttcgaacgccatttggtggcactattgatgacatactggctgtcagatataatcgtcgctttgggaatattacgctcaccacaaccagaaaatttccaaaggagtttcagagcattaataacgcccaagagttctgctatattattcgtagaaggcggtggcaaataaccatagaatacattccattgtaccccgccagaaatcgggctgactgcaaaggcccatcccgccgcttgtgtggtctgtggcgatgaagcgccgtcagtgtaaatttcaatcacgatataaatactccaaacttgtttatcatgaggacattattatggctgaacgttcttatcgtttcagtttaaccgcagctgaaatcgaacgacttctcctgtccatacagaccgcaatacagaatgtagacatcatctatgactacactgcaggcggtacaccaggccaggttgcggcagcgtctgcggtcaaaaacatgtggttgaaagtcaatgagatggtaacaggagaaggtctcaaagacgcaatcaacaatgctggcgacagcaacgttttcacagactattataagtcattattggatcgtgatggctggaaatttatcggctccccggcggatattttagcaagagacgatattgacaccaccaattttacaggtggcgaagtcatattgttgcagaaaaacgattcagggaacccggaattccaatattggaaaaggactccggtcgctggtggtgatcctatattcaattggacgccagtttatgaaggcggggccaatgattcaaatattgagatcccagtcgtcggcaccagtatattgaaaagtataccgaaagcgcttttccatatggtagaattccgtgttcatgtgtacgacaagacacaaggtcattggcaagatacagatggaaaaatcggtttccgtggtgaggacctgatctatagtgaatacaacaatgttcaaacccagcaactggcgacaattgagtacagtatggacagcgatgatatgatcatatccctgacatccctggcaccgaatctcaaatgtcgcctgtcatttattgctggttattaaacttcaaatactgcctcggtaaaccaagttggaaagaactctgggttgcgcatcatcaaggattcaaaggaagaatccaggatgtatgtcgcggcccagtcgttcacgcccctgaccgaacgcccgcacatctggataatacgcagtatggcattccggaaatacgccgatggatccacagagttgatatgcgcaactaatgggtcaccaaggtaatcatatggcaccttgataagaatctggaaacgactataatcccccttgaagtcatatccttcttccatagccggactggcgatgatgcacggcgtcttcgtacggaaagcattatccatcagttccatcagagccttgcgggtcctgggcacgtggatgatgttccggtatttgctgaacttctgtatcgccagcgcccggtcataactcaccgtatgaatgatgccagactggccttgatggaattgtatgatctcgtcaacaaacccggccagctgacgcatctcatagtcacccatgttgttggtcattttcataaccggcatgtaattgactttgcgattctcaatcgggatcgggttccctatctgtatcttatggtactgcccaggacgaatacccaaggagcgagcatacgcatcaattccacagatggttgcagacatatgtacgtgataatcggctttgcggaaaaggccgaattcagacacatccgatgctataacgggtttgaatcggatgaattcttctcctttctcttgtacaataaatgtactcgcctgggtctgtgacatgataccacaatagtcagataggttgtggagggtgtcgataatatcagccagcttcattacctgggcttcggtcaggcggtcatcttcaacgagttcatgcagttctgttaaaatagcttccacctttcctaacaagtccacaaaacggtcgaacagataaccatcaagggaatacagcttgcccaattcatagtctttgcaatgggatacaatctcaaccactgcctggacgatatccttcccctgaggcaacgatctcagtccttccaataccttcgtattgtattccatgatcgtatggtctaggagtgtagagggcattttatggcactcatccaaaataagcatgtcggcccggttttctggcttcatacaaatggtggtgcacatttctatcatcatggctgcgtttgtgcagcgtaatgaagagatgttggtccagagattacgtgcctggacataggggcaacgcctcttactacaatgcccatcccggcaagcgatacggcattgcactgcgttgtaatagatatccggatgcatatggcagcgataattcttcttgcctttcaggatatcgatagcaacagctttttcagccgcatactgatcttgtagacctttggtcggcgtggaaatggatgtacggaattggccataggggtttgcttcaagcacaaggtggcgcaacacctgatggatagttgtgccgatgagggatttaccgactccggtaggagcttcgataatcacgtgtttgaatttcttattgaccaaagcatctatggcttcaacaatacattccatttggccggggttggcgtggtcatatggaaaatatcgttcggccaatttctggatttcttctatcggtatttctctgcgaagagtctccagcgctctggcatgctggttaaatgctgtcacttgatttctcctttgggggtgtcagtatagtttacccgaatcccaagaacgaaaaagccggggattaccccggcttcctctttgtacctgcctgcgcagtgcgcctggtactggccgaatttgttttatttgccgttggcgacgtttttcagagtttcgccgaccttgaatttgacgacatttttcgcttcgatggtcagcgcagccccggtcagcgggttgcggccagcgcgggcttcctgatgtttcacttcgaaggtgccgaatccgacgagttgaacggattggccagcagcgacggcagagttgataccagcgataaaggacgcgacagttttttcagcttcggttttggtcacaccctgagtttgggcgatatgtgcgataaaatcttgacgattcattcggattactccagttggtttatgttaaatgtttacttctgtgttcactacaagaggattacagcttacctaacaaaaattattgaataaagcacttatttgccgattcccaataaattattggttcagagccgaactcactatgacggcataaatatctctttctatacgaccatcacaaaatccttcctggaataagcctgcgatagcatccaaacatttctgagtgggttctaccgggataacgactgtttgtgggtcattgacaggccgggggaatttaatcagctggccaacgcaaattttgtttgggtcaataatattgttgtacttcgctatatctgaatacatatagggatccgaataaaatttcatacagatccccataagggtatcacctttttgaacgatataagaactgatcatggtcatgattttatttcccaaccagtagaacggaggtgatccagataatcctgcagatcttggtcatcctcgatatccacccaacgatcttcaaggcccatttcgatcaactcggcatcatttaggtcgtgttgataaatctgaataccgctggcgttgcaataatcgggtttgatgttgttctgatactggaacagatcataatcagccagcgacgatttcaaacgttcagcttcagcatacgtcgggacttcaactgtaaacattttccccggcacctgaggaacgtgccaaacgcgaaattttagatcaaaaatacggctgctcatgtttactcctgattagttgtaattcagaccgtgaaagaagtcgaagaccgtcactttcttgcgcagcgatctcgtccgtcaatttattgaaattaaccagatacccaaggtcatgacaatgttcgtagaattgattttctaaagtggatatgtcatcaatacccatacctttatctgctggcaacagcacgaagaaagaacgttgggattgactggcaacaaaatggaccagatagacatcaaatagcatgctcataatgcgctcctaccgattagattttcaacatccaccgcatgggattttagaatttcatcaatcgctttctgccccatgtaagagaacggggtgcgctggtagaatgcccacagaactaattgaacaacagcacgggaacgggtttcagcccacatttccatatcactaaaatgtggggactgcgctttccattggatctcttcacccaggtcctggttgcaggttacagaaatgcggaatttgttgcacagggtatcaacttctttgtatgcgtctgtggaaacacgaagttgttcggcatgcgcccaaggagttgtgatgatcctttcacccaagatcttgtcagaaatgaaccaatctatagactggctaaattcagaaaaatgatcaatacgataaatacaatctcgcccctccatagaacgcatggcatgatagcgagcgtctatttcattgtcatgcatgtgattgaactcgatgtaaactcgccgagccaacacaacatcttccgggttcagagggaccattgtagtgtcgttcaccgtgtagtggaggaggcctgtaccacgcccatggtcatgttcacaatacacatatcgtgatcccccgacacgggcataggcgatatatgagggttcggataaatgtaggtgcccttggtcggccccgataatgatcggatagagttttgttacattgtgcataatatattccttcaaatcaaagaggcggtcattataaccgccccgatattatagactgccgataaatgcgttcttttcttggtcccagtccatatagattcgaactgtaccggaatcttctgggaacttgagatacttgggcagacctttgtgagagtaattccccgatttgttcatattatacatagaaccgtttttcaccagggcaatgaccttccgatccttagacaccagaaaatcaaaattaccatcgattttatccagaagacctttgctcaggatgattttaccatcagtccgtatcgacacgaacaatggatggttgcgaggattacgttcgcgatccaattctttaaccccgataaatccagaacgccaatcagtatcctttttggctggttttgtttctaccgccgttgcaggaacgacttcgactttcggttctttcggggtcggtcttggacgattggtaatcttggacatctgttctttgacataaggcggcggggagcgtttggtcggatattctttcccacccataatgccaccgagatcattaacactaacccaatgaccggcatcgctccgcttcgctaccagagaacaggagtagatgataccttgtagggtacgtggaagcatcgtgctcgcatcccagaactggcacccttgctcaaatttttcagcaaagaatacacgtccgtctttgtgtagcatgatgacattagcagcatccggagcaaaacgggaatgctgcttaatgatctgggcaatttcgttatcggtcatttaaagtactccggtcattttcaattagagcctaaattttaacccgattttatttttgattacgggtaaagttaatcgcaatctcacggcaatatgacaggtttacagcagtttggtgactgttatctgctgcggaatccatcattggtaaatccagagcattctcaatctggtcagtactgtactggtccaaacgtttcatttcaccttcaaaatcggaaagcaaaatagaagtatctttatcgtcaggatggaactgttgatacgttgacagccatgcagcgcatttgttcagattgttcgccgggactgccaacgcattgcttgcccagaccacaaagactgcaacgaatgccaagtagacgattatgatagtcgactttttcacacgcatcattcgttctccttcatcatattttcacagtcaatacgagtctgctgaagttcccgggacagtcgtgggtcatccagattcacagacaaattggtcgataaatctttcagcccggcatcaacccggtcttgatgataacgatcattgtcgaccagccaagcacgaagttccagagcacgagtacgccattctttcttcaatttaggatcattgatctgatcggcactgtattcaaatactttgacgcactggttcccatcattaatgagatcaagatggcgacgcccgatgttgacacctttctgaagcgccgggatggggagcgaacggcattgtctaacctgaatccgccctgctgtgcccatacgcccagtcatgatcaaatctgaagcatccatcccacctttgttgaatttatcgtcattcaggtagcctttgagattataggctccttgtttgtatcgattaaattcaattccggcgttgacaacagcgtcagtcacgttcccggtgttccacaattcagaaaagttctctatagaaccagtcttgtctatggcgacagcctgagaccatccagcacagtaagaaagatcttcccacagtttctcacctgtggagttcagtttggcagcggcggggagcgccagtccagccagcagcaccccaaggattaaacgtttcatggtgattccctcttgttcattgaggaaatagtagttcggaaggtttattgagtaaaggatttcaataatattctttattcagaaacgtgcatcagaaacagtacgataacgcacaccattgaattgtcgagctaattttacaaattccatggcaggcaaatctactttgtaaaccttcatacgctgcttgccgtccatattcagagcggcaacgaaccgatgggaaccatccacaacgtaattgtctgaagatacccaaacccggcccatcggcttcttgttcctgatctgcttcatgatcttccagaccttcattttgttgatctcgttctgagtcagccgtaatgtccggatcgggacttgagatgcatctatggtcacgccattcgcctccagataatcatggaagtcttgctgtttatcagcgtcaatttgtggcatagaagaacgagaaagcccgaggtttcccacaggaatcctcaggccgttgatgatattcaaccagtcgataaaggaagtcaagaacatggcacacctcgggatatggagttatcccttagttagcgcatatgtttagtgaaacagataatgatcaagaataggactaacccaataatcccatacccaattattgtgaccatcaccaccagttctcccggcggttgcggatttgttcttggcgtttcatgcgttcagcatcacgtttctcatatttggtgaataaacgatagaaccagatgccaatgattacccaaactacacccaccacaccgaaaataatgctgagcaccaaaccgactaattcccaattaataatcattttacagccccttctttgatcataatgaattcgccccggtgaatatggcaaatgactcttggaatacagtgacaggtttattgttgacggtcgcgattaccgttacccaaccgccttcttcgatattcccgaaggttttgacacccagagttttattcccacactggtatatgtccagcacatatggatcttctgctttatcaatcccacgagtggtcgtgtcgtaacggcaatgatacagccgctttgcaccattataaaggacaaggtcagaaccaaatgcctggaaggagtatttgccatcagtggttatacccttgatgacacgatcggcttgtgcagcgaaggaaaggctggccagagccaaagcaatgattaattttttcatgatatagtctcttcaaattgacggggcaattttaccccgtccgcgatattgattttagctaatttgcttcagaagagcaaagaggatttcggccttggccttaatcttgcctacgatgccgtcttcgtctacttcttctgccacccaggacttacccttcttgctaatgataacgtccttacgctggacatagacttccttcgcagcatacacacggcggaaacctttagcacgcaggaaaccccaattcttttcaatttcaaccgtggtttcgactttcttattcgacatatctatcacccgcgtttagaattttctgattccaatttgcgtatagcaagtatgcgcccctcatcggtcgcggggaaatcccaaacagcacgccttccgttgtgggtgtcgcagcttgctaaccaacaaaaattagttgggtccttgtacaagactaatttaggatttgaaatattgttgaggcaaaacggggtgaggtcgacaatttgtgatatagccataatatagtaccttcttcaatcaggcgggagccgttcccgccctacaaaattaatattaaatcatttattgaagaagtaaagccaacttcaaaattattttaataggtgaaccacgtgttcagccaattcacccagagttgggtcgtcttggtgagacccgatccaatgatccgtgatctctacatcatattcttcttccagttccatgatgatttctatcgcgtcaagttcatcgccacccagatgttctttgacgcgcagaggagccagggtatccagctggtcttcgattttttcaatcgcggattgtattgttacggagtgtttcttctcacgccataattccatattcagattgtcgcttgcatactggacaaggaagcgcatgacatcgatataagacacattcttagacatttggtataccttatgaaaaggccgggtttccccggcacagttgattagattttgatctctttctcttccagcactgcgctgacggtgtatttcacgccgtcaacttccacttccatggtggactcttccagatccaggtcggtgaaccagccatggccagcaacgatggcatacagggatttggacagggtcttgttcagctcacgcacttgggtgattgcggccttggcagcgtcactgatccaagattcaatgatcttggtctgcgttgcttccgggactgcagtcaccgccggagatttgacaaaggcgttgtattctgccagcgcattagcgatcagctgatcagctgcgttcagttttttgttgtctgcctgtttcttcagaacggcggcaattgacggcagcgaggaagcgcctttgatcttcacattgagttcgcggctcatgtagaaatcagtagactcaaccgaagcggtcttcggagagaagccgtaatcgcggatgccattcgcagacagaaactcagccgcttcggcaccgtatttgcccgccagacccacggcattacctttcccaaccagttcgtcacggaaatatttgagaaccttctgcttggctttcagggattccagacggacatggtcagcaaagaactgcgcggcgctgatgttcttaaccatcgcacggttaaccagcggaacgctgcccagatttacgatgaacacttccgggccgccgtaaacttcaacgcctttgctaaccagttcagatacggtttcagccgagcagaccacaggaagggtcttcatatggatgataccgtctttgacgatggtgtagttcttccactgccatgtgtcaatagattccggcagatcgtatttcttttgtgcaaacttcgggatgatgacggtcccgttttgcacagtctgcagactgatgttcgggcgggccgagttgtaaaccagattgctgataggaacgcccgcgcctttcaccggctcaaacacaggagtccagtcttcgtgctcagccagtttcagggccagcgctttacgctcttctttagatttggcttcggcaatttctgccgccagcttgtcttcggtatcgtcggctttttgtaccgtaccgcgaccgatccgcttgtaagagaacaggggatggtcaacaaccagttgtgcgtctgctcccgccaggtaagtcagaacatcaacaacagtagttgcgtcttccggcggcaccagattgtaatcgataccgtccacaccgcgcagcgccgggtctacaatcgctgctgtgatgtcagttttgatgttggaataatcctgcttggtgaagcagttggtgtactgtttaatgaagcgcacatcgccagtctttttcagcgcggcccacaccaggtcggcatccatagtatgcacgccaaagagagccagcacatatgccgcttcaacgtccgccaggttatccagttggtcgatcatatcaggatcaacaacccacagcttagagacgctctcagggatgttgacgtaattgataggatggtcttcatcagactgggcggccaggatggtcggaatcccgttttcgatataaacggcataggaatagatgacgctgaaatcaacgcgaacgcgcggggcgacagaaaccatcgctgtttccagttcggtctgatattcttcctggccttcggcgaatacatgggttgcaccagagcactcagccattttctgcagcagttcgcggttgcagttccagccgtattcgatcagggtgatgttgtcgtacgcctttggcagctgctcggcaacggccaggatttcactggaacgccagcagttgtcatagccgtcggtcatgaacaccagggaattgatgacgccggactttttcagatcgttggcggtttcgatagccagcttgagcggctcaacaaacccggtgcagcccgtcggttgcaggaagcgatcgatcagtttacccagctcactcaggtcagatgcattggtgacctggcgcccggcgaacacagtaccgaagtcgccacgagaagagaagtacagaatactgatggtgtcttccggcttaaccagggagggcaggttttctttcaggtgctggcgtagtttcggcagcgcatagcacatggaataagaaatgtcaacgacgatgacgtgattggaaggagcgaccgtctgtgtggcattcttaaattctaatgattcaatcatcgttattccccttttgggatagtttaggattggtttcaggattattatccttctccaacattttcaaaatgaacggcttgttgttttcaatttcaaccacaagaacgttctcgggatctaatagacaggaatccattatcgcctcacttgacggtattgacgccaggtattgttttaattgaggctataatttcttcagctttgtctttttcaactaccacaacaatagtagaaaatttctgctgtttgcgccagttcttgaagtgagtgaccagttggacttctttttcttcataaccggattcacttctgatgggaatataaactatccccgactcaataaccacatcagcgtcgtcgggaatattctcagtttcaatatcttcaatatattcgccattaacctttatgttgtgataatcatgccaagcatcctgaacccaatactctgagtcatcgtagtatgctttaaactcggcacctttcattttgactgacataaatcttctccactgtttaacgataggatattatatgcccgaacgtatattgaacccggttttgttatcggaactgggacacaatcgcccaaaacaatttcaacaaattatcttttggttgataatcgctgggggataacagtaattttttaaccgtttcgcacatatcttggcgatctgtttctttagaatcttcccaagaaggtgtagtgtccacaaccgctgaccgagcagcccaacaaagttttgcgatatgaattacaaactggctattaatttcagtgtgattcatataagatctgatgaaatcctttgctttctgtatttctttcgaattattgatatcatcatgttttttattatcagttttgtaaagacaaatgctgatgtaatccaacaatccaaatttacttcttttaattgatctaatagaatatgcggtggctacaccattccgatagtcccaaccggatacttgcattgtcttactttcttcaatataatcttcaagttttataaacggttcttcagttgtcttaccaatgaaatcttggacaaccatagcccggtatgcttccagttcccacaattgagagaaagtcttatcgtatgccaatttcttgcccaattcttcatcgaaatttttggggtcaatcgatgttgagctatcctttccccaaacgacaaatccgttatccattttcaaatggcaagtgataacacgatgccctcccacttcgcggtcttcatagataacttctgcgatatgggatttaaggatttctggattgagtttaatgccagttctgttcttcataattgttcctcatacaacaaaccccgcacaaggcggggttcattatcacgccaaagggcagcgggttatttcaacagggcttgcagttcttcaacatatttgagatgccaattcttccaccagaggagcggcacgaacgcgcgcatcttccagagtctgagtattgaagaacttaccatcacggtaaaccagttggtgctgattatctgcgtcttgcacctggtcaaacgtgataccatcaaccaacactagtttaccctgagagtctttaatgactttaaggaaaccacgcgcagatttcttcgtaccacctttgtcagtcttcggttctttgaaaatctcacggaattcaccgttgaccttaccagctgtggctttcaccgccgtcccggtactatcacgggtgttcatctggtaagtataggaaccgataccgaacactacgttgatggaagcgaaattccgttcagccagacgagcaaagatctgatcttcacggctcagggtaatggagtcaccgtagatcaggccgatgtgctcatccaacaggaagtggcccgtttcggtctgggttccgccaaagatctcccataggcgctggatagaaccgaccgcttctgaacgagaaatctcttccccgatctgattaaactgatattgttccagaatatggtatctgttttcttctttgagatagataacttcagtttcttcacgtgggtcgttatcgtaaaaatcctgctcattgcaaaattcttcgacgcgataaccaccaacgatatgcactgggtcaccagagtcgggacggatcacaactttgccattacgcgccatgatgatatctttgaggcgcggcagatagtcgtcgatgacctgccagtaatcccatgcatcagacacgatgctgacgatgccatcaggatacacgtcctgtaccaggcggcggaaggtttcgaattcgccatccttcgtgcccatgcacatcacggcgtgttcggtggctgcaacagagccagcaacgacatagtcttcatcgatatccgcgccataatactcttcaacgaagtccagggcagggttggtgtcggtgcctttgaagaacaccagatggccagaaccggaagacgccgcgtcatgccacccgctcataccacggaaggagaagtcgtggccttggtagtcgatgaaccaatggtccggcgacacgcctgtagcgatagcggctttcaccatcagtgctttgtagtgcagggcgatggtggcgttcgtcatcggcttccagatctcagagctgaacaccgtctccagatagttggtcagccagtagaactccggcaaggtgttgaacatcacatataccggaacaccatacgggcacatggtgccttcgggtagcgcacggacttcgataggcaggtagccgaggtcgtgcagggcttcgatatgctctgtcccaacgcggcctggtccgagaactttgttcattcgacgggcatacttcttcagcaccttggcctttgggcgctggaagaacgcttcatcaaacagttcgtggaaccaggtcatgaagccctggataccccagaccaccacgccgttcttcggcaggtgagagttgaacagtttgttggagcgtggagttccgttggagaacaccagctcgctaccttcagggaattgatagatgtgccctgatttgtagaagtcgattgcatggattggatctaagtggcgcatgctcattttacacgtcctgtattttcagttttgaatggaataccgtcggcagtgatgttctcccaccagacagtgtcggcatacacagcatcgtagatcccgtcgaacacagagaggcctttgctgaaaatgccgtgggtaacgaagagggtcatgtgcttaggctcgtgcttctgaagctctttgcccagctcaacaaacgttcgcccgccgtcacagatatcatctaccacaaccagatagcggtctttgatcagttcagggtttgtaatactcaccccaatgatctcgcctgtcttggtgtcgcggttcttatgtccgtagacaacaggaacgccatccagcgatagactgagggtttcagtcttcttcgctgcgccgccgtcgggagctaccaacacagcgttgttgccccgaatgaaccatcccaggtactggcgagcaatgtaatcttgcgggacaacatggacgttgttgatcagagaagacacaacatggctgtgagggtctttgatcgccacacggtcaaagttcatactattgatgaactctgctgcccacttcaccgaaagaggttcaccaaaatcgcaatgacgatcctgacgggcatatggaaaataagggatataagcatgaaaagttgtcagtcggtcgacattacccaggccgcgcacggcattcaccaacagtgccaactcaatgaagtctgctgacgatttaatgtgggcgtcaattaccactgtctggattttaccaacagggatacccgccttttgaatcttgatatgttcctcaccgcctggaaaggtgaagtgtttgtagaacacatcttggtcgttcaatctcaaacgaaacataacgtagccccatagtttagtttacatatgtattatactgcgatacacaaattgaaaccccgcacagggcggggttgttaagaccggagttgacggatttatttcagcagggcttgcagttcttcaacagatttgcccgccagctcttcctgctgtttcttcttgatgagttccaggataacctggttgtgctcacgtttttctgcagcggacaggctgtcatcgcgctctttcagcttggtgctgatgatgcttttgacgatgtcaaagcgcagttgcagctgagagtcgacggatgtattgttgccgatgaaatcttcatcgtcgaccgcagcggctttcagttcgcggctcagacctttcgccatttcgttcagagcagtcaggctcagatcccacacctgctcaacggacagctggcctttgttggagttgaaacgcagtttcagacgggttgctttatcaaacatttttgtatcctcaattgaattcggttatattttaacttaaaagacgactttgactacacgattaaatgaaccgcttaccttcaccagaacataattgcgctgagtagaagagaagcccaggccgctgagttgcttatcactcggttctgctctcattttagcgcccaacatttcaaaaaccttaccatgcggtgccaattccggcttcagatattcattgtagaagccgcgagtgctggccgggttgatacaaccttccaggataaagaacaggtggcggttcccggtctgttcaccgtcccagtggttcggagaattcaggaccagttgcaccttctggaaattctgggtacggataccccaaatttcagtttccacaccagtcgtcggcaccagggaagactgaatttcaacaacctttttgtctttgacgcgcagttcaacgacggtcatctgctgtttattcttcagacctttttcacaggagaaacgtttcaggtcgccttcatattccacctcaacgatgaacccggtgtcgatggtttcacgctgggcatagttgtcgacgatgaaacggtacacgccatcacgcagcatgttcttgtctttgaagaagatgttctcaaccggtttacgctctttgttgatcccatccataccgttcatgtcaatatccaactcaccgccagtatggtaagaacggcggcaaccgcgagagaaataaatgtgttcgttcgtcggagtgtacatgtgcaggtctaggtcgtcattgttgaaccaggccagcgaaatgcgcaggaatgaatcaacgttaccgccagcggctttcacgcgctctttgatggaatcagcgacttcaccgttgtaggaccaggagaaattattaccccatttgaacaggttcggagcgccttgagtttccggagcgaccagagacatcaggttggcggtatgacggccttcgaacatcacttccatggaacgcgctttcgggataacgtttttgatgaaatcatcgacgctgatctcttcgattttacccagcgacttttcagtcactttgacttcctgcgccagttgatcgaacggatccatagctttccgcgcatcgatatcggcgaacagcacgttgttgatcgtcaggtcttcatacttcgcatagcggcgacccaaagattcagtcaggccgagttcggcaaccgttttctgcgccttttcgatcatacctttggtgaccaaggcagtcgggcggcggtagttggtcggggcaactttggtttcaaaggatttcaccgccttttccatttcaacaccgtcagacagatcagtcagcagggtgccgatgacagtgttacggatgccaaacggcttatggtttttggacaaccaaccagttcgccaggcccaaagttgtttcagatcggagcgaattttcatgtattcggttttgctctgcacaaaactttgtacagccgaacgatgctcttcgccgcgatacagagaattctgatcgatcagttccaggacgatttcagccgattccatagtcagctcacgcatgctgcgctcaaacacttcaatggattgggaaatttcgcctttggtggaggcgatatcttcgccgcgcaggacgaatttattgttcagaacggcgtggaaatggttatacgtgcgcactacaccgccagcgcccatttcgtggttgctttctacgcccaccttagcagaatcgttgaagtagacgccgacgatgttgtgctgcttgacatatttggccagcgctgccgccaccacgtcgtattcgttacccagattgacgctgtcccacacagtaaccaggttcagatcagcgtcaatcgatacgacgccgccgatgttacggatgaattgcttgcagcaggtgcaatcgtgctcagtgcgctcacggtagatattgttggtgccttccgggaaagatgacaggtacagatcccacagggcgtctttgtcaaccgaagtcatgtacaggccattgctggacatcgcggtgatttgattctttacggcaactgcgaagggtttaaaatctgacatgatatagtcttcctgtttcagttcaaatgtgcgccccgattgaggcgcttcgttaaagtgaggtcaatataccccgattacagttattgaaaactttattccagtatcatattggctcagattatcttcccaccgtcacaaggccgggtatccccagagttgtatgccaacattccctggttcatcaatcttctaggaccagaaacagaattctgttttcttaacgtattgcaaaagcgcgtggttcctggataaggcgtgtacacaagacgaccttgcatacgagcttccagtaggaattcatctgtggctttgcgtaacttgaataatttccaactcatttcttcatcctttccagaagattgacagaactacggttgagaacaacttcgtcgcaacgctttttataatcgccgcttccgtcatatccaaccttaccacgaggcttctcaccacgcataaccgcctcgacacaacgggtatatttgctcagttcacagaacatattttccagctgcatgacgttcatgcattgatcttccggtgcttcagccgaccagaattgttcacgaacataaccatattgcccgtagacttgatcctggttatcacggagccagaagatacactcttcgtgggtcataccatctttgtccaggaacaacagatcaatcccggcgcggcaccccggcccggcgatagtgaaatggttttcactaaacggataatccgggttgtacgtgaagtcaacccaaacctgatatgccaagaatggtccgagaccttctactttatcgcgtaattcttcataaacagatagcggtgaattgaaccccaacaacgaatggaagaaatgagggttatgggtaacaaacgatttcaggaaccggacaacgcgcatccccatatgcggttcccacccttcgatgctgtattcacccggatgatcttccaccatttgttttgcgaccttgtaaggaaggacgtcaacaacacctatcccccggcgataaactttcaccatcattttgctggggctggcgggcttacctgttacggccagttcagggaaggccagacattgtttcagcccgcccgtgttgaaagcattggtgaatgtcacgccgccttttttgtcaaagtccgcaaaccgttcacgagttcgatctaaattgatattacggaaatcattgatggagaccgggccttccagaacatgctggatgggatcccacatgttgaacatacggaacagaaggcagttgaacatcttgtcggccagagacaggttgttgttctcgatgatattccggatgaggtgctgagactgcctgtcgtgctctctccggacgttacagaacttgacctgccgtagtatctcgttttctgtccagggagaaggaaggcgctggacgtcctttcttacgtggattttgtaacgttcgctcatccattcatacgacagcttacgatgaaaggggctgagaattggttcagctgatttgattttatctgcacggacaccgcaatattggatgtctgactgtttgtctttcatggtatcctcttcttagaatacgaaaacagaggccattatagcctctgttgtttattgaaacgctgagagtcttaatcgattcgggtcagctgcgtgacttccgggttgtacggggagtacacaaacacacggacgttcgccgcccaaatgccttctagcgccggatatttttcgccaccaacttggtatacggggacataactttctgtctggccttgcatgtcaacaacattttcgatagcaccaccagtttgctcgcccaggaaagggccgaggtcatcggtatgaaaataagcaacacccattttgtggtctacaaaaacctttcccttttgtgctgtttggctagaaatgatggttttgatctgttgttttgggctatccgtcaacatgtcactgaaatccggttcctggaagaccgccatgttcttcaggaatttgccagccggatattctttacctttccacatcacggtttcattaaccttgatgcatgcctgggggaattcgccttcaacgcgcagctggccttccgggaaaccacgggaatagtagtagtccagcgccgggccgacttcatcttcagaacggatgaacttgctcatgttggaagcaaagacgcgctgcaagcattcatcaccgtcgaaaccagcaatatgagctacgccgtcgttgactgtggtgatatcaccctgcgcatccatgatggctttcatcagatcttcagtagtggtcggcgtttcactttcccgaggattaagttccaatgtcagaactacttgatgatcgaaatacgccgcttccaggagttcgcgggtttcttccagaacgagtttcgcctgattgcgaattttgctaaagtcgggggcggttacgtcccctttagcattaccaaaagccagattcagtctcacgttcttactaaatgtagttgtcataatatagcgactccagttattcgcttttggcccgagatgggcgaatgatatatttgggaaccagtttccaatcagcgatctgatcgtgtttcacaactttgatacgggacatgtcggcgcattcggttacttgttccggatgcagaaccttaatcatcttccactgctccagaagacgaatgatgcgattcatacgcaggacatcttcacgctgaaagccgttgtaatgcccatccagcataaacagatgcttgaaatggacgataaaatacttgccagatttgtggaggatatggcaggtctgatacagggtttcaggctcttggcgagtattaaccccgattcggctcagtgtttccttgatacccaggaaaattcccggtttatcttggttaagttcaacttcgaccatacaatcgacgatgctggcctcatcgtcgaccgcagtcagttttaagatgtcgagcgtattgcgcgccatgaccaaactccttcattaatgattttaactacttagccttgcgcggcttcgctttctcgttgctgttagacaactcaactttcttcctgatctcggccagtgcttcttttggaagaaatttgagatactctgatgccttttcatggctgatgtaataatactcagacaacatctgaatatcagggtcgagcggaccttttttggcccacttcccataccgcttgcgggccgggatagaatggaatgccatattccattgcatccacggcgtgaccttgtgaagcaaattcattcgctgggcgatgacaagagtatctttgttctgtgccagcccgcgccgggtcataaacggatcaaaagccttacgaacatcagggtcgtccgtttgcaagaggttctctttggtgttgttcaacgcacccaggaaatcgaacaaagacggagcggccataatcagctccacttaatgttgagcatgacgttggtcaggaaataaaccgcatgcagccaaacgtcaccagcctgtctgtgttcaatctgcgcctgcccgcagagagcgaccatatcgacgatgctagtcgtttcgatagcccgtggcttgtccttatcctgcggcacacagaaatggaagaaacgggaatagaaatcatcgccgatgtagttctgattatcagtcacccattggcgaacgccgtcccagttgttacgcttcatctcttcaaccagctggcgcataccgcctgcgttgacgacggccaaagcgcgttcatcaatttttccgtaggtggaggcattgtcttgcaagatgcccatgatcttacggttgtccgggaagaactgaggaatgatccgaccgaggactttcagatcgacttcgacgttttcagcagcaaggatttcagcacagcgccgcatgaactgtagctgcacttcatgtgcttctttgtcggtccagatgaagtcgatttcacggcagcgggaaaccagcggttcgttcagacgggatttggagttggtggtgaggataaacgagcagtttttgctcaccttctcgataatacctttcaacgattcctgggcggccatagacaggcgctcggcttcatccaggataacgactttccgtccgccatatacgctgacgccagtcgaatactggataactttgtcgcggatggtgtcgatgttgttgtccagggatgcgttgatcatcagcggcttgacacagccgatttcattacaaaccgccagagcagtcgtggtcttaccagtacccggtttcggtgagtagaacagcattgacgggatgttgccattaccaccagtgatatagccatggatcttggcgcggacgtcctggggaagaacgatttcgtccagattgtccggacgatatttgttttcccatgcgtattggtcaccaacgattgtgatattagacattacagcctctttagatgatgcgtttcaaaatacaggggctttccgcccctgcaacgatattaaagcaacagacagatattgaagattattccagctgcatgccgacgtaatagttgatggtgccgtcgaccgattggaaattgaccagctgcatttcagtgcaggcgcggatagtatagttgccttcgatcattttcaggttgacaacgtcgatcggcatggagaaatcacccagcgcagtttcgcccaattcaacggtgtaatcgttggaattgtcgatcgccggagtagtacccaccagacgggttttgccgccgctggcgaccatgcggacagttttgtggcccagggtagaacacgcgcggatcagctctttcattttttccggcgacacagttgcttcgaaatcaaccgacggcagatcaatggtatcagccggaacagtcgtcagttctttggccgagcgccagaattgcagttgagagttttcgcctttgagcagcacgtgatcttcgtacatttcgatcttaccgctcttgaaactcggcaggcgctggatggccagcagcttggtcaggtcgaggatcgggaattcgaacgggaagtcttcgtcaatatcggcgatggcgataaccgtcgatgcgtcatttacggtacgcagctttttgccaggggtcaggacgatagacggacagatggtttcaaagttagccagaagttgcagagtgcgttccgacagagtaatttcttgcatttatgtatcctcaagatatagtgaagtcaagtcatgttgttgacgcaatttagtatcgcccatttggggatatagaacaagtgttaaatctcttcgcgcgcaaattattaacgaaatagattaatctattaatttatattaatcaactcgcttcgctcgtaaacccctaatactcgttgctcgcaaagctcacaactcgtatagtacgacggatttgttcaacaagaaaggactttttaatccgaaaggcaaattattttaaattggtctaaacataacatgagactattatataaggatgcaaacaacacgagacgaatagcatgaaacaactagtagcaatctatgccgtagggtacagccacggagatatggcaagccggaaattgggtagtgagacaacaaccactactcttttgaaagttttagttgatgaaacgaaatcagacactgccaaggaagtcccattctcattcctgtcgggtaataccaagccagggctttatgttgcgatcgtcaatatgagcaacttcggcgaattaagagtgttccctctggtcaacaaaaatcaggcgatcatcaacaaaaccatcaagccggaactgttacaacgttgttgtgatagtatcgacgccttcctgggtttggttgacgccagcgaagaaggcgagccgacgcccgcctatgtggatcaagatcccaaataatcttccagcgccactcttttcaattcaacagggtggcgctctgttaaatagaatttgtatcgctcgtgagagtgacgcaacgcatgattgtaactcccattataactcaaattgtccaccaaatcccatatgagtgccacgtcttttgttgagtgctgacgcatcaaccgtcccagagtctggatgacgcggatatatgatttgcttgggtgtgccaataccagatggtgaagtttctttatagaaaccccttgttgcatcgttccataagatgccaacagagtaatatcctcaccttcttctatcgccctttgtatttgcatgcggtctgctgatttgacttccccgttgatgacaaatacgttgggctttatttctttgaggatgtcatacacgatcatcatatgtgcatcaatacgttcgaacatgatggcgacgttacccttcaatgttaaagccatcttggcgataagccggtttctaacttcgttcgatatcaaatattccatttctttctgataatcggcaccatgcatatcaatagcgtcggccaatctgtgtttcaattctatcatccggattttaatgtcagccgcatatcccatactgatcaggtctcgagccgtgatgatcttgtgataggcaccaaagtgggataccacctgtagaccagcaactttagtgttcgccaaagtgccagtaaccccaaggcgctggtctgcatttatacagttattgaggatatatgaaagtttatctgactttgaagtatgcacttcatcaacaatgatatcgccaaactgatgaaaccaatcctttggctggtcttgtatgccttgccatgtggaaattgtgataggcttgtcaatattacgggttgcgccttcgcatatggtttgtacctggtagaacgggttccaggattgtccatggctatattcttcgaagttctcgtacaattgtcttacaaggtgtacggaaggaacaacgataagcgtcctcagattactttcgagcgcttctcgcctttccctgtagtaacgggccatcacataaagaataaaggatttaccggcacttgtagccagctcgaggacgcagcgagattgcctcatggcagtggcgatggaatcgaattgatactgccgaacttcagcatcaatgtattccccagattctgtgcgaatttgtgttttcaaattattacagaaatcatggatttcattatcaggaatgtcctgtatatatttcaatgcaggatccacgtcaagtgaataaccgttggtcttacaaaatttgaagagttcaaacagaagaccgatgtcgatcaggccggaagatttggtaaataggcggacgacgccatcccatttgctgaaaggattaggctgaaagttgggatcttcaaatttgaagtaatcatttagttcttcatagatccctgcgtcagcatgcacacgcatacggacttcgttcactttggacacagaaatgtcggccataccaatcctcccaattatatggagtatttagcggtctgcccagattccattctgttccttgtccatacggtgatataaacggacgcgctcgaacatttttgggagaatatcttttctgtcgaattctattactgtcggcagtaaaccattctcattggatatgatgttgatgagacgctcgattttgacattaaacatctgttgaaacataactgaatacagacacaattggatgctgtaatcctctatcatgtccctggttttcagagtattggaagtcttgaagtcgataattgctggggttccgttgtacaccccgattaaatccacacgcccggccaagcccaatacttcgctatatagagggatttcttgagcatatatctttgtcatgcggttcagatagggaaacaattgcatgaacatgaacagatattgtccggcggcggccacaacatctttcatcggtgcattcttcagatataactcacaagcaagatgcactgcctctcccctgtcagcgcatctttgagtttcagctgcggcttcttcaactccaagcctttcgacccaggcatccaaccatgtatggtcactggtacgccccaacattgttgttacagaggttaacttcacccctgttggggaaacgtaatggcgtccattctcgttcgttacacaagtcagctccttgtacggtaattcgtactgctgaaatgtatattgacgttcctcaatattgttgatcttcttgagtacctggagttggctcatccttgtttccttttaaaaatgatccaatctaaatcttctaacgggttccatccagctttaaatctagctatcatactactacaaactccttctgaaatgtttgtagcttggctaagtttagaataacccacattatgttctttccaaaaacaaaatgctgtgtctgcagataaccacattttcacagtaccatattttatagccgatgggttctcccaaggaacacaacctttcatgggtgaagattttccataccaataattcttttctccagcattcattcctgggaatctgcggccgaacataggatgttctttccctgttttgcctttcatggctccgactttcccatataatggatgtttgtccccagtcctaccgaacatcggatttcgttccgctggtaaacttgtggtgagccaaatatctttatcatcatcttggaaatgtcgattaagtaatttttctgatccccaaatatcttttatgcgtttttgttctgtcctgtatgcgtcttcggtagtgttgaatatttctatatgttcaatattaaaataatcataaccaaatttatcgattaaggagtgtacaacttttgaagatgtgaaatatgtgacccaaaattccctcgggtcgcatttcttagcagtacgagaaccaatataaatctcaccatatatggatacgattcgatatacatatggtgttctgtcacatgccatcgagatatttcctccaatctatggcgtttttgacttcataacccagcttgttcaaacgatccaaacaactttcgatgaatttcaccttcgctttctgttcttgtagaagccctgacatctcaacatacatatcatcggcctgaacccataaaggcagatcagttttcagtggtttgttgttgagagggcgttcgcgatacgattgcgcaggtaattccccggcataatacctgcgcagataaacatcaatctgtttaaaccgcccagtcagatattccagataacgcccttcacgaatgtaatgccgctgcactgtcataaaggaacgtccgatcttcaacgaaatctgatctaaattacgatcagctggatcaaccgtaatcagtggatccagttcagccatgatgtcctctatagacatcgtttggtattgagtgttgttaacttccataaaatattcccaccttttcaactctctctattataactcattctttatcaatttcgcggacaacacgggtcggtgtcagtttcagatacttgaaagtcaccgttgtaactaattggggaacagaagcgtccacatcaacaagaacgttgtccaatgcagtcgggcgggcttcttccaacagaagttgcaggccaaccgggcggttcatgttgttgagtaattctatggtgatgtctttgctaacagccatatcagcggcggcgttgctggctatccagttgtagatggtttcccagtttacccaatcctcatcgataacgaacgtaaatacgatgggatcatatgttaaacgttcagaagggatcgtgttgagcactgaaccgggcgaaggcccatcgatgccctcggaatacacgcctggtatactaaaatcgtgtacagagcgggataacaatatcaggtcaccgatagttaagcgccacttatcggatgctgcataatttgggttgtcatgtttaaattggactgaagtagacattgttagcacctttaccgtggagaataattgtgtccctgatgcgcggaatcagaagatggattgtggtgatttttatggtacttgtgttgacaagttgccgtattttcgtcacgcccatcatttccgttagtgacctctgggatactgatgtccgtgttgtaccagtaaccatttcaacagacagtaacaaatgtgaaaaatccatgctggatgaggccactattttgtttcaaagtttccaaaatctccagcctgtcggttgttttgataataaagacactttgcgaccatactggaaaaccaccatccctcttttacgcaaaggggaagaaggcaaaattccttacttgtcagcaagtatttattactcacagaacaacagcatcatcatcacattcaacccatctttctacgacaaaataaaacgttacaccatgagacagggagttaatctgaccacggatataactgttacatttcaaatcacaaacaacacgaagaaacctgtaaggatagcaacacaaggtgtatttgtgaataatgaagcggttggaaatgaaatgaacgtttttgaaattaagcctggtgggaagatatggattaggttgagcgatgtaggcgtgaactcccttctggtggaaggtattgagccagtgggagttctgccagcaaggactgtgccctgatcatttcagggcatttttcagatcattagaaccgatattgttgatgacaccgccagcgcaaatatcttttgcccattcaccaagaacattagcaaaggagaaattaagacacttcttcaccatgtcttcaatatgggctaactcagcagctatcccatcagtgatgttctgaataacaccattcacctttgctacagcgtcattgattaatccgttgacctgtgaggctaatgcctgtattttggccaaccccgccgccgcgccttgtttggccagatcatacagttcttggattttgtctgttattggagataaagcatcctctattgcagtcaaccattgacgaccgagtgtctgtacgacaccgaatgcgttgtttatcaaatcgcagttggtgggttctcgttcaatacttttgaggccggatttataggatactgaagttccgatcctattgtatgcctcattaacggtctggtcaccataagaattcagagtcccgatcccggtgttggcagtcccgtacatggtgttaatggtattgagtttagcaggagtcaaaccaccagcggttatcgccgcctgaacggacgtatccgggatgcttgtaatgcctgctatactttgttggccactggtgattaacgtctgagaagtagcagagaatcccgggagcgggttggtaaaggcgttgccttgctctagtgcgtcatagatttgtgcattcataagaaaatacccccaattgatgggggtatttaaatcaggggaggcgatacagaaaattgctccagaaacggacagcaaatttcttagcataaaccagtttagacgaatactggctcgatgcgagatcacggaaggtttcataaccgacagcaaccaggaagtacagagtgaacaaatagcaaaacagttgaaaaatgatcatgggaagtctccagtgttaacaaattacagaaggcgtttggtttttggcttacccaagagcatgaccttacaatacaaccctgctttgttgattcgtttgatcatatcctgtgtaccagtcgatgaaccgtcccagaaagccagaggcagtatctccgccttgtatttctgtgataactccaacgccttgtctaacatgtcctggttgcgtttgtttccagcccctttcccatatgtagcgaagtattcatcggggataggcatcccaagataagtcacccctctagactcagcccaatctttgcagatcgtatcgacgccgacagcctccccagcgatcaatagggtctcgcacggaagatacagattacaaacggaatctgtatgagaaagttcgtctaacttttcaaagattttgtcgcgctctgtaatagaacgcgaaccagttatgagaataatggtcttcatttccaattctcgaagttgctcaaaacgaagagattaagcaaaggattactacacggcatgggttcaatatcaaccccaagttcacgtaattcacgcaaaataacataagtatcacgatgagctttggccgaagtggcaggtcggtaaaactcaattgtctccctgccatctgataccgccgccgctatacgataatggatagacagacgatgtttatgggattggtctaaactaaaatctaaaggtggtagagaagtcgctatagttttgttcgccatggtgaagcctcaactatttgttgatggtataaaacgaatcataccctgatagaatacattgaatacttacgctttattcagcagatccgtcgcccatcccctttccccgtttttatacggctttcccgctgcaatgcggtctaggatgtgcttggcaaatctggtcgcatcttcatctgcgtttttggggatataacgctcacggacaccgcgctcattcttctcgccgtctatacccaaacagagaacgtatgtttcaccgatatacagggagtacacataggcacccatttggttcgcttttgcttcaatgataaaccgaggatcgatggccagaggggttttagtggttggtgtattgttcatgatatagttccttcatttcagggttggtgtcgtactgcttatgaaatgaagtatacggggtttattgaagaagtaaaccccgtttattgaattatttttaaatctatttgaagcggtccggaagggtatcgtgaatttcagctgataacaccaagaatttaccgtccaaagtcgggaaacaataatccttcccaacacaacgcatgtgctcagccgtagccgcaacacaatcattggtcacatcaaccttttcccctacccacatgctggttttggtttccagggtgccgtagaagatagtaccagtcagcgggctggatccgatctttttgatacgcatattaatagccctgctcttcataatgatcttcggcacctgtgtcatcaccgattgggttgtcaaacccgtatttgacagcagttgctttaaacagaggaaggccgtacatcgcatacgaatcaaaatcttcgaggccttcttcaaggatacagttccacatttgtacgacttcgtacataaggctagaactaatcccacgatgattcagagccttttcaaacccaaaggcgacgtccttttccagttgtttcaggatattttctttggtgaattcaaccgggacatgggattcacgtttttcaggagatttaaaagacagtcccaggctttcaatttgctcaactgtcaaaaactgtgccagacgggtcaaatcgcgaccgtctaaagccgccgacaaagttcctgttttatgaccttctaaaatttgttcgagagttttcatcatttcaccttcaccaaagtgggcacataacacggatgctcttcacaggacatgaacacatcgtaacgagaaccagataccaggccaggcaaattgccttcatcaaccatcttccggacggtttctctagcattgtaccaactcttggctggatcggcagtgacttcagaacgaaggaggtggagttctccattggaataatacttcccactttccttcatgtaatacagattgacggtcaacacctgggggttaggaatttcaacccaaccacaatccaggagatcccgtacatccgccacatatctttgggtgtcgatatcgcctgtcggcaacaaatatgataaacgcccctggaacccttctgtcttttcgtccagatcagttttgaagaatcgtttaccgcgaacgtccagaaaaatgaatttatttgtcatgatatagatctcgcttcaaagtgatatgtctttttcaacatcttcctgtttggctatttcccaacggaccacagttccatccggttgggtaatatcgcggttcaggctgcattctggaaggtaaaggaacacattaagatagtatcgagtttcacctttctcaaacaatttttgagtcgtgatgatttcgacctttgattccatcccctttttatccagaaagattttacgaattagtgtctgcatcttcccacccccattcgtcttcccatgcctggcgcggcgttttgccgttgtcataatcttcacgccaggcatcggcatcagctgctgaaccgccttgagaacgtgctacgcgctcaagggtgttgtgccactcattgaaggttgagttggcgttggtagaaatctgtgaattgtcttcgcgggccatcagttgttcctcgtttagattgtgggtgaataataattgaaatctgtttattgaaaagttaagagtgcaaaacgtgtgacatcgcagtgttcagttgcattttaagagttgcatactcctgttcaaggcaacgggcagcgaatgggttatttccgcactgagtggatagagattccattatctctatttgtatctgtaattgcttgatccaagcctttttatcccaggaatgcccggcgcgggacctgaagcaatggtatcgtttagccaaagacagggcttcagagtttgagatatttgagtacataaaaccccccaaataaaagggcgcaactgcgcccttcttttaaatgccattagatgttggaccaatttccttgaccaaatcagactgggggtggtaagaattccccagcgctttttctataaacccgatatattcaaaaatttgctgtatgacggcgttcgttttacgcccgatttcatcatacacatcgatgaggttggaaggtgccgcagcatcctccgcttcttttacttcccgaggaggttccacataccccaattggaacgccacatcttccagccgattacggatgtaagtgatttgttccagattgttgccgaacgctgggatcagggaagagattgacaattgaatattggttgtgttcatgatttgatttcctgtttgttggaatggacgaaaagagcgcgggattggatgtaaccatttggagtcaaaacgcagagatgagtatctttgcctttgggtgtagaaaccagatctaatctttcgcacaaccctttagacaacaattccaactcaccagatttagacggaatttcaccagcttctcttggcccaaaccagaaaagttggtatagaacatcaattgctgctcctgacagattcatgatttgtttcctcagtgatagaccataatataatagcactgagggcgtataaagaaaaaccccgccacgtggcggggtgggttatttgcggattgtcacgatcgcgtagtagcggtcataatcaccaccatatgggtagctgctgagggtgaatgacaccaggttgtcgccaaatactactaccttcaagtcgtgggtggacagggactcatccacccggccacacactttgttacagaactcgcggacgactttttcgtacccgttcaggtgaggagaggtcaccgtagttgggcctacgtcaccacaccaaatgcctttgatcattttaccctgacggttgcgagcacatttaggagtctcatacagacctgctctcatcttcatgctgccgtaaccgaggtctttcaggattgcgttgatttcagatttagtcatggtgtagttccttcgtttcaagttggtgtattactgctatggattgaagtataaggaaggttattgaagaagtaaagtgattcaataaataaatttgagcaaataaaaaccccgccgaagcggggtttgtaagtcgttgtttctattagaaaagcgacttgattaagcccttacggaaataagggttactatcctgggcaatgccatcggaagtaacgtatacttgcgggtcttgggtagccgggatctgtacgaacgggttcgcgcagataccgtaacgggttttgaacgccatacgcggtgcgaaggtgctttcaccctgggtgcggtacatttccagcggcacgtaaggtgcgaagaagataccagcatccagcgcggttgcgcctttgtacgccagggtgatatattctgctactgcatacgggtcgatatagacgcgcataccgttggacagaacgcccgcaaaggtctgaccagtcgggtcaaccgccagcttggtgttttcctgcagaaccggagcgtaatccagcatgccggacattgccagcgcagatgctacgttcggggaacacagaacacggttgcctttaccacgacgggtgtcaacgccgatgccgttcgcttcaacttccaggatgaaggtcaggaatttccatttttccagcgcccaacgaccggagatatcctgagcgatgtctacgataccgttggtgccgaattttttgaaacgcactgcgctgaagttcatggtgcggatgaattcgcggttcatttccgcctgaatttcagttaccatcacgtcggacagaatgttgtccacgtcttcgccgtggatcgccatcatgtcctggcgcagttcgtggctgtaatcagcgtacaggccgcgagatttcgcagtaacggtcgctttttgaacggtgataccaacacgcgcccacggattggacggagagcccagcagttcagcgtcggtcgacggcatacctttaccgatggtggtggtgccagcgccggaaccttcgatctcagcctgggtgaagccagacgggtcgccagcctgtacagtaccgtcaccagaataaccggaatcggcttcctgcatgaacagttctttacgggactgctgggtgttagaaccgtcagcaacgccctggcgagcacgcagtgcgaagatctgaccgtccggaccagacagcggctgaacgccgaagaagtccatcgcgatgttgatcggcgccagacgttttgccatatcgatcagaaccggttgccatttaccgacagtagtgttcagagaacccggcgcttcggattcgcccaggtttttggcgttccattcggcctggttctgcagcaggcgaaccgcgacgttttctgcagacagcggctgaatagatttggattcttcattcagaaccggcagccacgtttcgcgcatttgttcagtaacaagtttcttagccatgatgctcattccttacattgatattcagttaagttgaaattacttagtcgttcaaaatcaagcccccttttatagagggctgtggctgcaaaatttagcctttcagaccacgcatacgacggtattcttccagctgacggctgaccgactctttcagttctttgtcggtttcatcagggtcatcgtcgttgtcgtcatcgtcatcatcaggatcgtcgccttcttttttctgttttttgccttctttgatgtctttttccttatcatcagaagatttaccaccttcgttgtctttaccgactttgtcagtaaagtcgtctttgttaccttctaccaggttgcggaaggtgcggacgcgagcgccgaaggaagaggcgtcagaaaattgaataccttccagaaggccaacaacgacttcttttttggtactgaccatgccttcgcaaatttcgtcaatgacgttattgcgctggcggatactttcttgttcgcggatctgtttcagctcggattcagaaatgtttgcacgtttttctgcttccgccagacgatgagtcagggccgcgatctggccgtcggtgtctacagtaaattcaacgttggcttctttcagcacgttgaccataccagacaggaatttttcagccgcttcggttttgatggtagcgtcaatagccggagcatttttgttcgcccattcttcaaccacggcattcaggaatgcatcaactttggtcgccacttcctgaatatgagtttctttcaggttagcgatttcttgctgatgcgcttccaccagtttcagacgttcctggtgggcaacatgttcagtctcttggatagcctgaagacgggcttcgccgactttagcctccatcagaccgctcactttgtccaggaactcggtgctgaggccattaacgccctcaaacagtttttgtaattcaggtttcatgataatttccttctgaacgatttttcagtatttagtgagctgaaatcaacccaattttttaagagctaaatcaagacggcgcaggaagtcgtcttcaagctggctattatgtttaaccagattgtctacaacctgacctttgatgtcccgaggcatccagatacccgaggattcatcaagttgccagtctacagattcgtgaaccgcttttacataacaaacttgtccagaaggacggtcgacagcatcaacagcggtaagcatgaagcccggcttgacatcatcatagccgttaacttctactgtctcacccaggccacgtgtagagacagccaggttgaagtccgcatcagccagagcacggatgatctgacctttgggggtgtttaaaatacgcgcccgcccgattgcattgttgccttgccacacgagtgactcggttttgagggcggcatgttcgatatcaggaaatggatagtcaggatgcttgagttcaccgattgcgcgacgatcttgaatgtattcccggtcatatgcttccacagcagggcgaccgactttttcaaggtcgtagttgcgcccgttgcggttaacctggttacacatcacaaacggaccttcgatgaacatggccttcccaccagtggaagtttgcgcttccccgatctgaagttcctttcctatcgccgtgatctcacgcaacagtttcatcatttgctccttacttactcagtcccatcattttacggaacttcatggctttctttttacgccgctcgactttgcgttcataccccagacccatacgttttttggcgcgtatggctttccggttgcccagtttacgggaacggcgctcgctggcgttcatgacttcacaacgagaaccatcagcggaaagtttgaatccgggagcgcattttaaacgacggcggcgtttaccttttgcgttcactttatcgatgactttctgttcgtccatgcgggaagccaggaaatcagcgaacgtggcaatttctttgatttccatattaatcacctattccgcgccagtgctgaggtcgtcacccagggaattcagaacgtattctgtaccctgagcaatcagttcttcacggcgggcatcaagttccataccacattctgccgtggcattttcgatgtcaccatccagtacggctcgaacaatatcgatcgcgctcatgattgtatctccgaagttaattttctatatttagttgataaatttttactcttctactccgccgggcgtaccctggaaaggtacgacttcaggtcgccatttcagcgggctaacatcttgtccactaaacccaccgctttcatcagcctgaaccttcggatacattcctttatctttttcttctttgatcttctcttgctgagccttaatttcttcatcagacatacgcataatgttccgcatcgcataatcaattgagaagaatgttccgatataaggctcaatcccagtcagggcactgaggcgaccagcaagcatttcattttcttgctgttcacggataaaactgtctgaggtgaattcaaacgtaacaaacggttgaattttttcaacccaatcttgttcgtcagtaatctttttcaaaattaactgacgacgtaaaaattcagagaagaatttagaataacgacggcgcaaacctgcgcagaatttattgaaccgcagttcttcctgggtgatctcagccaaattagaaccgccaatattgatgctcccttcttcctggatacgactctttggaataaacagagagctatacagtttttcaaggaagtaattgacgtggtccatctgtcctaattggtcgccaccaccgactgttgaaatctcagtggcgttctgaccttcacgacgaggcaaccagtagtcctcagcaatccccatcagatggctgttgcccgtaatcttaccagtactgcggtcaaacgccagacggtttttgaatttacccatcatcatagtcatgtattcttcggcagatttcttaccgagagtaccgacgtccagatagaatgcacgtttttcaggagcacgggtgatggcgtaaattaccgtcgcatcctcaaccgtaaccaggttgttgagcgggcggatagcagggttcagcagaccgggaacaacaccatttgccaaaggatcttcaccgctatcaacatagacgatactttcttcgtcaaacaccagttcctgttgagacggctggaagttctgagatgtcccagattgaccagtgaattggttgcggttgtagttcggattgtagtaatacttgagagtgaccttttcgattgcctcgatgccgccttctcgcattgttttctcaacgacgtatactggacggatgcaacgagaatcaagcatgaccagcttctgaatgccgttacccggcttggtcgggtcagttacaacatgatatgcctgacggccttcaacataccatttacgaatcttctgatacgcggtgtcgtcaaagtccagcaaattcataatctctttgaagcattctgtgatttgttctttcaaatcttcactgatgccttcaactttatcgagattgatagtaaccggcgtttcatcttcttcgcaggtgacaacgtcgttaataatgatgtccaccgctttgcggatttcaggctgctgagccatggactgatattcttcaacaagctgtttgacattaagcagctcgctctcaacaccaacataattgtaagtgttggccccgccctggaggatgactgaaccatcctgagcgtcgtccagagctacaacagtcgcttttgaaagcagcttctcttcttgactctggacatatttgtccgtgtcaactttggcgtcaactaaaccgccgccgctgaacagaccaaagaaacctttgccgtatgccatgattatatgtcctcaacgttttcttgtaattagtggtggggaaataaattcccccaccacgtgtaacgttagagagacttgtccgaaatggcctggaagtaacgcaggtcaacggtgaactgagtataggagtccatagcagacatatccagttccagctgaccgaggttctgaggccagccgccctgcagcgtccaggtcttggtgacgttgtcgttagcatccagcagttccatgatgatgtcacggaaataatcatctgggttagcagacgcacggttgttgttgctgccgttgatatactgctgccagatttcaaatgcgttgtacggggcgttgtctacaacgttgatgaacgttacaggcagagcctcaaaacgacggtcgccagggaacggcagttcacggccaccccacggaacgagaatctcacccagctggcctgtcggggtgttggttgttacagccaacagagatacgtcacgaatggtgtcagaacccgctacgaatgccgggaagtttacagtcacacgccagcggtgctgacgttgaacgccgcccccacgtgacatggccgcgcgaaattcatttactgtagccattatacattctccaaaaagagttacacaattctaattagtctgttaatcttttgatcgtcaatttactgagatcaaagccatgatcaacattgttccgtactggttcaatctcacagagatcccaacgtggatcaattaatgagaccataccaatatgttctccagtggaggtcaatttagcagcagctttaccaaccagatgacttccatcgttaccgcctttattcatgttgtagcccaattcataagaatcgtattgagcaattaattgcttttccaattcccatttgtggacttcatcggtttgagcaataatcacgaaagtaaaagcagaagccccatatttgcgcatggcatcatacaattcactttcaacattatattgaaatgcattggccaaatgttgctcatatcgcctttgcggatcattggtcacaccgatgtagaccttgttgttagatatcatttcaattttgtatgcaaatatcatttcaaatctccgggttgccgatattatttaccccgaagtaaaaccccgccgaagcggggtttggtgtcttatgacgctgcgacaataccgccgccggattcgatttccgagaattccatgtccggacgaacggcagcaaaatccaagtagacccagttgatgctgtattctggtttcagccagataccagcaaccatctggttggcagcaataacttcagccgggttattgtcttcgtcacacttcactttgccatcatagatcgcgcccatgttggccagctggcggatataaggacgaacggcgttgctaaacaggctgcgagtgaacgcatcgttgttttcaccaagatagtatttggcgatggcagcgatgttttgttcagccatgatgaacaggccgcgcacgttaatgcgatcgaacgccgacgggcgggtcaggccagtcttatcaccgtacagcacgatgccttctgtggagaaggtgacgatgctgttgatctggttgcgatacagcacggcacgttcatcagaagacgcagaccacgccatacggttgtaattgttgtatttgccacggttatggaacgccggggacttatagataccagcaatctcaatagtacgcgcccacagacctgcagtaccgccacacgccgggatccagcgcattttgtcgttgtacttgtcgtaaacgtatgcccagttgtcatccataaagaaataggaagaatcgcgcaccaggctttcacgccaagccacaacatcatccatttcacgaccacggttgccgactacaacatcacgcagcggcgacacgaaggacactgtgtctttacggttagtcgacagatcgatgatagcctgctgttcgatcagttcttcacagtatgcgaacacaggtttagcatcgtatgcttcggcgttgttcagggcttcgatagcagcgacacggttgacgtcgtaatcatcaacgccaccttcgagttcaactacacctgccgccagggcattagtgaaggtgtaaacccaattcgaagtgttgttgatcacgtctttgaagtacgcattagcaccatcagactttttcgcgccttgggtattctgcatcagttcatatttctcgatgatcgtaccagaagcaccgatagtagtgatgatagcagtcccagtcagaccattggcatcaggaaccacggtggtaacaggctgcgggccgatagctttgtgtgtcagaatgacggtattcgatttcacaacaacgctcgaataaacatcagtcagcgcttccatctccaggccgattttagccgccagagttgctggggtatccgtctgcagatatgcaacagattcacctgctactgtgatggcgccagcggcggtagcagtaccagaaatagaaatacggtcaacctgaccaacagcgccggaagaatcggtgatacggccaactttgtccacaataacaacgtggaattcgccagcctgaggagcataggcaaagttgttacggaattcccaggtcgggaatgacgcagcatcacagatgttaacggcgatatcgttgcccagggaaccgggataacgaccagtccacgtgatagaagccgacgggcttgcggtctcaaagtccagtttgtttttgatgaggatcgcgctctgacctttagtcacggcgttcttggcagtagggccgacgatacgggtcacccatgcagcagaactgtacgacataaagtcagcgatgaccagaaagtcgatcgcggtatcatcattcggtttgaagaatttcttcaccagaccagtctcaccgctagtaaccaacacgggcaattctacttcaccccattggaatttaccagcagacgcgccctgaacaacaacggacggagacgtctgaagcgtggcatcgcgctcggtccactgtacagacggcgcaacgctgaaacttgtagttgccataacattattccttctcggtagagtttcgctcaatttgaaagatatttagtgatcagttcttgaaccactcttccattgacatcccagaacgttcatcaaatacattcacacccccaaagcccggcatatgctgtacttcatgaggggtatcaccagtaaatttgcccccaaacgggaggacttggtgttgctccatcgcattcatacgaccgcgcatatctctcgaaatgctggtgtcagttaaatcactgaaccattcctgtttcacggcccatgaatataaaacaagtggcataacgcagtcatcatggcaaccctcgtctgcctcataacgggtcccggtaaacacgaatgtactcagttcatcaatcgtatcctggtcttctattaccaacatctctctttcgataagtgctttcaggttagcacaaccgatagagcgaactttcttgttggtgttgatccctggttcaggacgacgcccgccgatcttcttaccagtacccttattgtctgttgacgtgaacacgatttccggatattcaatttcttgatacaggattgtgatcacctgaccaccaacatcattgttagtctctacaagcacaggacattcaccgtattgagtacacatatcggcaatcgtgtatgcatacatcattggcggtattgtgttgttccggtatttggctgcaatcgtatgaggatattccgtgatgtccaatatggtcagcacagagtagtccccctcaacccctttgcctgtatccgcaataccaaaatatgttctggttttgtcaaagggtttgtagattttggtgaactcgttaggctcctgatacagcttggatgtcatcttgtccagacatttcgacggtattaatgaaccgacagaaccacggaacttgataccgaattcctgatcgaaacgagcgtcgccaagtttggcacgttgtttggattcccaattcgggtctttggtgtacgccggaaccctgtaccaaggaacttccgtaagattgaagtcgttgtattgaggatgttctgggttcgccttcgtgacgatgtcgtaaaatagcccgcgctgaccttttggtgtgctggtgagaatacacttcgaagtctctgcctgggcgatcgccgggaaagttgattcccagaattcaaagtcgttttcgataaatgcgacttcgtccacatacaggagagatactgaacgaccacggatagagtccgaggaagtcgcgtatgcaaatatcttcgaaccattctcgaattcaatcagagttgaaccaaatttctcacaaccttgctggacgaagaatggcatgtcctgatatgctttacgaatacggtccaggatttcaatagcctgtttctctttgttcgcaagaaccgcgatctctttgtcagagttgaacatcgcgtaccagaggagaaatgccgccaccactgtcgtattatggctcaggaacccattggtgtaataacgctgctcagatgatttcacctggaggtcaaacatgtggtgagattcgccggtttcccaaatttcagaaatacattcaaggccatcttgcgtcatgatggcatccccggcttccagatctttggcgaacacttcacggtcgtattcattaaagaataaatgttcgtccgcgacatgaatcgtccggccactttcagtttttaccacatattctgcatattcttttgtcttgtgtgctgcgattacaggaacccaaccactgtcagacttcacaaagtatcgtttgccgaagcggctgtctacgaacttattgtgtttgccaatggtattcaacggctctgcatggttaacgtcctcgaagcggctgtgaagctcctctatggtgatagagaactcttcctggctgagagtatcgtaaacataaacttcagaatcgccccgaacacatttaccagactgacgagcctgcacaacagcattgaaccgatgatcctggaaatcatggaacaactgcttctgataatcgtgcatgtcgaacaagataaagccgtggtcgatagtggtaatcttgtaatagttcgcagcgaagtagtgcgcgtccatggcacacttgacatattcttcttcctgctcatcagtaaggactaattcaacacgaggagcacgcacagtcggcttgcgcatgaatgtttggtccatacgcaatttgacgtcttgaattttgaaacctgttttctcaggtgcccaatctatttcttttttataggccatgatggcttctccactgcaaccacttagggcattcagaaggattccaaccacctttgaatctagcgattattggttgtatggaatttatgtatcggtcattaccaaagacctttctacacaacacaacccctttcaatccagacagccaagcggaatatagaatatcagatttcaaatagaatgggatattttcttcattaaatctattcatttcccaaggcattaatccaagtttcttttcactcatagccttcttagattcttctgtatgagatttaccataaaatggatttaattcacccaaatttttccctgtgttagacttagaaattttatcccttgtctctttggatataattgccccagaacgaggatgcccttgttccttccacgttttctttaaagagtcagaagcttttgacctctgttcttgactaacaacagatcctttgttacgtttcgaaagtttctccctaacttccttcctgaacattggattgtctgacttcatcctttctgaagataatttgcttattttagaataaaattcttgtttagattcttggtataatctagatgttctcaaaacacccatagtgttcttcatacaactgaacgcgaacagcatctctctggtgttagttattttccaaagaagtaaatggcaaatgaaatgtgctttgggggataatctaaccaaattacccttatcttgggtgaaagatggatacaaggatttagggagaatatgatgaacttctccgcctgtttctaccaaacctttttggacaacaaaattgtatcgcctgattaggcgatacatatctggataatccttttctaaaatattaattgccttctgatacgccatcgtcctcaccctctgacttctcttcctgttttggttcttccgcgacgtcaattacttcttcatcgggattaacacgagaatttcgattggcttcggcatcacgccgaactttctcaatcatctggagaagatctcttgacgaccgagcggtcttgccgactttgactgtagtcgttccattttcatcttcagaaacctcaacggtggtctgtcccggcggctctttgtcgcgagtaacatccttgatggttttctggttttccatcaggtctttattgagaccacgcatgagttcacccagctcgcggaagacgctgaatgcacgaggagcctctgtagaagcggcgagttcagcggccttgcccatcatgaacatcgtggcttcttgcatagcatatgtggtgtcacgaatacgtttgtagtcagtcgtggcatcagtgtcctcgtattcaggaacttttgattcttttgatgcgacttcagacaatgatggcggcatctcgaatccttgatacccttccgggggatcacctaaccactcccccgtttcttcatcataatcaacaccgggcttcaatgcggttttcttcatcgcatcttgagcaacctcatctcgtgctgagacagcatctaaggtctgtaacaaacgttccgacatattagacataatcaatcatcctctggatggtggacgccgtctttgtcaacagtaaaccaaagaggcaattccgtccacggtgtattcaaatcagtagacatttcgataattatttccttgataacgtttggatcaccagtaccggaaccgtcatcaacccaataatcccagccatagatagcaccatggagctgaaacatgaaattacaatcgacatgaggagattcagcagcatccccttcccagttatctgacatcgtatggctcaccaattggatcttcacaacctgatcctgcttgagcgtttcgttgtcctttatctggcaatctattgaaggggtgtaaacagaataaatctgttcgaggatctgaagcatttcattcatcttctttgtacgcacattgtattcaaagtcgatgatgattggaattcgttgcttagacgtcgcagtattagtcgccaatttgttgtgatacgaattcgttacctgtttattgatttcaaattgaccgaaagacatcgtcgcaaatggtaatgcattcgccggaacatttcggttcaggtcattacgacgaccaatagccatgtgtaacgggaccttcataagaccgcgctcggttttcacctgaacgtcagacataatagcgttgaacacatggatatatttcaggagtgaaccatggtaaaaataattctgaaaaggtctcatggttattctccaaagtctattttgacattattggtagacagatcttcttcgatctcatcagcaaactggttgtctgtctgtagggtggcatcctgataaatgccatcaccttcaagatcttgaagacgtttatcaatatcgtcaatttcagggacaccagtatcgaagtcttcgttgccatactggaacaaggtacatggtaatgaaaacgtgtaccatttaccgaatttcatgaagtcttcgtcattattcggattgttgaccttgaatattttattcgccatcggaagataaatgagatccccttcctgaggttgttgatccagtcctggcccgttgccaataacttccgcaaagcggcgacgggcgatagtaaatgtcacctcatcttgtagctggataccgccgaacttctcccacatttgggtgttgaagccctgataatcctgcatatagacctcaatatcaaacgcctggtcgaaacggtgttctgcctcgtttaaaattgggtatttttcataaatggcgcgtggaatatacttgacgtcgatcccacgtaattgtatcatctccaccacgaggtcatcaattaacttctgcgtgccttggtggttcgtgtagttgaaatattttgaagtggccatgactataccctcaattttgaaggtatttagtcgatgtttaattctattgaggaattgacgaatgcaggttgaagacatcaaggaaactcgtgatggaagtcgagtaagaatcatctgtgtggatgctaaaatctcaggtggtgattatgatatcgtcggtttggtaaaacaatctgacgggaatgatttcattgaatggtgggacagtaataacgtccatgatgggtatattcaggcgacttcgctccctgggcctcgagatatcaaaatctaaaacaaagccgggaaaccccggctttttgttatcccataaagaagtcgatgggatactgctgaccagtacgcaattcttcctccagacgctcgatctcagcctctgcctcgctgaacatactatcgccgtccagttctatcccgccagggagacggatgcctcgggcttttttgagcacttcagcccaacggcgttttaccaatgcagtcgcgtaagccttcaaccacatatcattccacgcttcagtgttctcttccgctgttgggtcgatgttctggtagcatttgaacgccaggacttcatcgataacagctgagaattgagggtacagacggcgctggaatttcttgtaaacgaatgccctgcggacattgaggacgctggtgatatcggaaaggcgctgctgcatagcaacataatcgataagacggatagataccaaagcagctttgggcactaacatcgcctgagccatctgccactggggggttgcccagttaccgatagattcaattggtggcccttggataacttcgacaacgtcatcgatatcttctggaaaggtgatatatcctttatcgatgtcttcctgcttcacctggtaaaggaagaatgcatcttggctaccgtcgcgatggtactcccaaaacttctgtaaagcatcatcaaccgcgtcttcaacttgtgttttgtcgaggttgatctggatgacaggcgcacccaatttgcgaaggacataattcataaatgaatctttgtcccgaatcttattgacggccattgacaccctccttgcgctgtatatctgaaacagtcaggcgcaatgttctaacatcgtcagaaaggctgctgctgtttaatttcaattcagacacgttttgtttaacgtaggatatatcgttgttcatgacggccatcctttcactgagatcattaaccttaaccaaaatctggtcaactttcccagagtctttttccagaacattcacacggttttctaatccacccataaaccatacgaatgtcgcggaagagactaacaacgatgcaacggcagcagtcaagatttccttaacattaaacaagctgttattctgcgttgtcattttcgcccccgtccgggattgtaatcccgagtttttctgccaacattttaacggttgcttcaagctgatcaatttgggccgattgctgagcaatcttagcctctctttgttcagtatcttggcgagaccgaagcgccgccattccagcaacatggtcagtgcagatgattgctccggggcaagagctactgcgtaccattgatgcgtgcccctgtactttcattccacgcatacacatatcctctcaagagggcgggggattccccgccatttcaattttatttatgccagagcgatcaagcggaaatctttgcaggaaggtggggctatccggcttccgcgaattaatgctctgactttcagtgctgaaaatggactgctgctatcgacggtcttatcgtattcatattcaaagaatgcggaaccatcgttgaccagaggagaattcggtgtaaccgtttcccattcgatcgaatccatttcttgccctgggcgcagaagtttgacctgtacagtcatggtggactgagaaggcaacatcgcgccgaagtacattttcaaagttgtacacgggttgtcaaaacttacgtccttggtcacatagcggaaaacgtcctcgaaaggatctacgccatgcgagttgagaaccacggttaagtcatcaccatcaatcattggtgccgtgtacgcattgctcgcgctgcgagtcatggtggctctcacctggaagtccccggcctgacgataaatgccttctgtcggcagaggaacatcagtatcagattcaaactcggcccaatcagacatagaattggaagtagaatcacgataacgatattccagtttcaatatagaaccttccagggctgaattggtcacgctggcatagaacatatctaccaggtaattgcccaagaaagaaccatcttcaccaccaatctgtccatcgctatctgccgctgcaccaacatcaatcttgaatgaagtatagctcgcatccgtgacggtgtgaactttattcagttgctctgcggtaaagccgcagccgcccgtcagttcagataatgtcacagagttgcccgcaacaagaccatggcccggtgcgtaaactgtgaccaccgtagaaccattgacgcagttcaacacattcagaccaagaggacggattttaggcccggcgttcggagtaaatgtcaccacgttttcggcagcagcaaaattacagcgatacacacggaatttcatatctgccatttggtttggagaccaggttgaaccgtttgacgaagtgaagaacacgccagtatacggctgtttggcgatatattcattcgacagcaagttctttttacccatttctgcaatgtaagcattgtaatcctgggtgttagccagaagaacgatagcaaactctgtgccagcctgcagatatactggataatcgaaagtgaatttcgtcccgagggaagagtcattcgatactttgacgtcagacgggttcaaagttttccgggtgataacagtacttgccggaaggccattgctcatctcacggatttccagagttactggaacatcacgtgatttgcttgagaagaacacttccacgccttcaatgtattcaccaccgatgctggtcgccaccatgaaagactgtgcgataggatcacgccactgaccaacaacggcttcagacgacgttgtttcagatttagtcgatacagtataacccagcacacgtgtgttaacataagtcttctggataccttgtttcttaccaaaggacttatgaacaatctcggcattcgtcagagtatcatcagcagacttgctatccactggactatcagtaagacggaagacgttgtcgccagtattgaacttaatggtgttattctgtggaactttgaacacacctttcaaattaccgttggcatctgtcgtcaatggcgcaccgtatgccccaccgttcggtttgcaatacaggttcacatcccgaccagagaagaaggcatacatccgagtaaacggacgcaagccgctggcgtcaaagttgatttcgatcgaacgcatgtacggaataacctgcgtctcaacaatctgttcgccagaaagtgaagtcgtagttgtatccgtgtacgtgtaagtcgaaacatcacgagttgaaacggtcgtgcggtaacgatagccccaccaaacaccgcctgcaccatgcggttcccatacccgctcagaaacagacacggtccgccatgtaccataaaccgtaccttctttgacagcgccacgggtattgatcgtctcgttgatcacacgaggtgcaacatagtagttttcaaaccagtaatctgttgtcggattgagtttgaggaaccccgtccagttaaacacagcatatgggttgacgttgatcgttgtcgtcgcatattcctggttgacagaaatttccggcgtgtatttgcacacgaccataccgtccataaccttgtcccaaccatctgggaccagatcaattgcgttttgttgtacaaacggacgcaggcgaccattgtcggtgtcgacggaacccatccagtcggaagacagatcatcaatcagacggaagtctttgaacggatcagcagcgataccatttttgtaacgtgggttgcctgttaccgggtcgaacacttgctgggtcatagccgaagattccagctgagacagcgtcgtgtagtactcgacgttcgatatacgggtgtccagtttaccgatgtcccgcattgtgtagcggcgattgtcgatagtacggatctggatatcgtcaatatccggagtatacggagggatcagcagttcatacaaacgcatggcgtttgccgggatagcaggagccgccaggttgttcgaactgataccacgagcaacgttgaaaacgccgttgtctgccaggtacacagcatcaatgcgaggcagataatattcaacgtccatgatgatagccgtattcggccgcaccatatcagtatcagaagccccgttggtgatcttcggacggaagtcaatactgtcggccaggccatacactgtaccagaagtgcttgacgtataattcgggattgatttgtaatcaatcgaagtatacgaatcagctgtaaagaagtcaccagtactgtgagcgaaatacgtgtattccacggtatacgcgcctgaaatgactccagtggccgatatcagactggacttgtagtacgccgcatcacgctgcccgccatccagagtgaagttagaggtcacgtcagcgccattagcatttttgacggaagtcaatttgtagccgtcatggttcgcaagctggatgctggcctggttggtaaaggtcacagtctcagtcgcagttgtaacagttttggttttgatgatagcagtggtgcgtaccatcagtgccaacaggttaatagactgtagagcgttaccagaacccagagaaatctgcagagccgacccaactggtgtcccggtcagagacaggctgctggagatatcgatctgggcggcggttccgtcagatttagccccggaatacagagaaaattccggagaaaagctgtatcccagcggtgcggatatagaaccattgcctgatgcgtccagcgtaattttgtaagaccgcaagacggtgtagttgatatcaatcgttccggtcggtgccagagttttcacgccaaagacaggcagttcaaatatgaggtccatagatgaactttgtgagaactgatttgtttccagcgcggccgaaaacatcgtggtcccgctttcttcataagcaactttggtgaccgtgctcatatcaccagtgacgaccaggtcacgcatatacagacggaattccgtcccggtccggtcagcggagatacacagggcagtcgcttgggtaacaccagaagcgttcagcaatttatagcgaatgctgcggctgataaccggaacacctttagagttcttggttgtcaggaaattacctgtcgctacagcaaccggcgtgttgttcagcaggtcggtatcacgcgccttatcgattatgacgagttcttcaccgacattctcaatacgacgaccacggacataagaaatccctggcttcattaccgcaaccagtttgctttcatcaccgccttcggccaaagtatagacgccgccgttgttgttttctttcaggtgttcacgaagatcgatctggtgggtggacacattatagtcaccagcttgttcataagtgcgctgggccatagtgtcttcgatgatattgtacgtcgactgcgtgaccatggactggattttaccgtctttgatctttgccagttcaacgaagtcttcaacttccgcgtcataatcgaacgcctgaatactcagatctaggcgcaggcgatgagcgcccggcgctttggtgtttggcgtaccctgtgcattagagaacaggctactatcttgctcttcagtaacgatttcttcagtaactttgaacccgacgcgatggctggtgttgtttgcgtacttgttaacgaccaacatatcatcatcaacgtcgaggaaaaatccacgaacaaagtagacgcccttggtcatgcgcgcaacaatagaaccgccgacagtctgggcaacgccatagccgatgcggatgaagttatcattcacatcataggtgttgaagtacagattatcgttaggactgaacccatcggcagtaccggattcggtcatttccaggatacagaacatcatgtccggctcgctggtgtagcgctccagagacaacaccctggccttggcgttgttgtctttgccaatcacatacagttcttgaattccttcaagatcggtgaattcgctcccgcccgccagctgaaatttcatagaaacagcggagttagtgatcgtcagaccaccaggaataaccatagaaccgtctttgaaaagatgattaccaatcttctcaatctggtcctgcatgattgtctgcagctggttcagctcacgagtctgtactttgattggattcgggcggaacaggatgcggctgaaacgcttctctggattccagtcgtcccaataagggcggcggttaagattcaattgttgcattttgtactccatctatagagttttgtcttgaaattatttagtataccacacaacccatcgtatgaagaataaagcccccgaaggggctttattttaatttttggcggcgtctattgcttcttctggtgacaaaccactggaaaagtaatccaaccaatttcctttgtattctgtagaaatcggaagatctgtttccttagaagcgagttctatcaacgtcgaaaaccaatcatcaaatggtggtgtttgcaattccataactatttcctcaaataggtagtagcgttacccgactttttctatcaattccatctatacttgtcaaagtgacggttaacgtatccccggtgctgtttaaactccaattcaccatcacgccagttgcggtattatccatacctatacggggtgatgtaacatctaacttgcttgctcggtttaatattgaccaacctgtttcatagcggaaccaaattggtattgttaattcatcaggtgtggttgtggttgaaagacgacattccacgactaaagttcggcggagataagcgccatattgtataggcccagccctttcatccactggaattgacaaattaaatgtaagagtcgaaccagcccccgctgctaatgttgcctcttttagatctataacatttctagatcttatctttttggttcccccaatcgttattgtatcagaaatccctttacatcctgtaattatagcctcagggttgttcttattgttttccgcgcttgttaaataaccactgagatcacacccagaagcaataatttgtggggtgcctgaaccaatataagacacacaaaaggacggacttgctgtcccagtaccatcgtcattcacacccgttgtagtccttacaccattcaacgttattttcccattatctagaaggacaatgtgtgcagaataattatcatttactgcggaagttgcaccgtttcgttggataaccgtcccgttgaccgttaaagaaccaactccagccacgactatcccggcacccccggatctgtcgattagttctccagtgataacattacgaacagcatcaaagatataaaccccatgactattactccactctatcctattgctcgtaaagtctgagttattagctccagtcagcaatgatatatggcggtcattagcgttcatcacgttatgatggatattagaatcaattgtattgcgcaccccagtggcattcccagaaatgctgttgcggtaagcaaataatgttgcaatatagcccgaccaccccaatgccacggccatccgatatataccacaatgttccacccgacttccattgaattgagcgcctgaattggttgaatagaacaatgttggtgtcttgttcacaccatcaaagtttatacctctaaatacatggcgctgtgtggaaataaacggcgcgaccgccccggcagcgacttggatagtaaccccagttccattaaaagcggcatcattgggagcagtataaggtcgacgacatgaattggcccacaactcaaatcctattggtaaagtagccattgaagaaccagccacataccgacccaaaacccaaggcaatcttaggttcataaccccatcagatattgcatccttcaatgcttggtctatattaacccttgaagacacatctgttaacaacgctgtttgatcttcggttgacaaatattcaaaaatcgtggcttgtctagttaagtttatggtagattttcctacgccgatatttgatgccccatctttagatctcaaataatcagcaggtagagccattttgagtaaaaatgccccattggtcgtaacaatgtttagatcggaaccagaaatagaccaacttatagaccaacttatcggtgtgccagtggctgtaccacgataccaacaagtctgagtttctttgtcaaacaatatgacatatgagtcaattggggtggatgtcgacaaatagccgacttgagacttcttcaaaccgaagatacgagcaatcgcttctttgttggtttcgcgtgaagtcgagccttgggattggttaaactgcgttttcatgggtggttcctcatgttgtttttctaacaatgtctcattgtatttagtttgttcaaaagaaaagccccccgaaggggctttgtttaaaccattgcagcgatgtccttagaacaggattaccatcaccagttataagctgtcagaatacctactcctgagcttgtgcaaatgctatttggtcttccagggtaagttcccccccgtttccatcatcagtctggacggccatctcctgagcctccgaaagagcctgtgcaaccactgcacggttactaaacatctcatcaagttcaaccataatttcacctttacagattaacccttacatatttcgtggttgggtcatagtaaaaaccacccaccgatgcagttgtttgtggtaggttcgggttaacaaacccatctgtaactatctgcttccttagcagtgccttatacccaagaaccgggttagtgacagcatctgacctgtactcataagaacttccctttgcctgcaaatggtacacactgccagcagggtcagtgtatttatactcattgtcaaaagatcgttgatctgagtacgagaacgctgtattgaatgcattatatgcaacattaaatttgttatttgcccccatgccaagtgaaaatatgtagtcaaaatctttagcatttactttgatgtcacagtactgcccgccattgaacttgatagctgattgtcggccagtgccgatggagaatacatcagcgtgcacagcagtaatatccacgttacagtgctggatataggcattattcgcagccgttgtatagaatacaacagcatcagtcacgccatacccagagccttttacgttacagcttataacgggggttgttgcggaatttcctatgaatgccgcgacgtattgtgcgttataggctgtaacgtcaccgctacatgcctcgcaaccataccctgtaataacgccacccccctcaacgatatccgtcgcggagaccttgtaagtaatgttcttacatctgttccataaatggagtccggcatggtacgccctattggttactagggttatgctgccattgacgttgttactctcagactcaatgcctgcatatgccgaatcgttggcaacaacctccatgataaagtcggaacacgcatccagcttaaaggtactaccgagtgccaaatctgaacttgctgacgtcggctgcgggtaaatctgacctgattttctggcagtgcagaacacctttttgttctttgtgccgttattggcgaagtaagggaagacagctctttccagtattaccgatttatcgatataaaggccatcaacgccagacgcccacaggcctagcgtattggccaagggagatgtgaaaatctcccttgagtcgattttggtcaaactttggtatgcgtataaaggcctgttggtggggtcatcagaggtgatgagcagtgaccccaccagtctcgggtttttactgccggcaatcttgagcgtggtaaaaccagagtagcttgctgatgaaggtgttgcgcgggacagggtggcgccgcccacaccgtctaatgtgatattatcggcggttattgtccacccatctgttgcctgcgaattattgggaaagctattgtaataaacagcattggccatcaatctgatgtagtcgccattaacaagggcaccgagcatcgttttaaacggaactgtgtcgggtatggccgagcctttaccacgacaaccgtaccattcgggcttaacagtgcgggacgcatagtattcctcacgtacgaagaccaaccccgacgttgcggatgccactaccttcccaccgtcaaccgtataatcagatgacttttgtacaataaagttaccaccacctactacataacctaaagcatattcggtaacttgtatgcgctgacctaccgttacgggggagactgtggataattgagcaatggtagctacacttcctatgtgaagaagtccctcgcctgaaccaaggtttgcaagtatgtcaaaaaggggtagtacatacgagccagtagtagttactaagttcagagagctaccagagacttgccaggaaatcgatgtacctgtagcgttgccacttttccaacaagtttgggttgttttatcaaacaacaccttataaccattcaatactaatccggctttcaaataagccacttcgctcattttaacgccgtatacacgtgcgatagattgtttgttcacgtctttagagacggaaccaccggcctgactaaattgtggattcatgatgaatctcctgttgtttttctgaagttggtatggtctacttattggtttgggttcctactggaccagtggttgtgaacatcctattcatgggttaatcctcatgttgtagttttgaaatacttccccagaaggggaggtatcggtgtaggacacatctggtgtatttaatagtctgtgccctaccttttacctcaagaactaatttgtcggtgaaataaacaaattatagtcagtcaggtagtatactgaaccagtagttccgttagtcaattgcataacaccgcgtgcatatgctgccccagctggggctttaacagatgatgttctgcaagccactcgtttatttgcacgagatggatatgcggcaactcctgtaatcgactgattaactatctggttcatatcgctatagtagacctcagttttagatatgaggttatcattctcatcataccatgcgattgccggggataaattcaacttactagttaaatccggcatgatagccgtggccttcataccataatcacggctcggggttactcttactttttccactgtttcaatgtaagcatacccacctgaaccccaggtcaacttcatcgtgttagtcgtaccaggcgctagacctgtatcaataagcgagttatccagagcaacaatgattgctgttacgttagcaaagctattgccatactttctaacagtcgtcgttgttgtggttgccgcgcttgacgtcaacacgttaccagcagcttccgtggtaaagttatacaccctcaacagccggttatcagtagtaaacgggtgcaaccctagattaaggttcttatgatttctgactcgcacagtgattgtggaacctgtttcaaggatgctgtcatatgaatcgtaaggatatacagtccatgacacaaaacaatcatcaaaaagaacattgcaacttccccctttcagtaattttcttgaaagagattgagcataaccaagatccccgtttggcaacatgtttgtcgcacgaaacactatgaacctggcaaagttagaagtgtcctccgcatttacaagataaccgttccagttttcaatgtgtgaatcctcaaattcgatggtacaccacttagctgaggcggtaagatagataatatcgccaccagtaaaatctatgctgcatgataaaaagtggagatttattccagacgtttccatgtaaatagatttggtcgtggggtcattatacccaccagaaaccacacagttgctataagtgatcctctcgccactatctgtgttagtaccatagtaggcaataccgtagaatccattaaactggcaattaccgaagcgcatcaaccaggtacgtgtagacgtgttcccgtgcccagccaaaaatgcaccggagacctctaaatctgagatcctcatgttaatggcgtgtgcagttgatgttgcgcctttggtgtaaaggccaatagggtttgtctttgcccttgcgccagctctcactagcttgattttcccagcactgcacgagatggttttcgggaacgaagaactacggctgttgttatataaatttgttgcatcattgcaataaataacaatagcagcctcatgggttccatcaaccagagcatcagctaccagcttagtatccttcgtgaaaactgtagagatatacggaggagtagtaaccgttcctgatagcagataatttccaccttgaaccctaatgtaaggcaagtcataaattgacaactgcgccattgctgcggtatgaatgatatcaattgctgcttgccagtatggttgaacatccataccaggttttagacctaaccaacttagatcaatataatcactgctattattcctgcgccatcttttaccatcagttgttactacacagaaataaccattatctggtgtagtagtgtctgtatcatcataataccagtaatcgagtccgttaatatcagcaagcactacctctcttggggttgccggttcatatgcccgaagggcagctgccgtattcgcccgaccaattttttgcaggccattcactttagctagggccgtaagcgtcgtctgggattgtaaacttttccatgcagaattagagatccctccagtagactgcggagttgatttttctggtacagtttttggtaaatcacctccccaagtgtagcactgaccttctgccatgtaccaaatagcatcagtagaggtagatacagtagccccctcttcaaaactaccatcaaccaaattgaggccaatatccacaatttggcggcgccaatgttcccgtaaattcacataatttctgtcaataacttgttgtacagtttctcccgttgtcgtccctatttcactcgccccattattaccagcaagagcgggaatgttttgttttactgacatttcggcgctgacccatacaccagcaaccagcggagaattcaataccaccttgccagatgatttgaaataattgtaatcctcaccagctatttggtatttcccatcgatataaagactctgtactccataagcagtaaaatcaggagtaaattctgtttcaccgccgacagaaaggaatttgtagatacgaattgcattgttactcgcatcctgaggagacatgattttatcaaacagacagaatacgacatcccctggttccagttcgcggccaaggtttaatgtattcccgtctatttcaaaattatcaatcgggacctgtacaccactgttgatagtaacgaacccggtgataggataaa

SEQ ID NO: 2 - DNA, 165661 bp, unidentified
  source 1..165661: mol_type = genomic DNA
atcgtctatcagttgatgtgcttccgttatatgacgataacgctataattgtcaccgtgcagttttctatagtagacgaccctgatacgctagaacgtatacgcatacagatgcgtagtaatgctaactctagcagtagagtataatgggactagtccttccaaagaaacagtagagcggagatagaatgagattagaagaattacaggatgaattggataatgatttgattatcgaccagactaaactacagtatgaagcggctaataaccccgttctgtatggtaaatgggtgcgtaagcactcgacttgtcgaaaagagatgttaagattagatgccctcaaaaagcaaaatcttaaagcacgattggattattacactggccgtggcgaggttggtggtgaagtatgcatggatgtatatgaaaaatcagaaatgaaaactgttttaagcgctgataaagaaatcttgggtgtagatactaaattgcaatattggggaattcttttggagttctgtagtgatgcaatggatgctatcaagtcacgaggttttagcattaagcacattattgaccttcgtcagtttgaagctggcgcgtaataaataaacttgtaaactaaggagacaatcatgtcgaatacggtatgtgtcgtctgtaaaggaccaatcgatgaagcattggttgtccaaacagacaaaggcccggttcatcccggagcttgctataattatgcgattgaattgcctgtcactgaagacacagaagagcaattacaagaaacgcagcttttaatttagtctagtgttgatgtagccaattggctttgccccttcctttcggttggggcttttttgtattagaagtcttcgtcatcttcatcttcagaatcggcttcaagagcctgtctacgccccgccaaagcatcacgcacaatgatgtcatcagaatcagcaagagtagtttctttagagcgcttatcgtaatacttctcgagttcttccagaccatctaaggtctggcaagcattaattttactcatgaagttatcgatagtagcctcacgaattgtggcttcataaatatcttcaaatttaatcatagatttaccgttttcattacgtagttaaatttttcatcagcatatcgttgaatacgctctaatgcatgttttaagcaatagttcaaatgcgtgtatttctttttagcattggcggatttcggctttacaccgaggtcgtcgatgatatcccagacagtagctaaagatttatctttgtgtttacgaagaacacgaccaattgtttggagaacgataatcttcgatttaacgggatgagctaaaattacatgatgcaggttttttacagaaatacctgtagagaatacaccgtaacttgcgacgataataattccctttccgttttctgccatagcctttaaagcattacgtgtttcagtattaacttcacctgatacgtaataaacttgctcatgaccagtagctttaatcatctcaaatagctctttaccatgagctacatgtttaaacatcacaaaagcgttttcatcacgcgatgctagcttagcagctagattagcaacccaacggtttcttttcttaacattggtgatgaatttaatttcttcttgatacgtttttccttttaaagcatttgcggctgcatctggatatcttaagaagattgtattaattttaagctcagttacttgtccgtcttccattaacttagaagttgataccggacggaagatttcaccaaacatgccaacatattgcatgatattagctttgccgtctttaagagaaccagacagtccgtacttaaacatgcaattggtgagacccgcaatgattgttgaaattgacttacccgttgcaagatggcattcatcattcatcatcatgccgaattgagaaaaccattctttaggctgcttaacagcggtctgccaggtagatacataaactaatgcattcgaatcacgagcagtaccacctcgaatacccaacatagcattgcgaggaaataaacgataatcacaaaaatcatcaatcatctggtcaactaatgctgtagtaggaacgatgataagaattttgccttcgtaattttctacataataacgagcaagtaatgcctgaataagagacttaccggcagacgttggaagattaagaattctacgtcgattaactagaccttcatatacagcatctttctgataccaatggggttcaatcttagttaatcctgaatagatttctttagatgctaaccacgtgtcaaaatcctcccgcgaaagagtttcttgctcgaatatagctggatcgaaataaaccttatatccgaattggtcagcgaattttctgatttggccaacaagaccaaacggtaagagacgattataatctagcagacgaattcgtccatcccaatgtccatagcgatatttcgggttgaatctgtatccatcggcttcgaagctaaaatagtctctgagttcatagaaaattgagtcatcacactcaatatgaacatgactaaaatctttaaatttgacttggatgtcgtgcactgtactatcctcagtttataaatacaatcatatttatacattacatgaggcacacccaatgctagataaagactatatcaaagaaattcaggcactcgataaaaaagaagctaaagacaagctcgacgagtatgcccaaactttcggtattaaactgaaaaagacccgttcatttgacaatatggttgctgacttagaaaaagaactggctaaattggccgatgagcctatgccagaagataatgatgggctgtcaattgctgatttaatccaagcagatgatgaaattgagggtaaagcagtatttaaagatgaagcgtctgatgaggcaaaactactgtttgacgctccagttaatgctggtattaaaattcatgatattgacccaggtttctataaagaaacccctaatgtaaatgacccaggttttgaagtaaaaacaccttctatcaatgataaaggattttatgctgaagctcctattggagacagcgttattcatatagatgatgaaggacaagttaccaatattccggttagtatcacggaccctgaagaattctccaaagcaatggacaaagtagttaaaattattaacacagaagaaatttttgagcttcctgaaaactttagtccaaacatgcagttgctaggtaagaacccaggatatatcacccttccatggtggatttaccaatggattaaagataacccagattggaaatctcggccaacgtcgtttgaacacccatcagcacaccagacactgtttagtttaatctattacatcaaaagaaacgggtctgttatgattcgtgaaacacgtaattcttcatttgtaactttaaaataaggaacacctatggcttatagcgtatctattgctcctttggctgcttcggcagtcattggagcaacaaccaattttactgcaacaacttctggcgccgcagttgaaggcacagaaacgtttgtatggacagtaaacggcgtaaaacaatcttctgttaccgcagccatgaattatgttgctgcgggtcctgcaggcagtaaaactattaaagtagttgctactgttactccggctagtggcgcccctgaaacagcttcagcagaaactactctgacagttaagaacaaaaccatgcctgcgattactttaactttgagcccgacctctgtttctaaagagattggtcaatctcaggtagttacagctgatgttactggagcaccagcaggagcaagcattgcttatgtttggaaacgtggtgctgacgttattgatggtcaaactggtaaaacaattaccgtaactgaatcggcagaggctaattatactttaaattgcgaagtcacggtttctgcatcagattacaacccggctactgctactaaaggcgtcgaggttgtttttactaaaaaggtagcccctgagccagacggagaacttccgtatattcatcctctaccgttccgtggaacagcctatatctggtgtggatggtgggtaatggatgaaatccaacgaatgactgttgagggcaaagattggaaactcgacgaccctgacagcgattattacctgcatcggtatactctagctaaaatgctagatgattatccagaagtcgatgtacaagaatctagaaatggatacattgttcatcgtactgcgctggaagcaggtattatctatccgtaatattcgggagccttcgggctccctttttgctattcacggattggtttattatgtcctcgtcacatagatgaggttattatgaaagcattacaagctcacttgatgcatgaaagcggaaaggattttcaagaaattgcaagggcgttagatatcactccagccgaagccgctaagctgtgggtctctgttgagaaagcacatgagcggtttaaacaaaaagagaaagttgtatatcgaaaacgcttaacaaacgttggtataaaatctcgtcataagaaacttgttaaacacatgaggactttataatgtctaaagtagataaaaaggtagaagagaaatttgagatgttcctagagcgcaagtttgctcctgcagcgagcaatattaattattggcgttctgcatcaagatttgttgataatatgatgactcgaatattcgataacacttattataaaaatggcgcacgcaaaatatcagatttgattaaagaacggtatggaaaaattgattggatgctaatggatgtaaatgttccgttagtattagaagttggacctaaaaaccagtttgaaatcatgcgaaataaacatgacaaattaatgtatcgctttgttccaagcggatattaattgctttaaaaatcgatgtggtataatgggctcaggggaaatcctctgataccattacccttgtccaaaatagatggactcctggttttattttatttattgagagaaaaattatgaaccttgccgatagaatggctaatactgctattaacgtagccacagaagaattatcagcagcaaaagaagaagtattaactcagattgagaaaaccgctttagcgggtaagcgtgagctaattatgtatccgagtagtctagttaagaaacacattacaagtgttcttaattatttgcatgatgaaggatttgttacaaattataccagttcccagcgtaacggtgatactgactttatgaaaatcacattctaaggaaattataatgtttgcaaaatattctagtcttgagaatcattacaacggtaagttcatcgagaagattcgtggtgctggttttgatatgcatactgttgagtgggtagctcgtgagaagattcatggcactaacttcagtgtgattattactcctaccgaaatcgttccggctaagcgtactggtcctattttagaaggtgaaagcttctttggccatgagattatcatgaagaagtacaagaattctttcgctaaaatgcagaatatgctgaacaccatggatttagtatctgttcaaatcttcggcgaatttgccggtggcggtattcagaaaggcgtagactatggtgagaaagatttctacgtgtttgatattcttgctgaccaaggcggagaaacccagtattgggacgattatgtagtagaatcgtttgctactggtcttggtcttaaattagctccactgcttggtcgtggttcattcgctgagctatctcagtacgtaaatgactttaaatctattgtcaattactataatgagcttgttgacacgactgaccttgaacatgcaaataaacatgtgttcggtccgcaggcttcttctgaaactggcgtagctgaaggctatgttcttaagccggttcatcctaagttcttcaataatggtactcgtgttgctattaagtgcaagaattctaagttcagcgagaaagctaaatctgataagcctattaaagctaaggttgaactcactgatactgataagcgtgttctggaaatcttttccgaatatgtaacctggaaccgtgtaagtaacgttctgtctcatattggtactgtaactgctaaagatttcggtcgtgttatgggtctgactatgaaagatatcattaacgaagcagctcgtgaaggtcacgatatgttattcgctgataatccttctgtagttaagaaagaactgactactttaattcaaaacactattcgtagtaaatggcatgaggttttagaataatgagattggcgcttattggttcacgagaagcgccacgcagagttctgagtctaatgactacaataggtcaacgcctctcggaagaggggcatttttcatattcaggtggagctccgggttcagatgaagcgtggttggcgaaatacgataggtcaaattcttgtaggattattccttattctggcttttgtggccactttcctgatacaggtgttgttgtatggtctgaattatcaaacgaggccaaaatcaaaagcatcattaaggcgagagaagttacgtcgtactgggatgaatgctcgaaaatagtgcagacattatttgcacggaattctatgcaggtattgggcctagaatgcactgagcctgtagataaggtattatattgggcgcctgagaaaagatgcgggagtgtatctggagggacgagagtagctgttgatatagctcgcaggcacgggatagaatgtgttaatctatatgataagaaagtgtttaaatccctcgaggaggaatactccccgaggtttgacatatttagtttatagcaaaaaaggggagcccgaaggctcccataaattagtccgcaatcagcttaggtaacttaacaccgagcataacagacatctgacttcttcctgccatcttatccatatccgcagcattaatcacacgagcttcgtcctcgtccaatcctacagtatatgggttaaccgacagcgcgtaacgaaccagtaaagctacagaaggctgcaagctagctgggtcaacaataactttaaatgcaccaacatgctcagggtcgtctaaatcaagaccttcggtatacggcgcataaaataaagaacctacagtttccttcccaccaaattctgccttaacaccaacaataacgtaatcaatcggactgttagtatcacaatacagtggaaggccgttattcagaatgccatatgcgttttctggaatagtcccatcgttcttctgcattaaccaaccagaagctgccagtaccgccgcgcaacgagtagatgctactgcataagtaccagaataagaagtattacgttgaactgctgaattcatttcacaaatgaaacgatacagagtacgaccttgttccggagcagaatcctgcttagttaaatctaatacacctttatcggatacaccagttactttaaaccgagaagaaaccgtaatcaatgattgcaggatgtctttattaatgtcttctgccatttcagtagcaagtaaatcatcaataagctctggagcatcgaacccgttagcttctaagtcttgagctaattctacagttaaatccgttttaagcttacgcgatttaacctgggtctgccatttatcaattttaaaactggcttcggtgattgggtctgaatcaggtccttcgaatttttcagtgactgcagcatctgacaccatacgaatattattagctgctactgcttcagatacaattccgaattcatcggtttcatctgtgccagtaaacggtccgtctttaagcactttaaagactacgttctggtacttaaacatgtcatctttattaaaagaatctttattcgccatagtgagttcttcaattgactcacgttctgtggctccgatttgacctgcataggttgcacctgttgcaaatgtcaaatcaccatttgggttaagatatttaatgccatataacgctgctacaggctgtttagtacgctgtgtagcaacgaggtcagtatagattaatttagtggttgcgcgcgttaatgcaacgagattagggcgaccaattaagttgctactcgttgtagttgactcgcgcagaagttcgttgattttagccattgcgctttcctctgtggatttataagtttatttatatccattaaaacaactaaagggagcccgaaggctcccttattggtattagatacctttaacccatacacgacggaagtaagcattcttaccaacagagttgacgatagaaggcataccagaggtaatacgacctttcggctgttgagcagcagaatcggcgaacgggttaataccgataccgtaacgggttttgaaccccatgaccggttggaagttcttcggatcggaaccacgcagcggggtcagtgcaacatacggagcatagtagataccagcatccatttcgttagcacctttataaccgatggtgaagtaatcctgacgagcatactggtcgatgtatacacggtagcgaccacccagaacaccagcaaatactgctttagtggtgtcggtattataaccacgacccagaccctgagctgccggagatacgttggtatcaacagctgccagtacgttaactacgttacgggaagcgataatgaagttaccttcaccgcgaccggtctgacgagcgatttcagcggattctttgtcaatctggaacagcagagctttaaagctttcacctgcccaacgagcaccgcggatatcaatcgggtcttggaagtcgaatacaccggctttagaaccaacagtctgggtcataccagatttaccaacctgagcggagtagttaatccagtcaacaacttcacggttgatttccagcataatttcggtagccaggattgaactcagttcagcatcagcgtccataccgtgaacagcgcggaggtcctgagccagttcgatggaatactgtgctttcagctgacgagatttcgcttcgatagtttgtttatcgatacggaagcccatttcattccacgggttatctttagaaccgttaaaggcttcttgcagttcagcaacagaagtagccatgccttcggcgatttctacaactttaccagcttccagagcagcagtaactgcagcgtccagtttagcagcatcggtagcaccagcgtctacagtgaaatcttcaacaacctgcagatgagcacgaccggtctgtgcgaaatcgtgaacaacgatatcaccaacagtcagagcagcaccagctttaactgcttcaaacttctcggttgcaccctgaccagagaacattgcatccggagcgtacatcggatggaaagcttctttagcaccagcagccagcgggtctttgccgtaaacagcgcggagagcgaatacctgaccggttgggttagacatcggctgtacaccacagatatcgaaagcaatcaggttagggatagcacgacgaaccatacccataactgccggtccaatctgggttacagcaccagaggtctgaccagctgcgatgttctgtgcatcataaccgtggtcaccgccaatttctgcttcagacaggaaagaaccaaatgcttcagcgattttttcatcgcggtattccggagcctgattaatatcagcttcctggttttcaaaaatcttagcgatcagagcttttttgctagcgccaacaatttccggcagagcttcgttctcaagcagcggctgccatttttcgataagtttattctttttcatgtgttgtataaccttttaaattaagaaagacgagccgcttgggctacataagcatccataacggatggggttttagtcgcaggagtttcttcgactgcttcagttgtgaagtttaaaccgtctgcttctttgtcgatagtatttatatcggcagattccgttacagactgctctacagaaccctgcaccatttcaacaatagctttcagcttagttgaaaacgagtcagaataatccatgccctctgtcagagaaactactttctctttttgggtatcagtcagttcatgggttgcttcttgaatagcatactcgcgttgggcgtaattgatataagcatcacgcttagaaacttcttcaaataaacgagcagtttcttctttttgctcagcaagttcttcttccatttcagcgaccacgtctactgattcttcaggaattacaacgttgtgctcaacaaacagctctttcataccgacaaacatggattcaaacaggtcagctttaataccgcggtcaaccgccagctggttttctgccatccattctgcagcgatatggtcaaagtatttagaagcagcttctttcagctcttcgcgagcttcttctttagctttttctttttcttcttctactttttcttctgctttctcagcaatcttttcaatatgagattctgccagagctacggcgtgttttttgactgttgcttcgaatacagtgctgaagttagctttagcttccggagaaagctgaactgattcgaaaatactgtcaagagcgacggaagcatcgatagttttagcttcggtcattaaaagttctttaagcatttttgatgtcctgtgttaagttacataattatttataacgcttttaacttctctgcgagagccataaaagcatcatcagcactattggcaacttgtgccgaggtattttccgaaatttgtttcggttgtacccatgcatccggagcactaggaccccaaactgcgtctacaccaacagtcaggcgaaagccttcttgtacgatgttatatccttttcctgagtcttttaaagaaccgagcccacggcttgatacaccaggaatccaaccagcacggatgttagcggctaatttatcacctggaccgtggtctccttcgatgattcttgcacgcccataaacatcgttgcctttccaccacatatcttcaataatgattgcggcttgcattgggtcaacatttgcacgaggtggatggtttaattctcctagagcctgacgagtagcaacctgctccttaatataacgacttaccgcagtctcaagaatgcgttttggataaagacgtttattacggtttactacttctgcctgcataaaaacaccttcaatatacagaccaggttttaagccagattcattttcgccttcaacgataatagattctagcatgggtttaccatcaattacatcgcccggttgaccccaatgctcaattaaaagttgttcattgaggttttccattaacttagccccagagcctgacggcgtttaagtgctttcttacgtttacgtaatccacgagtttgagccgatggattagcacgttttgattttactgctttacgcgcgatttgacggcgtttagctttagaaagtccagttgtttggaacgcgttacgctcacgtgttttacgatccttagtacgtgtaatagtacctttagaatcaacgtgtttaacgataaattcatttagttgtagagattcattgattgaacctaaagcaattgctaaatcaggctcagaaacaacaagattctctacaattttatttatatcatctttagaaagcgctgcggacaacttatcaaaacgtgcctgtgcttcaggaagaaaagcttcgacagcgtcgataactaattcatgattttcaggcagtataagcattactcgtcctcttcgtcttcgtcgtctttctcagacttatcttcatcttcgtcgtcttcatcttcgtcgtcaacgggctcttcaccctcaatcatgacagacgctgcgataaattttttgcgctcttcaattaaaccagatgtccgttcagccataattgcaccaaaagcttttttggctgctacgaggtctctggattcaattgcggaaatataattttccattagaaatcctcttcattttcttggtcttggaagcgagcctctttagactctaattcaatttgcttggcttcttgttcaatttcttcatcagacatctgaaggaaatctttcattgctgtcttgtgagaaatatacttgccgataaacggctcagccattgtgagcatattgattctacgctccataacttcagcatctttcaactcggtgaaatatgagtctttatggaacacaatcttaatattatttatttcgtcttcccactcatctttagacaaaacttttttaagaattagattagtgcgaagtggatcaagcataatctcttcaaatttatgctgtaatctacgaataaatttggcaaaatcaagttcatcacgtgtgattgacgtaccagcatcaaactgcacaccgccttgattatttgcatctggcatgcgtgaaagaggaactcgcaatgccatgtataatgctgttctaaagtaacggacatcatccatatcactcataccggacataccaggaagagtatctacttcagtaactgctttaccatctctacgttgcaaccaatagtcttctgtcattgacatattatgctgttggtttttaatcttaccagttgacgcatcatatacaacacggtttttcatcgtgttcataatatgctgcatgtgtgctgccgctttacgagaaggcatattaccagtgtcgatgtaaaacacccgacggtcaggagcacgagtaatacgataaattaccaacgcatcttctaatagctttaactggttggcaggtttaacggctcggtgtaaataaccgatgatgttttgacctgagcaatcaactagcccagaatgtgcatatactatagcatcgcgtggaattttaattttcgttccggcagaatataatctaccatctgcgtaataactttctttgccagtatcgtaaatgaaatactctttgtaccccttgacgattttagtaccagcgtcatcagcagtaacgatttcgcgaatgaattgtaagttgcgcgggtcaagacgtctcagttcctgaattccgtctttcattttcttggtgttgacgattttatggaagaatattcttgagtcaacataccaacggcggaaatggtcagcgccctttctctcgaaattaaggcatgttaaaactgtattaaattcttcaagaatacggtctttaattgcttgactgaagtcagtagaatctaaatcaagagaaactactgggtgaccgtcttcgtacacaaccgcatcagaaactatttcttcaacagcgttgtcaacctcgtagttattcattaaactacgataagtgttgattaaatcagcggttgttttcattccaggttcattggaaccaaacatcatttggttgaatgaattatactggatttcgttttcgtttgattcaacttcacgagctccatcatcaaattttggagcagtgattgactctaggtcattgttgatttgttgcttatattcagcttcgtcgcgtttttcccacggagcgaataagtccaaaatatgaaaggccattggagtctccgaaattatttataagtatatttatatcgaagttttgtcagatatttaagcaaataactcacagaacttcgatacggggccgaagccccataacattattcccaccagtcaatagcaaaggtagtttcgaacgtttctacctcattgttactatcccagtccatctgtacttcaccaacgttagttggccacagaccagtaatggtgtgttcatttgtgatagttttgccatcacgactaaactggcgtaccgtagcaacctttttgtaatcagctggagtcataccagagatatcattgccttgggcgtgggcctgagcctgccaagcaataattgccttacgtacttcgtgtttatcatcgttatagatggtaacagtccagtcgtcataagtacggtcaccggcgacgttaatcttacggttcatgtacccgactggaactttttctacgatacctgccggcatcggtgctgctttacatttgaaactgaagttacgacccagataaggaatttctacctcaaacaggttaggacgtgcaaagtcaccagattcaaacgcacgagtgatgtctgttaattccatcgttgtttcctatagatatttatatagcctctcgattgactacatcatcatagaggctattaaagtgtgcggtaatataatttatcatctaaaggttagatgaccccagaatgtcctggggttcatattactgtggtccgattaactcatcgaagtctgcaccagttgccgtagcaacgaagttcagagtgatgtagttaattgaacgcgccggcttgatgtagaagctcgctacaaactcgttgcgatcgataacagcaggggtgttgttcgtggtatcacatacaactcggaagtcatatacaccacccagcgctttaatacccgccaagtattggcttgtttccatacggaaagaagaccgggtaaagttatcgtttaactcgaacagctgccacttagaagaatcaccgatgttgttcttcagcatgttaaacagacgacgaacgttaattcggtcaaacggcgttggaacagtagttgcagtcttatcgccaaacagaatgaaaccatcaccggtaccttgacccgttaccgggttaatacctgcttgatacatacggtcacgatgtgcttgacgaggttcaatcgcaagtttaatgcagttcagaatctgaccacgacgataaccagccggtgacatccaaggttgagcaacatcatctgtacgagcacacaggcctgcaatatcagcagctaacggaacccaacggtttacgtcgttatatttatcatactgatatttatagttgccatcaattgctgcgtacgtagtattgatgttcatgtttgcagagtcgtaacttccttcaccttgacgccaatcaattaaattatcaacagcacgggtcagaggaatatttacaatcgttgaccttggtggtgaaatgagtgctaaacaatcttgacgctcatctgcaatagacgccacatgtttttgcactgtacttgcgatttcatccgtttcaccagcgcaagcaccagcaatcagaaggtttactcgcagtgcttcgcggtcaccaaataaatcccaaccttgtattaaatcaccagcagtaactgattcattagctgaaaccccaccacccagacgaataacgccagcaaagccttcaggccatccttgcgcagtggcaaatatatagcgtgaagaacccttggagaaataatcatcaataaagatgttatttccgtagatatctttgtcttgacggcttgtcgataatactgcggattcgactaccgcgccatctctacgaacaatgatagcatattgggtatcggtctgaggaccatatccaaatacagcttttgcagtcgaagcgcgttttccaccagccggataaatcgtcagctgttcacctttatcaaatgcagcttttgatacgatttcaatttctaactgatttccgagctcgccaggatacgcagctacaattccaggcattttatacttagcaagagcagtctggaattcggttttggtcatttcttcatgagcagtttcaggttcagttaacagaactgttgaatcagaaataattttgcccagagtaataacagcggaaacaccagaactctgcgaagtaatagtagttgtccacgaagaccctaaatcaggatattgattaatgctttttgcatatgcaataatcttcgaagtcggaatgaacaccgacttaatttttccgtcactatctaccgcagtaactgaaccagtgtcatctacgacttggtctgcatacttaaccgtaattttgtcgccaacttcatagttactaccagcagtagtgatagtccattcaatattatcaaccagcggagatgcgtttttagcagcttcacggttaactacacggacggtgcgtagatcattaccatattgcagaaagttcattgctgacataaagtaatcagcagtttggttattagggccgccaaacatatcaaccagttcaacttcattagtgatttgagtaacttgatatgcaggaccccattggaacttcccgacaattgcggcacgacctgtagcgttaagtactaccgtgctctgtacgctcgtttctttgagctcaattccaggagagactaaaggcatgatatatcctcaatgttgtttgctttttattatttatacaaatgaaagaccatgttcttgaggcgcatattctgcgctattcacggcgtcaacgaacactacaggagcgtaatcgtcgttcatatcttctaattcgcgtttaaaaacttcagatgctaatcgcatttcatctttatccacgaaatcagcaaatttttgctgtgttgttaaccatgcgaaaattacgagtgacataattaaatcgtcatgatatccatcttctgctgcccatgacactcctttctcagagaaagtacgaaattcttgaacagtagcacgatggtgaataatgagtttatctttttcgataaggtcttttagtgcagaacatccgacggccttcgaccttttcgtctgtttcattcctaaatcaaccattgaatcgcaaatgacattctcatattctaaatccatataaagactcttcgctacagaaacgccggtagagttgagttctatatagatcggagcttcgttgtactccattagatatttaataactatatctgggaggattaagtgagaaattgtattagaatgcaatactccaacttgttcccactcagatgtggttacgtcaataatatttagtgcatggtaatcctgccctcgtccttcagcagagtcaagggttgcaatatacttgtggtctgcttcagcttctttgaatttataaaatccgtgtgagtcaggagtaacttcaatccaatccatattagcaagtttcatgccggaaataagagtaccggatgtgccatggaattcagcgcagtgctcttgcttgaactgttcaagagaagaagcactgatagtttgaagtgaccattgccacccatcatcaaacatatcttcgtcgttatataggcgttcttttactgagttccaaattgcagtataaggagtaaagccggatttaccttcaaccgccgcagtccaaatatcataaaagtggtttaatccactcggtgtagtcgtgataataattttagaacgacgacctgatgaaataactggttgaatagcaagccatgcatcgatgaagtttggaataaacgcacattcgtcaatgtaaatcattgcaaatgagttaccacgaacggcgtcaggacttgaagcatacgctccaatagatgaaccattatctaattcgattgagcctttgttccattcaacaatgccaggttgaagaaagtcgggaagcagttcaattgcttgcttagtacggtcgagaacttccgcagacattgagcctttgtgcgcaagaatacctaccgctttatccttgttaaaacagacaaagtgcgcaaggaatattgctactacagtggttttaccaagctgacgactaaggttacaacaagtcatacgtttagccgccatgatttccagcatgtccctctggtaatcacggagctggactttgatagtaccatagtcaatatgtgtaattgcgcagtaggtctctgcgaagtacacaatatcgtctcggcatttcttccattctgcaactatttcacgggttagttgcattttaatgtttgctcgtttaaggttaggcaatcccatatagcgggtgcgcttattgtttttgtccttaaacgtttggaaatgagctgggtcttcaccttgcaaacgaattttaactatcccatgcaacttaagatagtcttcaaatttctcaggataccacttatcatcccattgcgatttaaagaaacgaactccattttcaattttcgtttccatttcagacgggtggcgaataaccacctgtttcccgtcatttaaaggatgtgcatcactcagaacgttaaacggttgagtctgttccatttactattttctctcgagcttcttgtgcttcataggcgtctccaaactcatccatcatatcggcagtagaacctacaaagactgttgcgttttgaatattcattccttgttgaggattagctccttttccagtactaacctgctcagaagtaatgtctttcatttctttatgaagcttaagaatttctttgttagttgtggtcatctgacccataagagttgcaaatacttccatatgtctaggagaatcagcgttctttgcagtttccaaaaatattttagctgcgtccattaacatctgttgttggaagtgcatattcttacgaacgacagaatagtcgtcttcgaggtcaggtttacgatcatttggattagatttaacttcgactaattctaatttttcataaaccggaatttcttgcccttctattccgggaattccttcgatgtctagcaatttagccatatctaattgtaagtcactcatttttcacctctcggtccaggagcctccggatttaccggaataggaatatcgtgagaatatgtctgtttgctagaaccatcccagttttcttgctggacatcacgtggagtaacttcgctatccacagattcaaaatttccttctggtgttaattctttactattagcgaagaaatccaaataaatggttctaatttcgccgtcaacctcggcaacaggaggatatagccatccgttgacttcaaacatcaatgaccattctaatctacgacgagtaatattatctccgtcaacagcttcatccggagaaaatgattgtaatacaattctaacatcacggttaaagctcgtgtctttgtcgtaaagttcagttatagtcgtgttaaaatgcggctgaaaataaggaacgatttgctcgatgatttgatacatatcatcttggttccgtgtataaatccccaactcaaaaatcatcttaatcggagtaggattatactgagatgtaatttttgaaggggttttatatgatttggttctattcaactgtgatgttttatacatcgcgttgtattgcatatcaaccaagtgtaaattcattcttggcaaaacagtttctatctttgctttattctcggtagactgaacagcagtccatttcccaagttgagaaaggaatttttcctttgaagcatacgtgataggcactttaatatattttagtccagtgtcttcacgccagcgagcaatttgtatatgagaaaataaatctcccagcaatacaatgtatcggcgcaaggacgaattataccaatttccaaacatgatttctcctaagggacccaaaggtcccatctttattttatttattcaaaaaatccgtcatcaaacgaatctgctttaggaggagactcaagtcctcttccgttattaacataatacggatgaacatattcagaggcttctttattaattgcatcgctttctgcgtattgtacgtcagaaatatcagcaagagaatcaatgtttttgattggttctaaatcaagttcagagaactcaggaatgataattccttcattgcgctgcaattctggttgaagctgctcaccggaataaatgtatttctgcgcagtaatcttgcgttgaacattttgacctaactgataaaatggatcatatggttgaacccaattaatttcaaacagcgaattatccatcgggaaataaatcaggtcacctgcctttggttctgaattattggtctgatgcttgaacaaattaggattaatagtcaaattgacttcatcattaaccatcataccaaatttactgaagaacgtgttatcaccagaataaccgtcaaaagagtctaagtaagcagcaaatttccaagccttggtgaatttacttgatgggtcttctccgaaaagcaaatccggattgttatattcgcgaggaaggaaataaaactcaattcctctcatttgaatagcctcagctgataaaacatctgccagggtttgactatttctatgattgtaaaaattcacataaggattgagaatttcggtttcattagttttattgtatcctcggtaatcctcaaggcgagcgaataaactagaattaaatgtagtcatcttttaccccaacagaataggacaacccgggtcaagtaaatcaagttcctctcggagcctctcgatttcttcttgggcctctactttaagtgtttggccatcaactgtaacgccgccggctaattgtagcccttggtgtttaaacagaatttcaccccacaattttttagtcagtgctgtagcataatcttttacccaacgattattataagcaccttctctatttgtattaccttcacctgcatattggccgttattgcgaaggttaggattctgatacatatctcctaagccccaatggtcggaagtttgttcaccagcgaagccgtaacctgcagtattacctaccatcatgtcggtattcataaatgatttagtccagcattcgcaaacaatgatgtctcccttcatgaagttgcccattactttaagcatttcattatcagagttataccaatagtccggaagtggggcaagcaaatcctgcatcattgaccaataagtcattaattgagtaaaatagcccaggtcagcaccgaaagcgtttggtccataactcttattacagcttgaccccattccgccattaattccggccattcccattaaaaagtcagtaaaccacggataggtagcattaccatccattgaagttaatgaacctacatttgttctaacgatttgagtgacagcaaatacattacgaccacgcaaatcaaacacaccatttaaaaatcttgcgttgtcagcttcatcttttccaatataaaaaacttgatagcctttattcaatccgttaaagtggtattcaccatacaactctaatgctcgttgaatacaatcataaatttggtcttcagttacttcgacattgattaccggcgctcctagacgtcgaagtatagcgtctttaagcgtttttgggttgtatgtgttgtatgacatataagctcctctttatattctatttatacgaaaaagggacccgaaggtccctttcattatactgctggatgaatagtaatatccaatgatttaatactaacaggaacttttgattcttctgaagcagctctatacacaattttgattgcatcgccagacgaaaacttaataagtttcttggttttcaacagttgctcgccggttactgctttaacacctaggctataagtaaacacctcaatgttattgacgagaataacaatttggacggctttatctgaatcagaagctttgataactgtatcagtttctacacaaaatacgccatcgtcatcaacaataatatcatcgacaatacgaatgccagcattaaatgaagcagcgaccaatgagttaggatttaccaatgcgtcagaacttaaattaacagtgaaatcttctttactgaattcacctattgatgaaggctttttaaaccattcgccccgtttacggaggtatgctccatcttgttctacgtcagtaactgcagtcacgaatttatcttgcaattctactacagtggcatacacaccatcccgctgaaccggattttctgatgaaaagtcaccattcatttgagtctgtaacgtaaatacagaaccttttaacccttcgctgttattgccaagttctacttgaatgtcctggatagcagattgttgggagttttgcatcccttcaacattggtcattctcgctaaaattgaaccaggaggaacttgctgtccactaggaacaataccaacctgctgatttatccatgctacttggccctgaagtcctgatgaagtatcacgtcctacaacatcagaaatgtacccttggtcagttgaaagagaactaatttttccttcaatagtatcaggcttatcagaagaccccaaacgagcatcaatattattgacacgaggaactaacccggtttgtgcagagttaagtgttgcgtcaactatacgataatcgttttctaatctagtagtacgagctccaatttttactggattggtaaaatcaatggcttggttaatagcaaagatttcattattagctgcggaaatagcatcagcgttattcacaagccttgcataaattgaagctgacgtagctccggatttaggaccaacttctttacgcaggtcgtttacttcaatagtcagagaacctacgtctgaatcattgtatgcatcttctagcgcctgaatacgctcgtcatgttttactatagctgacgcattgttaatgattcggtatttcataccagaacctggagcgtcttgcttaggctgtccgttaacatcttgcccaggatacgcaccaatttcacgtttaacccaaactatattatcacgaactgttctgtaatagtcatctttactagaatcataaacacctacatcctcttcgagaaaatcaaggtcagttcgaagtttttcggtgtcttcttctaatttaagaatgttctcactatgggcttcaatattctttttattgatataaacctgctcaatggcgtcagaagaacctgtaatttctaacgattttttgatttggtctacatctacttgaatattttctacagcagttccaacgttgttcaaatcgttatgtacctgaaccacatttttctgaatctgcacagaagctctattcagttctccatcatttccatagcgggttgaagccccattaagaggctctgtattttttatccagttaattctctgttgaaaatcgtctggaattccgtctacaaacggaagcgaatctactagtttggtcatattattccttacggtctatttgtacagaatgtaagcatgcagtcataaaatacaatacgactgtcttctgttggtcttatttgaacagtggcatttggaggaatgttattgaagaaaaagttgctagatgcgtaagcttcaaatctccatgaatgaccattgtttccgcctttagtattttcgatgttaagagtaagttcaccgccccattgggaaccgttaactattacaacaaatctgaaaatacgattgtcatatccgtctttgttacgctcaaattttacattaacatttagagctaatctactagaagcttcccatggtgcattacatgtaaacgttgcacctcgactaatccaagattgtccttcaacccaagtaacattacctactctggttccagctggcatgtaacgcccgtcagattcttgtcttgtataacaattaatatcattgttagtaatcgttatgtcattgtcaagagtttttccgtttattctacgggttttaaagactgcatctgttgcagccgctgccagtgaagcatcagtagttggagaacctgataatctggttaatccatatttatccttggtggattttagcgcttgaagactttttggagtaacagccaaattgttagaagtagctgaagccacatctgagtctttagcaaattttactataccaaatacactgtcagacgcttttgatgccatgaaggtttttggagttactgcgtatccatcgtgaacagcacctgctgctacctgggcttgggttgcgacacgaactaatcccaagttgctttctgtcgcagaggtataactaggaggactgacactgaactttccaatcatttctacaacacgcttaggagttactgcggtagtttcgtcagttcctgcttgtgcttgagccgcagtagttaacctaacagttccatctacgttttcttgggctttcacagttttaaacacatgaccgagagccgccgcggtaatagttctatttcctgcggttaatgctgcggcttcagtattagtagcataccgtgttaagccaagaattgcggtagttgcttcaggccgagtaattgtggattttaatgtagcaggagttaccgcagcattaccaatagttccagcatcaacttcagcctgcgttgctgtgcgaattacgccggctactgtaggagatgctacaggtaatccggtatcagttcttgcccagctaccaatcagctctaacgctgattggacgtcttttatagcaacaggccattgtgtatttgttgggtcaaatatcgtatatttggccaaatcactgtagtgattatagttattctgggccattatcccatccttctaaaatagtggaaagtaaatgtgttcgcgccgaaggttttagattcgttgccgatagcatcccattgcccataacctgctttagctggtgaagtaatagtaaattcaacagttaaaccatactttttatatgtttcaaaattatggttctgataatctaaatgaataatatcaacatactgaggtgttgccggcgattgagtaacctgttgaacaacctttccaacagcttctaattcttttactttatcataccaacgtgttgctactgctgcaaagtcatcaccgtttgcaattctaattggtaagccaagaatatgaattattactgggtcaccgacagagccgtcttcttttggctctaacgcaacgacacctgaaaaagtagcacgcgtaatttgctgtgcgggctgtggagatattccagtgtcattgcaaataatagttccaatttctgctgactgcaatgacatcaaatcattaatagcagcttcagtatttggataccaaacccctaaatccatttgttcaaaggttaggctccctataggagccgtatttcctaccgcaatattttgcgggtcaacgcgatattctgaaaaagcagctaatcttgaattaactttagctccttcacgagttttagtttcaatcgtcattttaacctaccctaatccaacgataaacggtgattgttggctgaattttagtgatgtcatttggaactacaccgttgtttaccgcaacagtgtcttcacggtatttagaataacctggtccctgcgcgtctgggtctaattgacatccaccgataactacgcttccatgttcagggtctgaaattagaactttatctcttgacattagttcaggaatgtgttcttttcctaacgtaaatgtcaaatctccaaccgttccacctgctgttaatgatggctgaccattttcgtttaagttattgttgttacgcgaaaaataaggatcagatgaatcattattccaaccagcagtaacacggccttgtgaataaagcttccacaccccaaatcccatatagtcagcagggtttgcgtggttgtgagcgttttcataaatcgtgccaatcggataaattacgtcaaaaaacgctgcaatattattgactttaatcataatatcgtcagcaaccggacgcatatttttctgattaggttcatcataatttgtgtattcaatgcgattttttagagttactaattgctcagcattcatatacacttggtcggtttctgccatgatatcgtcaatatccatagtagtaccgatgttattattgaaccaacggacggtaagaaggtctttatcttcaaacgcctcaccaaaaataatagcttcgacgttagtaccagttgagtcaaattccagtctatagtcttggttagaatttacccattgaccaccattgtttatacagtcttctgcgtatccaccttccgcgccttcacaataaaataaaggaagaccagcagttccagcttcaagtaattcctttccgttcaatgaaatttcaagcgagttaggatttacccctacgcctggaagtacacccatgtcatccagagtgattctgcggagagtagcaaggttatctactatcattgacccaggaatcgtctgggatgtagtctgggctgaatctcgtatctggatagccaacttgttgtatgaagaccgataaacaccaattccatctaggaaggtttcaaatgttattacttccccttcaacacatggaacttttaaacgaatgtctttaccgtttaattctaccaattgacctgctactgttccaggagaaccgtaatcagcattggctttatccataacgctggtttcaccgtaatataaaatattaccacgacgatatacattaagcgagtcttcgttatattctacgccatcaaaaatgttaaaaaagtcagtctgacccgcagtagcaataattgattttttcgctacagtacttaagttaccgttagttagcttatctaccgttttattttcaatatattcccagcggccaggggcgcaataaaccaattccaaatcttggaagttagtattgaaaattttaggagaagctgaaccttttaatgtatcgccttgagcaggaataactgtgattgggcttaatcgccaggttgaccaaacatcacgaagtttaataactttgttatagtcgttggctgtaccctttggaagctgaacgttaactcttgctgcctgggtattaatagcaaaggcctgaccaaacttagcatttaaagtagttccagtagggctagctttaaaagttttccatgcacctgctgcgaatggaactgaaccatcacctaactctgaatataaatcatcaaagttgttattaattttaagaccacctttacggaggtaatcaccagacccatcatctactgattggcctactatcaaattttgtttcattattgagatacccctacggtctgtgtagcaataactttaactgccaaacgtgcgtttccataagatgttgaagctgtgcatattaaatctttctgcgcattaatagagtatgaaatagaatacatcttttcattttcagatgattcaccgcttcttaacactgcatattcagtgtcaaatactcttccgtttggcgctgatgaagtaatagtcgggtcaatcataagcatgacttcagatgattgccttttgatggtttgaccacctggatttgcgctgaagcttaatagcaatttaacagtagagtaatcatcattatatccaagtcgaatattaataggagaactcgttaaattatatgtagcttctaacggtgaatacgtgctgccaaacatacttgaaatcgaataatcccaaactgcagcaccgttagctttgacttcaatgcaccatagctcaattctacatcttggtgtgttgataatcaattctcgcgatccgtctttaaatgcatctgctacaccttcgccgtttgttgttatttttatggatctagcttttgatgctgagccattactatttacaacgaatacagcttctcccgctttaccttttgaaagacgaatttgaactgccccttctgagcaatcagcatctatgcatgaacccatcggaactgtaccggccgagttagcatcaccaaattttatcttttgataataacttgttgcgtggattttttggtttaaagctccaccaccggctgcaaataatcgttgatcagcgaaggcgttataaatggcgtcgaagttatcattaattttcacaccgccatcatacagaatgtcgccggtagaagcattaccaatctcaccgacgtcaattatttttttacccttatctgtatacataggttaacctcatatcaaagtatagtcttatttatataaaaatggggagccaaaggctccccataattaaaactcgaaaattaaatttaactcttctgtttggtccattgaacgtataataggttgtcgattttccatgtaaatcatttcacctgactgtctttcaagaccagaagcgctataccaacctttttcagccttaacgttaggagaatttggcattggcttaacttcaagcggattagttataattgacaactgcctaaacccagtatttcccggaagactaaactccggaaaataaattgcatcaaggtatgctttaaatctaatcgtattacacttcatacgatagattaggttaaagtcgttttgttgccaagttaagttgttttgaaatccccaacgagctggagattcttcaatctcttctggccaaggaactacgatatattcatttgtacatctgttaattgatacgtcggctggaatttcatatagatattcccaaagatatccatcgcccaaatcgacggtaccgtttgcatcaccacgcccacgaggcgctgaaccggaaatagttgatggcgtccatttacccccaagcttaatacattcttctttgcttgtaagattaccaattgaacacattccattctttggaacatcaatacatctatataccatccatccaaatccagcatcagttctgttatatggcgcagagttagcaacaacgatatcgccgattaaaaatgtgcgtggattaggatatcttgtatctccccagtctcttcttggaacaacacagtcaagcatagatgattcaattttgactgcacccatcatatttgtccaaatatcaaccacaccgtcttcattatcggccgggtatggaggtgcaaacccaggttcagattcgttatctgaccacggagtgcttttaccaaatgaaacatacaacgtgttttggtccgttcccggaccaattgatttataaaatgtgtacatcttttcagttctaaacttagatgtaatgatagcacgataaatcgtgctacgcgttgaacttgctcttgttgaattactcatcaatttttacctgtgtcggattttcaggatcgcgaggattacctgcatcgtctttaagacgttggttaactaaatcgcgataattagcaaacgttactgctgattggtcaaacgtaggacttaacggcttacgtcgttgtccagggttttgtccagcgataacactattgttattttcttgattatagttagcaggtaacgggaaaggttcaccagcttgagcacgtgaagaatacctaggctcattggttattgggtctctttctattgtatcatctgaagcgataatagcaactctatcaggataaactgatggcagtcctgcatcccatttatagtttttgagtttatttatgatagtctcaacatgcttcatatttaagccactattgataaacattgtcagcaatgttataccaatgaaaccgaaacctaccggatgaacaaaccttaatacgtcgtcgcggaaacgagaagtaggaagctgagacttaattttcataacatagtaagaacggctgcggtttatataatcaatgttattactcagcatatcctttccgcggacaccttgaactataataccctcaaagtccgtacgctctgatttaatttcctggccttcaatgaaccgtcctgataagttatgaatagtaatacgccataacagacgaccatcccggtattctctctcgatataagtcacattactacgaccggaagcagtataaatcgtacgaccaactaaatcgtcagaaatatttgtactttcaacaataatgtcatattcggtagtgttctttgactcaatatcgatttcgacgtcttcgttataaagaagtttaaacaggaacttatatgagtcttcaattcctttagtagcatagaaatcattcttgcgtgcttcaaagaaacggacgacagcgtcacgagcgtctttactcagataaatgttgcgtttataaacttctgaccacagatattcccatgcattttcttcgcgaggatacttgttcttaacaagattaacgagactgttgtaatgtgttccatttccatctgaaaggaattggagatagtacttacaaaagtgctcaaaattactatcttgcagcaagtaactatccggcatcattttagtaagatacgggcgcaaatctgggtcacgtaagcctggagtatgttcaggtgtccagtcttcttcccgtgtttggttctgcagaaacgccttaaacattacatcagttggtttccagttaagcgttacctggtcacgaacacggtagtcaaatgcgtaatagcctatcagttttccgtctggttcgtgaaacatgatgccagaagcatactgcaaaaatccattaaatgaaactggaggacaataaaacgttgcgtcgcctttatcccacacttccgaaagaatgcgctcggtagttccctgtgctgctgtatctactcttttctgataaagaatatcattatacacgactacagcgttgtctgatgtgcttatccagcatctgttaccttcgcgagccatccatacaaaccacggttcagcataaaacctcataggtccaggaacaaatgtttcccatcttgaaaattcatctgctctgaaactcatcatgtgataatgcttatcagagtgatactgaattggattaacatttttaactgcggtagaaattagttctggatatttcgtctcaagctcaatatcctgagcgtactctgttgtcttaaaattagctgatgaaaagaatatttcctttccgtcagttgacatagaagtccataaatgctctatacgacgtttttcttcatcggtattaccaaatacacgcttccaagtatttgtgccttcctggtaaacatagacgcctttagttgcagaatccacaacgttccttgggtctgttgggtctaatcctaaggttttaacttccccggtaataagggcaaagattttgcctccaacggaatccattttaaagcatacagatttaggattgcctgttatatgagatacttccttttcaaacaccttttcaccaaatgtaggacttaaagggtcagtatctattggagcatcttttaatttaactttacggacagtgtcttttgcaacaacgtacaaatagtcatcattacatgtaaacgcttcagcatatttggtaacgtcagcaggcaatgatgcatacgttccgaataactctacttcaaagccaagctttaactggtctcccaatttagcaaatgtaacttcattatcgctaaacttaacttcattcgatgaccaacgtacgtcagatgatttccttccgtaaaagattttatcatatcctaaaacataagaagtagttttagattgataaattaccactctagaaaccggatttccgacacggtcattaaataactgaacgtattgccaattctgtcctttatcatttgatactttaaccatatgttggaatctttcaaacagatacaaaattccgtctatttctcccagcatagttctatttttatcaacacacactgcttcaataggtccctgaatttcatgatatccagattcacctacaacgaagttttcaatagctgataaatgagaatattcaggactaaactgaaaagactcagtcatcaaagacgccatcatggcagatgtgttgaagttaacatacgacatgttgtttaaagaaaacttctgtttaatgaattctttcactaaactgaattcttgcatatgctcaaatgtgtatgcgttttcttcgaaagtttggaactcttctgtttcaacccattcagacggctcaaaccctgctgacgtagtttgaacacgcattttataataagtaagcggttcaatacgattttgttcgaaccaatcattatccgcggtataacccagtgaagaccaactcaagttatcagcggggataacttcccccgctctgtttcgagtttcggccagttctacaaaatagtagaagtttgcaccaacgtcatcccaacgaatattgacctgattcgcagatagcttatgaattcgtaagctggtgacgaacggtgcaattgtcattgagtaataggctccaatttaatagttgtgtattgaggacgaaggtcattctcaaatacgataagtgttccatcgcgggcgaagacgatatcctgggtaggagtagaataaagctcaatactttggtcttcaaactgaagaggatcggctccaatagctccaaggctccagtaaatattatcaccataataatctacttcaccgattttgtaccaacgagttctttctccattagtagttctatcaaaatcgtcttcagtatatggctgaatatgagtattctctttaatatcacctggtttaaatggtccaatgaccatatttcctttaccatttttatctgggtcagttccaacgatattaactggatatgaatctgcagttggagtgacagtaaagaccaaatcaccagaacgtaacgtccgcggagtaatagtattatagtatttaatacctgcgctaggaagagtgaaatagttgacaatttcacgaaccatctgaatatcaacagaagaaccgatgattgaatggtcagtatcatcaatataggtcaataatttagatttactgaaatttttgttaaacatttcaacttcatcaacataatatctattaattgagtctataatttttgactgtaaccactgctcagattcttgtaacttattcagcgcgtaagaggctttaatattgtgacggatgaacaagtagtctggactcattaccgaaggggtaatgggagcaagacagaatggacgaagataatcttggatgtcttctctttgaacagcggttaactgcagtccagattttggcttaattgcaataaacgcataccctggcttatcttggtcggtaaagcactgtactgcctgcacaatagaaccaaatcgcgagctaacgaatgactcatagtcagttttagacacgcaacgcatttgagattcacgcttaatttgtgctaattcgcgaatacgttcaatgtcttcaggttccccaccaccatcagctccaacgtagtcaggagaatccgaccagttttcgatgattttgtttactacaatatattgcagagtatcagcatagctgaaatcagttgcgccattcgcagattcaccatcagtacgaatatattcaataactacctgcgcgcccttagtaggttttaatccaccaatgaaattactttcaagaactcctcctgctacagaggcttctgccacgccttcaccaaagaagaattcggtatttccgtcgacagtttcacgcatataataaattgttgaaatggatgaagcatgaaccattgacctgtctgtccagttagtccattcagcgccatcaacccacagcttaacctgcttacggtcaatcgactgatcacgaataacaataggtttcttcgggtcatatgacaattgagtacgaataatacgtccttgtgccaaattgacaataggaagatacctattaactccttctggtgctgaagtatctcttaaagcaataacattttcggtaacaacgaagttgtatgggtctactgatgaatcccgcgcatatgccaaaaacttagttccacgaggtatttttattgctggctctggatttggatgagttacctcaagcataatagacgcagtagccgctgatttggaacttggcaaatacccgttctgttgagctgcttgaacaacagaacttctcaagttagctgttccaataaagctttcgtataaagcagtattgccgaattgctgtatatagagagtgttatatgctaataaatctaatagcacatttaagcgcgaacccgcaaaatcaaaatcttggaactctttttgaccactaagccagttaataagctgatttttaatttcgtcgaatgttgctccagtaaatgcgtctgggatagcgtttgcagtacgcgttaactgataatttaaaggttctttaatagccattagtgtatgaatacctttgagcttgattgcgcgacagtgtcgccgcaagaaattggatcggccatttgaacagcttttttgcctgttacaaataccttggatgtgcgaggttgaacaacccctccatgcgtatcatgagggtcaaccgtcttggtgtgcggtgtaattgagtcaccatcaactaataccgctattccaccagtgaatactttactttgtgtagcatttacttctgtcggaggatacgcactatgcccggcagttacgcatttatcatatgaaagaccagccatttaattccccgcatatacgtaagcacgaagttggtcgccccatctgctccagttacctttaacggtttgagagtaaaccttttgctttttatattctgttacgattggagcactagaacctccggatgaacctccagacgattcttctgtcactgtatatattatctcaactgtataggtaaatgtcttctctagtgttctgggggctttccacagatataaatcagcagttttgggattaggtaaatcctcccacgctgaagcggacttcagctcatcgccttcacggtatttaagcacatcgtttccaaaagtaaaaactgagttataattacctttataataggtttcagacacagagatatcagatactggttgatagtcgataatatttattgattttaatgtttcgttggtagataattgagcagtaaagtactgctcaacgtattcaccttctattacttcgcgtaacgtggtattaataggaagtatatcagccatgattaacctacatcaattcgtgaaccatcaacagtgtattgaccttgggcgattgagctcatagaagccattgtctcagtccaagccccaccaacattccaattcacagtacctgctacttgccaagttaagttaccaccgacggttacgtcgtggttgccatctactttagtagtggcatcaccgttgacttggatatcagcatttccttcaacgactatcttaatgttacccttgacaaaaatagtaccatcgccttcaatagttttagtttcatttccacgtacataaagcgtgttatcgccatcaatttgctgtcgacgattatacatgttataataggtctcgttacctccaacgttaaccttcttatccccagagattaaaatatttccatcgccctgagtcatgtcatataaatcagctacagtttttctggtacggcgtccatcgggagctacttcttcgtatgaacctgttgggtgaacaatacgatagcgttcatagccaggtgtatcatcaaactcttggatatggcctgattctgtttccattgtgtgaacatatggatactgaccattatatgaagactcaggttctttgaaaagaattcttgaatcttccggagtccatgggtcttcaggattacctccagactttggttctacgtaagcagcagacaggttttttccttctggctttggagcaggaactccatatgattccatattacccgttagaataatcatggaaacacgagaagcacgaccttttgtctgattaaaccaaacagagtttcttgcttctgtataagcggttttccaatcaccaatgaacatggcatcaagcattttaccaaattttgctaaaccgcctacacccatttgaaagctcatattttctaaagccatctgccttgacttgttgactttagcatatacaggtcctacccgtgaatttgttttaatgtcagaaagcattttatcacgatcttgcttaaatagcgcaactgcttcgtccattgtaatgataccaggatttcctgtaacggtacgaccaacctgattggataaagttttattaatgacagacatatcacgtactttttgcgccatgataaggtgtccaataccgactgtaggatatccttctgtgtcccaatagaccttcaatctaagaccttcatccctattaagcatatctgttattgtaattgcaggatttgggtcttcaggaatatcacttaagtcagcgtcatcaggattaatgccaatgtctaaatttctgtcctggatgatatttggtacagcactatacccagtttcatcgccttgaactaacgggttagtatctgatcccacctgtctaggatattgacctgtaggatcagaaaagccttccgtgtagtttggctttgtttttctatgagcagaatatgttcctattaccaatcctgctgttttgaattcatcaagccataacccaaacaccgatgttccttctaccattccggttatagatgagccaactccagaaattccagctgagttggtaggctgaatcactgacatccagggaaggtcttcagtaggaagaccggttatagctccttgcaccttttcaaatggatgaagcccataaacacgtactcgcactcttccttgtttcaacgggtcttgtctgtcttcaacaacaccggtaaaccatttcaacgaatcattcatttcaatcatacaacttctccaattgtggtctgggatttatatcgacctgattcatattcactgtcaggagccttttccatttctcgtataatatcagaaagaaatgcttcaatatcactaggattgataatgtttatttggcgcagtttttcattttctataatagagtcttcataaatgtcaacaccagctaaagccccagtatattgagggtactgatgattaaagtcccctttatcataccaaatgcctgaattttcaggatattgctcgaggttataataacgattgccgtttgcatccacgtgatagagtatttggtctccacctacatctgcatatttttgttgtgcaaattgatagcatgcatcctgggttttaatccaatctctaaacgggtcatatacgttattacacattaaaagaatccagtacagctgactatttccataaagaatatatgctaattcttctggtctaggagctccacttatgtaatatgtttgtaaaagatagttttctgctacagtgtcgaaatatttgcgataattacgaaatatgtcagcggttgggatagcttttgccttagcaccttttacggtctttgcagaataatctatcggactaaaaaatgagaagagcatagtttatcctcttataaatattaataacagtatttataaggaggccactatggcatattctggcaaattcatgccacagaatctccacaaatataaaggcgactttagaaagattacttatcgttctacatgggaacagtacatgatgcgttggcttgacaatcatccagatgtagtccaatggaatagcgaagaagtagtcattccatactttagtaatgcagatggaaagaaacgccggtatttcatggatttctgggctaagttttctaatggtcaacagttcttttttgaagttaagccgaagaaagaaactagacctccggtcaaacccactaagttgacgacatcagcgaagaaacggtacattgatgaaatttacacttggtctgtaaacgttgataagtggaaagcagctcaagctactgccagtaaaatgggtatagaatttaggttaattaccgaagattcacttaaaaaattaggatggaaaggctgatggctatatttgaatttatcactgaagctgcagaatcgcctaaagctaaatcccgtagtgaaaatcaatgggtagcattaggagttgaatactctgctgctcgtaaaaaaggcatgacgtctaaatcattcgctgaaagcaaaggaataaatcctgctacgttcagtaaagcaatggctcgtcatgcatcaagaattaaaacggcaattaaagtagcagaaattgagaaaaaacctgctaacaaaatgaccaaacaagagcgtgctcttgtgatggtaaattcatttcgaagctctatcaaagataaaattcgtaatgaaggcgcagcagtaaacaataaatctgctaaatggtttgcagaaactataaagaaaaatatacgtggtcattctgtaaccaagcctcaacctggaaagctatatgcttacatgtatgacgctaagcacaaagacactcttccattctgggataaatttcctttgatagtttatcttggtcttggaaagcaaggtacaaccacattgatgtatgggttaaaccttcactacattccgccaaaggctcgtcagcagtttttagaagaacttcttaaacagtatgctaatacgccagtgatatctaataagaccagattaaagataaactggagccaagttaaaggatttgctggcgctgacaaaatgattaaagcatatattcctggtaatataaagggtgctttaattgagataaaaccggctgattgggcgaatgtagtcatgttaccactgcagcagttcatgtcgaaaggcaaacgctactctgctacttctgtatggaaatcataatgtctactggactgtttaatcaaactaacacaactaactttatattagaggtccctgatgggggcctcacccaagcgtttaaagctaatcttcaaacagctgtagttcctggaattcatattcctgctactgatactgtaggttcgcctcaaggcatgcatcgtgctaaattgcctgggtctacttttgagtttgacgctgttcctgttagatttttagtagatgaaaatcttgattcatgggtacaaatgtacaaatggatgttaagctgtcaaaactacattgaccgagacaagtctggatggaataacggcggtgaaggatttcctggtgcagttttaatgcatgttcttgataacgataaacatgatatagtattaactgtccgctacatcggaggttgggtgagtgatttatctgaaattgagtattctttaaccgaagaatccgacccagcaatggtatgtgtagcaactttgcagtacaaatacattgaagttgaaaaagatggtataataattactggtagaccttctgtcaatgatactcgcgaatcccagtatcaacagaaagttatgggaatgcatccttctatgaggtaataatttgaagcttttatttttgattggtaaaaaacgtagtggcaaagatacaactgctgactacattatggataattataacgcaacaaagcatcagttagcaggtccaattaaagatgcgttggctgatgcaatgcttactgagtggtatcgcgatacatcacgtcagtttcctcgcattactcggtcaatgattgaaggtattgattacgatcgtgagcaggatttaaatctgtctactaaagacgtgattcgtattatggcgaatgccattgaatatgtccatcatgatttgcctttacctggggtggtttatgatagcaagcgtaaaattcttgacggcgatacgatggaagtcatccgtcaagttgtaataaataaacctgttgagccatggtcaattcgtcgtctcatgcagacccttgggactgacattgtctgtgataagctcgatcgcatgtattgggtaaaacgattcactttggttatggctgatacttttggtgattatgattatttcattgtcccagatacccgccaagaccatgaacttgatgtagccagggcgatgggtgctacagttattcatgtagttcgtcctgtgcaagaaggttctaaaaaagatactcacgtcacagagcgtggacttccgattcgcgaaggcgatatcgtaataactaacgacggttctctagaagaactttattcaaaaatcaacactatattaggaattcaaaaatgactactgaacaactgcaagcccaagtcgatactctgaaagttcgtgtatttgacctgtctgaaaccatccaaggtctgtccgctctgcgtgcacagtatgaagaagtactacagaaactgattgctgtgtccggcgttgaaatcagtgaagatggtcaggttaaacttgatgacctggttgcaaaaatcgaagcacagttcgcagaagaaactactgaagaagctgatgcctaatgaacttcagtgattttagcactggtctatatgtagctgctaaattctctgagaaaactcttgatgctattgaggaccttcagcgtgagttgaaggtccctaatcctgtacctcgtcataagattcatacgacgatatgctattcaagagttcatgttccatacgtttgtgcttcaggaagttttgaagttgctacatcaggtaaacttgaagtatgggacacgcaagacggacgtacactagttcttaaactagattcagaatacttaaaattccgtcatcaatatgcaagagctttgggagcaactcatgatttcccagattactcaccgcacattactctcagctacaatgtaggtccagctcacttcgagggtgaagttcaagtgccggtagtgcttgacagagagtaccaagagccactaaaactggactggtcagaagatttgaaataggaatttatttcacaaagttgtttacaacgggttgtagtagtgatactataaccctatcaacttgaggagaataaaatgaaacgttgtgaattaattagaaatgttgcatcaaccatctgcatgggagcgttaggttttggcattataggtgcagcctttatgtctcttcctgaaacagtatcagtgttaagtgttgcatttctaatgggtatcatttctttcataatggataaaatagcacatgaaaaagattaagcagtggttcatcaaaaactatgatttaaaccgtgaagaagtaactaagtatgattatgttactttgggtgtaggactaggtgcactactggcagcactgcattcatcactacttgctattgcagtgcttcttattttggctcactacagctggaaacgtaagtaatgtatgcacttttaacttggtctaattattatcctgctcctggctctgaccaaatcagaggtgtctactctacagtagaagaatgctatgaagccctccagggaacgtatcaagactattttgagatactgaattcccgatttgaaaccgttgctaaaggttcaactgaagcatacaaagattaattgtgaggaaattgtgatgaatatcagagctgcatttaatactttctatcaagagaattataagcttcttgcacatgaatactatgatgcacaaggcgttccaattcctagtgatttagttacgcctaagcataccaaaaccgattctcttgacaatgaaatccagcccggtgatttagtatcatactactgtggtgggtcactttctgcagcaagcgttggtattttgctaggatttactcctaaaggttatcgtgtggttcctttccatacaagtccaattcctgagcaccgggtattgctctctcatatggattcaccacatagggtattcctggttaaatcaaagagctcaccgattgtgtaatatgctttaggttttctttgttattattaatctatcaactgctctgattaattttagagcagtataaataaaattacccattggggagttagaccgtaggggtagcgggacagactgtaaatctgttgctcaaaaggctcgagtggttcgactccattactccccaccaaatttagggatactagctcagttggttagagcaccggacttttaatccgggtgtccgaagttcgagtcttcggtgtcccaccaaattcgggtcgttggctgagagggtaagcgacggactgttaatccgtgtcagaaatgactaggcaggttcgatacctgcacggcccgccaaataaagaagtcagaagacgttctgataaatcgtcggcacagaattccctggcatggcgtttgtattaaggagtatgatttcatcctgcttaatgcttgttcatgttataatttcttacggcgttgaaagttcgctttcagggatacatcttagaacagagtgctaaacaagattcatctggtaccaaggtgatgagagtcctgttcccctttgcttcggcatcgtgccagagtatctctctgaaagcgaattatggacctatagtttagttggataaaatactcccctgtcacgggagagagcgcgagttcgatcctcgctaggtccgccaaataagaacgtggcagttcttgaagatgagtttgagtcctgtaagataatgccgaggacgaagctgtttgttcccacggaataagctctatattcgtaagattatatctttagcgtgttctacatcaagctacttgttagtacttcaagaacccggataaatgcggggtaacttcagttggtagaatgttgggctcatatcccgacacgcgcaggttcgagtcctgcctccgcctccaaataattggactatagacaagcggttaagtcaccggcctttgactccggtatctctggttcgaatccagatagtccagccaaattaatattcattcaacgcgtctacaggggttgaactgatcattcttctcttaatttcgtatgaagtcctcatgatggatggagtgaatattgatgtggccgtagttcagttggtagaactcgagattgtgattctcgtagtcgcggattcaaattccgccggccaccccaacattggagagtagcgctagtggtagcaaaccggacttgaaatccgggccatcggaaacggtgagggttcaactcctttactctccgccaaatttatgaaagttaaacgctgcccatagcagtggtacatcaacaattagatgattagctttccatgggagtatagctcatttggtagagctctcgaccgataatcgagcggtgactggttcgagtccagttactcccaccaaataacaggttcttagtataacggctattatgctgggctccaaacccagtgatgagggttcgattccttcagggcctgccaaatttgcatccatcgtataacggctattataggtggcttccacccacttgataagggttcgattccctttggatgctccaaattactccgtatagctcagcctggtagagcgttccatttgggatggaaaggtcgaatgttcgagtcattctatggagaccaaattaacggtatgacacaatacaagatggcgtaagctgagtagcgggattgcagtctcgttcagatatgctatcgagtatgggtgatatattaaacacatggattctgcaaagtcaatgtgactcggttcgagaccgggcataccgtccaatcacttgccattgagaattatattatgaaatattacggcttcaaaacatcccatttcgggaaagcatatcgtacagaaaacattgatagacgtcgagcatattacgaatcactgcataaagcaggacgttctcgtgcacgacaagaaggcaaaaaacaagcgaaggaaatagaatgaatatttttattggtgtatcaaatgacgtaaatgctattacggtgaagctgtctttggatggaccggttaatttagcattagggctttcatcttgtgctaaacgggatttaatgattaacgctgactttgcatatgcatttgatgaacgcaaaggtatgtgggtttggattaaatgccgatatgattcactgattaaatatgagtactttagtgaacgtgatattcaagaaattattgcttatcactctgggtgtaaaattaataaactgcggcaagttactccgttaaccgctgatactaatgtagagcaacttgtattagattttaaacaaatttgccaggcgaaatatgatgaaagattctaaaggtcgagaagtacaagttggtgatatcgttttctacggagaacgcacatacaataaaggtggtcgcggttctatgaagtgtggccgtattactgatattgcttcaggattggctaaagtagataacgactacgttgcaatgcgaagcaaatcattcgttaaggtttctcctatgttcgcaacaatgtgggaaaacggaacgattttcgagatttaatgctacaagaataacctgttattattactacatcaaaacaaacaaggaaaaagaatgaaacgtatcgcactgattgttgaccaagaagctatgttcgctgctaccggtaaatttcatccggtgagtaaatttgttgctcgcagcgagaaaatcgttggtctggtagaaactgtcgcaggtgatgtaattgtttctattaaaacatctgaaatttctccggtggttaaagtagcagttaaaaatgacttctgggaagtagctgattttatgtgtgagtaattctgcctagcaggtggataagcccgacaaggcgccctcttcggagggcttttataaaagtcgtaagatttctataaaggccctgtagctcaattggtagagcgttcccctcataagggattggttgcatgttcgagtctttgccagggtcaccaaattatcaactgaggaaattgaaatgcatattaaatttggacaagttattcctaaaggcttagcaatggcaattaccacttgggaaaatgatgccgaccgatattctacccaaatggtttatggcttagaaaaagaagagattaatcaagtaattcacgttcttgaatggttctcttctaatggtcggcgtggtgaataccttggaaataatgattacaaccatgaagcaattcttgaaaagcttcatactgaacaaaagtatgtaactcctgaattttccaagaaattctttggtgttgatgttcctgcatatgattgctcagacgaagagtttgatgcttatttagataatcattattcttgttcaaatgaagttatgtatgctattcaggcttggctaggtaatccgattgaatacgactatgatttcatgcgggtatttgagaaagtagaaatcttcgatattaaagaagaaatccgtattcctgacgccccggttgcattccatgttggaattacgtataaacaaaaagaaagtccgttaaaagttgattggttgaaatacgtgaaggaaaagtaaatggatattggttcaggtagttcatatccatcatgtgctttgagcaactttgctcctcataaatttatctatgatggcgtagaatgtgcctcaatggagggattcttgcagtccctcaaattttcttcgcctgaaatgcaagcacatgtatgtacactagttggtaaatcggctaagttcaaaggtaaaaagaaacggtggtggccaactcaaacgctttattggaaaggcgtgccaatccatcgtgcttcagaagcgtatcagaatttactgacaggagcatacgatgcacttagtaaaaatgaaggattcagaaaagctttggctgctacccggaatgctacgctcactcacagtatgggtaaaaataaaatttctgagacgattttgactgaacgcgaattctgtaatcagctttatcgtttaagaaatgctataaataatcagtaatataattatattgttcagtgttgaaatcggtagacatggtgacggacaccttttgagctcgcatattgcatcatatgctggcgacggtggtaaatcgctgacggaatcagtcgtgcaggttcaagtcctgcctgaacaagtatttgcgtcgatgttggaattggtagacaaaggagacttaaaatctcccgggattaaacccgtacgagttcgagtctcgttcgacgcaccaaattgtgctctatccaattataaatactcctatattgtaggagattggaatgagtatttgcaaacattgtcataaagaatttgacatatctgataaacctaaaggctggatggctaatcactctagatggtgtgaattaaatccgaaaagaaagaattacggaaaagaatcagtggcagcaatgaattctgcccgaattaaaaacggtaacttaaatcagtatgtaaaagctaaaaatttaggttatacttttactgtatcggatgaaactaaacagaaactgagtatagcttctaaaggaagaataaaaccaaaagaagaatgtattaaaatttctaatgctcgcaagaaatggatattagaaaatccagaaaaacacccatggaaaagaaatgataaatttaaatcaaagccatgcgagcatcttaaagaaatcttaattgacttaggtatttcatttatagaagaatatcaaccaattaaagatagaggtttttctatagatattgctattcctgataaaatgatagcaattgaagttaatggaaatcagcattattctgatcctaaattaggtgtattaaataactattacaaagaaagacatgatttaatatctaacgcaggatggaaaatacatgaaattcactatgcgaatgtttataatgaaacgtttgttgaaaaattaattgcccttatagtgtaatggattagcacacgatcgttctaaggtcggtagtccgggttcgagtcctggtaggggtaccaaatttaaatcacgccgatttagctcagctggtagagcgcttcacttgtaatgaagatgtcgcgggttcgactcctgcaatcggcaccaaattcgaagggaaacttgcgtatgccctcgttgagtcgtcagatagaagagaatggttcgtccattgccgctagtcggttgttccctgtcgcaagcataacctcctgacgctatactcctttggatgagactgatgcctccgagtccaaaggaatgaatttcgcaggtcatctgccagtaggtgatgctgtcgattctcagagccctgtcttcggacggggctttttagtatacaataatatcaaaactacagcccagataccttctagaggtcgtctgggcatttctatatccccagctgtataaatccattctactctctagaaagtccttccagattccctaaaattatttgaaaatttgtgcacaaagttgtttacatcagtagtcaactaggttactatagctacatcgaaacaaaacagagtaacggagaataaaatgtctaaattcaactttatccaaattgaacgtggttataatcaatacggtactcctgaccgttatcgtgcggtttggattaaaggtgaacatgagaatgcagtgttcaacgtagcagaaactcgtgaactgaaagatttgattaaacacgttcgcaaagattggcctgctgttgaagagtactacgttcgagtttaccatgaagaagctgctacggttcaaatggctatcaagtttgctaaaaccgttcctgctttggttaaacgaattgaagcggtaattaactgctaataattttggggagttataatgaactccccacctactgaggaaattgatatgtatcaggataagttgagattagtagcgcaaacttattttaaatcttttgctaggctgtttggtgaaactccaaattttccatccggtgaagaacgaatggctgctctgaaaactattgagaacctggtgatttcaacttacaacgagtttgccgatgacccggcagttaatcgtcttgttgatatcgcagttttggacaaaatggaggaactcattaatgcatacaaatgaagttccaaaaacccttgctgatattcgtcttgaagctaaaatagccatcgagcgtttaattaaagcaacagtagaagaaggcaaagagtctgtacttattctcggattagaatcatacgttactgattacatcgagatattcgagcgcagcaaaaatgaacagggtctaatcattaaaccatatgtttatgattggattaatccgtacgaataaaccaccataactattgaaaggaaataaaatgtctattctgaaaaaacttgttgaattcatccgttctaaattcggtaccttcgttgcacagaacacttctgttgaagaccagtacaccactgcagcaaatcgtattattgatgaaatcactaaactgcgtaccacgcatgttaaatcagtaaatgaagaaaagcgtctgctgaaacttgctgacgaaaaagaccaggcaggtgcttccaaagagcgtgaaattcgtcgcttgatggcagaaggtatgaatgtagaaacccatgctaaactgggtcttctgtatcgtcgtactgctaaggctttacgtgataaagctgccgaatataaagaaatgcgggcccaaattgaagaaactgtagttaagcttgatgaccagcgtcttgatttggcagtgaaactcgaatacatccgtgagacccgtaatgcttctgctctgggtattacctctgctgatgacgtgattgaaatcgcggaactcgctaaagtagatgtacaagacatcatgatgaaagttgaaaccttcagcggtactcagcctggtattgaaaccaccactgctgatgtccaggaatatctggaaagtctgaagtaattttaccggggccttcgggccccctaacttggataataaaatgttatatgaatgcgctggagatattccaatggcaacacctcaaattaaagaattaattgcagcaggattcccaacagaaatcactgatattcttgagaaatttgcttgtcttgatactcggcctgagaattggaaaactcgctataacgggtataacactacagttttgcctcgagctatcgttcttaaagactattccaagctgaaaaacttaatttctagcatttcgtctatttccgatggagttaagcttgtagatatctttgcacttcggtacggaatttattcttttaacgattctccatcaaatctaacatcagcccgtgctaatgccgatggatattctacctctggttcaacaacgtacaccatagttattgagattattcataataaaaatagctatcgtcttggcattaacctagttaaatatgtgacatctaaagatgattacatcaattacttaaattactgcattaatgaattgccaccaaaggttatgagtatgtttgactctaacaacatggtaggcaaacaattaatcattgatgaatttatcaaatactgccgtgagagggtgcagaaatgagtaacttatatctgccaagtgaacctcccgtttataattatgtctataaatttgaccaaactgactatgttttcattccagggatagtctgtgctgctggaactatgataacgcttatcataatcgacgtaatgaatttggctgaaattagcagtacatcattagtgaatgtactattacttacgtggggattaataggtttacttggtctaggattaattgagctatttcgttgggtaaagtatgttaagcataattatgaacgaaaggctgaatggaaagagcaatgtaaaaatttaacccttgaatggaatcgcaaaaagtcgcttgagtttgttaaagaggtgagaagaaaatgaatgaatgtaaacctgatggattttggaaccaagacggcctggcgccagcttttggaatcgtgacatggattttatattgtgctttcgtaattattggagggacattatttgggttgaacgtctcagaatttatgattatgcttttatttttgggtgttttcgcattcagcctcatgtggatgctgattatcgcgttgattaattgctgtacatttttagtttaccgaatgaaatacaagaagtggaaagaacaagaagattttaacgcctggattaggagctgccgcaaatgattaagacttgttaccgtggaatgattaaatgtgatgagcctgggtatttcttcctatttctgcttatttggttttcattatcagcctttgttggatttggaacattctgggggttctacttcttttctccagtatttggcgatgcgttatattacataggctggatgtcaggtgttggaacttggtttgcaatacttgcccggtggttgcaattcgtttcccagcggcagaggggtgtattcgataagcccaaagtaaagaaagaaaaatctaaagatgactctcgtagtgaaactttatcctggattaaggagatgaaataatggctattgcagtgcatgtaaaatttgaaaatggtgatactcgccttctgtgttacagtgataatgaatcactgagcggtatcgagatttcactcaaagaagaactgcttggtattaatggacctatctgtgatttctcggtagagggttcatataattgtgatggtgtactagagtctatggtctatactgccatggaagatattcttgaagaaagttggaatgaatgccaatgaaagagctcagtgcaggaatcttattctttaccgatgacaaacggcttttcatgggtcgtatgacaaatacatatgtccagggcagaggctctagatgggatattccgaaaggacatgttgagcctggtgaaactccaaaagaagctgctattcgtgaatgccaggaagaaacagggtttactgggtttgaccaagaccttttatatgaccttggacgacatgattatgccagcaataaggatattcatctgtttggatatacgctccctgtgagcccagaaatgttcagaaattgccgttgtacagcttaccataaagatgaaaatggaattaattttcctgaaatcgatgcatttgctttaattaaaccttctcaatggaaatatgtgatgggaccaagtttgtataaaatcatgacacagatgtatagcacagcccagtgaggttactatggaagaagccgttgaattaggcattccacacatttataagcatgaactacgatttgttcgtgacggaagatggattagcatatttcatcctcgagataagttgtcacgtacactaatgaagtcacggtatgtcttcagtgatagtgagtatgcaaaatcgtcgtattacatggcagaaaagttatgtccaggatttaatgaaattccagaggacgatagaagagattatgtgtggtggaaaggtaaatggacgccatacgagaagtgtagccttgaattattcatagccaagtgcagggccaaataaatactcctataattaataggaggtccttatggatatttttggcatgctgcgtattgatgaaggatacgatagcaaaatttataaagataccgaagggtattggactattggtattggccacttactgactaaagacccgtcaaaatctttggctatttctaacctggacaagctggtaggtcgttctacaggtggacaaattactcaggctgaggcagaagtaatttttgccaaagatgttgagaaggcaattaaaggtattgttgctaatgctacattaaacccggtatataatgtattagatgatgttcgtagagctgctctgattaacatggtattccaaatgggtgtgtctggtgtagccgggttcccagcttcaatgaagttattactcgctaaaaagtgggaagctgctgccaaggaacttgcaaattcacgttggtatcgtcagacaccaaatcgtgctcgtcgtgtaattgaaacaatgcggaccggaacttggtctgcttatcaaggaaaataaatgaaaacttatcaagaatttttaaatgaatcccgtttagcaacagttggcgtaatgactgaatctgttggaagtaatcttctgaaatttaaaaaaggtcagaagatgaccgccacgttagaagatggtacagaaattgaaatggacgttgttggatataactacgtagtagacggcaagttatataataagagccatgccaagtttgattcatttgatgatttcacctcttctattgaagatgagtcttctcgcaaagcagtagcatctggcgatgcacgctctttaatggcacttggtcatgagcgtattaagtctaagcagaacaaacctggcgaagataactttgcattagtaggttatcagtctggcaaaacttctaacggttaccaacgtactgttaccatgtacatgcgtaatggcaagattgcgttcgtaaacgatcgcggcgctattcgttacgctaaatcaattaagtagtttacattgagacggtaatgtggtatagtagccttattaaatggaggctactatgacacgtattaacttaactttggtatctgaacttgctgatcagcacttaatggctgagtatcgtgaacttcctcgtgtattcggagctgttcgtaagcgattagccgaaggaaagaaattcgatgatattcctaaagattttcgtcttgggtctggtcatgtgaaattcttttatgataaaattggatttttatacttacgccagcaagaaataattgaagaatgcctagaacgaggatttgctatagcaaatacccgtgttgacgttcatgacattccgttatgtttaatgaacgattttgttccaaccgaggcggatattgctttaagccagaaacgattggacgaaaaaattgctcaaaagcctaagtggtataaacattatggtaaggctatttacaactaagttaaactttgatagaatgtttctatcaacttaaaggatataaaatgaaaacatataaagaatttattactgaagcttctgtaggaaaggtcaatggcattaataaagatgagtggacctaccgaggaaacggttttgaccctaaaacagctcctattgagcggtatttagctacaaaggcttccgactttaaagccttcgcctgggaaggacttcgctggcgtaacgatctaaatattgaagccgatgggcttaaatttggtcatattcaagatgttgttgctagtaacttagacgcagcttttgttaaagccgatgcagaccttcggcgctggaatttaaaactattctctaaacagaaaggcccggtatttgtacctaaagcaggtaaatgggttattgataataaattggctaaggctgtcaactttgcaggccttgaattcgccaagcataaggcagcctggaaaaatcttgacgccatggccttccgtaaagaattcgccgagattatgactaaaggcggatttaaggcagatttagatacctctaaaggtacgtttaaagacgctaatgttcaatacgcttacgccgttgctaatgcagcccgtaattaaaactaattcctaataaagctaaacacgacctctcctcatgaacgtcgagtcctctgagtgaagtagctttccctacctgtaataaggtcgagcgcaagtgcggtaaggggtttacatagtgtgtcgatggattaaacatgtgccaaggaatggccccatttaatttaaaacttttacctttctgttggatttaaaatgaaaacttacaaagaatttatcaccgaagcaaaagcaccaaaagtattccaaatcggtgcacaaggaaatttagacaaagaatacgttgacgccatcgtaaaaagcattgttgcccaaggcgtgcaagtagatgcagttgaatttactaaaggcagcacctttaatattgttgtatctaagggttctttggctaaagttaaaaaggcttggggcgttatggcagcttacgaggtagatgattctgctccgggaccaaaagtacgaatgaatacccttaagggaggccgggaatacgtttagacttattgtctatacttatcaaaatattacacggactaagcacgcgccaaggaatggcccccctttaactggaatctaaaatgaaacacttaactcccatttatttgaccctgatgcatgctttcagagacgctgcagacagacgattgaataatcccaactacagtttttatgaaccgtcttgccttatgcgagagtacggtacccttcgtctagacggtggaagacaaaccggaaagaccacagccttatgtcaattcgctaccgattggttgcttgaagatggttcggttataatcttatctactcgatacacacaatcatctgaattgatggaaggtattctacgagaatataattcatcgcatttaattaataaattaccggctaacgagatagctaaatcaattgttccgatgacaatcagagaatttctatccaatgattcctcttacaagtttaggggaagaaagtttggaagagcattaattatcattgaagaaccaatgaaagttcccgatatgatgaagttctatgatatgtaccaggaagctatcagatggtctatgcctaatgataccttgcctttatttttcgtgataggaatgcaatgatgacacagacagaaattgttgatatgattacagtgatggaaaatacaggatttgccgatatgaagcaattaataacaatggttacggctggcaacctgcttgagtacaagcgctacaagtttctgtctggcccgttcaaaggcgcagaattcatttctaacgctcctaacacgaagtggatgaatcgctatcctaattttagaattgagtttatatctggcaagctcaaaggcgtgattagttcaagcttaatcacatatgaccaacgcattcaagagaaaacaatgcaatggctgaaattgttataaagtgtcctccacatttagttgagagcttctgtgaatggttcagtaattctggcgagcaagatttctatgaagcccatcagaacggaacttggaatgaagccacaaaacagtgggaagaagctacaacgtatataggcactcgcggatatggagttgacgagcctattgaaattgtagagtacgataaagaaactgatgaagaagttacttatcatgaagataaaataacttatttagaagcagctgcaaagtttcattcagacgaatggaataaaatgagtgtaattaccgcatacatgcatggttggaataaagaatctaattaagaggaaatatgaaagcatatcaaattcttgaaggtgaacttaaaggcaccatttacatcgaagatggtgatgacgcacgagtaatcgtttcaaaagttcttaaagaagatactattacggatgctgaaactttttatggctacaaggcgcgtgaagtagaaattgaataccagccaacggtaaaaattgaaggcggtcagcacctgaacgttaacgtgctgcgtcgtgaaactctgctggacgcggttgagcatccggaaaaatatccgcagctgaccattcgtgtttctggctacgcggtacgcttcaactccctgacgtcggaacagcagcgcgacgttatcgctcgtactttcacagaggcactataatgtcaatcgaagatattaaaggatacaagccacataccaatgaaaaaattggtaaagtgaatgctatcaaagacgctgagactcgtcttggtcttatctttactgctcttgaagaagaggcattaatcaactaccaagagtcagccaatgaacccaagcaggtactcgatgaagcatacgaacgtattgcccagattcgtacagcaaaacaaaaactgaaggaagcttctatgtgggcttgccgtgcagtgttctgtccagaagaaaaatattaaaaagtagtttactttccttacgggccatgatactatggccctacacacaaaggagaatgaactatgtcaactaacccagaagtattcattcgcagaactaaactgcgtcgtaagtttgaggaagcttttcgctctttgaatttatcagttcgtgcccgagctaaggctgagggcaaagagcctttcttcactaagtactctgatcatttgttggaccgtgctatccaacgtgaaattgatgaagagtatgtattctctgttctttccaaaattcctaatcatcttaaagaaattaatgaatttttagcaatgccttggcttccaattgacccaaaagacattgatgaaaatatcgagtataaacccatgcggttagaaattacggatggaaatctgtggctaggatttactatggatattccaagaccgggaaaaggacctagcataaagtgtcgtatggcattcgttaatgataaacgtttgaaaggtaaaatcagcacaaaagttatacacattaattgaggtaaacatgaaaaaagcgcttatcggtctaatggccttatgttcaacggcctttgggtctgagccaactttcagtaatgttcaacttgacaacttgcattacgcatataattttggtgaacaatatcaaaaatccggaaaggaaaaatctccgcataaccgatatgataataacggcttaggatatataatggctgctatatcatggaaagaatcttcggcaggagccaatttaaaagcaggaaaggggcatcattcttatggggtatttcaaaattacttgcctacggttaaagccagagctaaactggaaggtaaaaaccttagtgattctgaaataagaaaaatgcttaaatctagacagaattccgcggaatgggcatatattgagctttcatattggttaaatatacataacggcaatatgcgaaaagctcttgctagttataacgcaggatggaatgtcaaaagaggaaactcttatgcatcagatgtcctagagaaagctcatttcttaaagaaacataaaatgctacatataaaggtggaataatgataaagtacgccgcgcttcttggattagtattggcattctctgttaatgctgaaaattcaatgtcggattcacttcgtatcgctaaaacattttgcaatacgaactctgaatgtgttgatatattagcgcttgaattagattcggcattcagcgatggagtaaaagattcacgtagcccggctcagtggacaacactaataaatcgtaaggctaagagcatgaaagatttatgtgtcaatgctcctaacgaaaatatatgtttaatgtatcgtgaccaattaatggctcgttatatgtcaggactatcgtcaaaatgaaaaaagcggctattttattatgctgcgcattttcagttaatgcctgggaaaaactcccaggctatcctgaaactgtacttgcagcacagggtactaaaatagaaagcaatggcccattcaagaacaacattgaaatagcatttgttcctagcagtagaaaattgttaatgtcattttataattatcaagataaagatgaccaggtaatagttccacacgtcgaatataatgctcgtggatgtggaatgcagagcgatggcgtttctattgacggagtaatgcaccctaaagaacaaggcgtgttaaaccctatccttaactgtaacaatgctatatttttaagagtatacaataatcttaatgaatatgcaacttataaaattccgtaggtgaataaatgattactggatatatcaagggtaatattgtagagttattcatgaagcatgaatgcgatattgctcatggatgtaattgctttactacaatgggtgccggtgtagcaggacaacttgctaaagcatatcctccaattctcgatattgacattgatgaagaccgttattatgacaacaatttagctaagcttggaactcatacacgagctacccacaagaatggcactgcatattgttataatctatacactcagtatgcgccaggtccaaatgttgattacggtgcaatttttaatgcattccatgagctaaattctggtcgtgttgtttataatcgtcctctatacattccaaaaattggagctggtattgctggcggtgattgggaactaattgagaaattaatcaatttagcaacacctgatattgacattatggtggtagaatatgaagaggctaaaagctaaatctgttttgttagaggtaaatagatgattactaaagagcaaaaaactaaactgtggcagttgattgatgattatgctggtgctgagcaagtagtagctattagtgccatttacggaaatggtctacccgaagaatacgatgaactcattcgttctaagaatgctatttctgattttatggagaccctttaatggctcagctttatttcaactatgcgagtatgaacgcaggcaaatcagctaaccttcttacagcagctcataactataaagaacgaggaatgggaactctcattctgaaacctgctattgatactcgggattcggcaacggaagttacttctcgtattggtctacgtcatgaagctaatacagtagacgaatctattgacatacttgaatttttcaagtgggcacaaacgcaacgtgatattcattgtgtatttgtagatgaagcacaattcttgactgctgagcatgttcttcagctgtgtaaaatcgttgacttgtatgatgttccagtaatggcatatgggcttcgcactgattttcgcggcgagttattcgaaggttctaaagctcttctttctgtagccgataaacttgttgagctcaagggcgtttgccactgtggacgtaaggctacaatggtagctcgtattgacgaaaacggaaatgctattaccgatggtgaagtagtagaacttggtggtgaagacaaatacgtttctctttgtcgtaaacactggtgcgaactggtaggtgtttataatgaagccaagaacgtataacactatcctgatgctaattatgggtatgctattcatttggattggtgtggcagcatctatacaaagcgatagacgagaagaaatgcaaaatcgtcttaattccgaatgtaaagtattggcacagggtaaagactttattgctaatacgaatgggtgttatattaaacatgagtagcctatttgctatagcgggtggtatagtactagtactcgtgattgggtttttactatacgtaatattgctttcgttattggtttaatatgaaaaaatatgtgatgtgttatcgttgtcttcatgtatatgattacaacactgctccaaagactgctaccaagcgtcttaaaaccaaagaacctgaatgtccaaaatgtaaatgcaaggtcatctattcatgaatattgaatttttcaagtcaggattttactatcgttgaggtaatttaacttaacgaggtaataatgtctagaacaattcgccgtaaaggctggcatgtagtaaaatcttccaaatggaacgatcagaataataacgaatttgcttatattaaaagctataacgaatacgttaaaactcagaaagataaagaaaaccagcagaaatatgtagaattgcgtatttctgaaaacagggaaagaccgttagaggccaagaaactgatcgctaaatcaaagcgtgatggattctggaaaactctacgttggacccgttatgcaatgccagttccgcgtttatttcataaagccgaaattaagcatgcattgaagtatgatgaagaatataactgggacgaagccggtgctagaaccattgagcaaggcatctgcgaatggctttgggattaagtaacacatacttatataaatactattactaactgatgaggtgtatatgcagcatttaagtgaaaagcaacttcgtaatcttactgtagaacaactggacgaacttcgtcgtgagattgggcatggtatttcgcaccttcaggaagaaattcgtcagcacagttcaaaagcagattatacccgtaaacgtaagctggaaaaatacctcaaagaagttaaggctgtacttcagcacaaacgtaatactggacaaaaataataggaggccgtatggcctttaaaccaatttgcttagccctggtgttgggctgcgggatttcattcccagctgcatcacacgacgacatttcggattataactcgtatgttgagggagctctacaagtttatgctaaatttaaggagcctagtaagcaagagtctgaacagttctattctttcatacaaagtaaatggaagagcgagtcttgttctaaagattgtgattctttaggacgttcagcaggtgaagaatatgctaaccgcatgaggatacaactcgataatgaagttcaatgattttgtaaaggacggtaaacttactccacaagatgaattcatcggtttacttatggcgtctcaggcgtattttcattcagcgcattttgataccaaatcgtatgccagacataaagcgtatgaagttttctttaacgagattccagatttgatagatgcttttggtgagcagtggttaggattctcaggtaagagttatacaccggctttaccatcacagaaagagctgccaaaggacaccattgaaatgctagacctcattctggctaaggccgatggtatctacaagtcagttcctgccgccctccaaagtgttctggatgacattacaggtctatgctacaagactaagtatttgttatcattgcagtaataccctccgcctccttcgggaggcattttcttttcaaaaagttgtttacttcccttcattacatgatactatagacatatcaacaaccaaacgagaaaaacattatgattaagttaactaccgagcttcaacctggaaaaatcttttatcacgtgtgtggtgttaatcgcactgaaaccaaaaccggcgaaataacgcgttatattgttgcttcaggcacatatgatgtagaacttggcatgttgggtgtatattcacgtaaatctcccttctttcaggtgatttgtgaatatgaaaattatcatggaaaaattgaaagttattcaactgaacggtcggcccatgatatgggtgtattcaagccaggtgaaaagcgttcggtgcataatcttaatcgtgggttttggacgcgtgaagaagctgaacagttcattaaagaactgcaagaagataagttcagcgatccagatgaccaagcatacgctgacagattaactcctattgaagacttccgtcgtcagaaagaatttatggattcttaccttgactcttgtgattacgattactacgactttgatgatggcgaagaatgagaaacgttttacttatcatctatattgtagtacaataccagcatccgatgtttacatataatttggtgcaaatgattctggagagtttgaaatgaatggatggggtccatcagatgacggatttgcaactcgtgaagctacaatagcagacgggattgaatgggcccgtcttcagaaacagctccaagaacagcgggaatccgaagagttctgtgttgattgtgatgaggaaatcccagtagctcgtcgccttcttgttaaaggctgtcaacggtgtgtagaatgtcaaggaaagtgggacagtgtaatgacttctgcttataatcgtcgtggttcaaaagattcacaattgaggtaattatggaaagtattcttgatagtaccaatttagataatccgtacagcgatgtgcatgtaaaggttgtgaattcgtatttcactaaaaagttgagtcgtatcgtgctaaaacaaggcaatgatataattcatcttgatactaaacaaattgattcattaattcaattcttgatagaggcaaaagatggcgagtaaattagaatgggacggaaaatcccgtaaaggcgatgcagtaattgaggacgaaagtccatacattaatgatttgcatctgactaccgtagagctatacggttctacacttattgaaattgagcgcaacggtactatcctgatgattgataaatccgatgctgaacagctcgtaaaatatcttgtaactatgattccgactatgaaggactgataatgaatattaataaaaactcttggcatttcaaaatgaacctgtggtttaaatctgacaacatgtggaaaatgccaaaaacactgtgcggatacttttggacaacagttcttcatgttgtgttttcttcggcgattattacattcatcggttctgttgcatggatgttcggttggccgattgtggcagagacaggaattctcgcttggatgggtattagtttatccgcgttttggttaaatgttatagcagtaccagttggcgcagcggttatagcagcatttatgcttttgtttgcagctatagcttttggatttatttttggtttagaaaaatttaaacattaccgtatccagaaaaagtataccaagaaactcgctcgggtaaaagctggtcttccggcagaagccgaacctttggtgttcatccagtatttaaaagctcgtaagcagaaagtctgcccaatgattgattatgtagaaggtgataaatgaaacgttttattcgcacgaaatttgaagaaagccttgttgaaaagccgttaaaggtaggtgataaagtagaaattggctttgacaatcaaagtaatcggcttgagcttgaagttgaatttatttctacgttcaaatgtagctcagcgcatacagtatcgattttctttaaaagtaaagacaccaaaatcgtagtatattacgaccatagcagccgagaaacaactactgtagtatatccaaaagacggctaccgtggaatgtatatcgatgattacctaaatgaatcagcagacgatggattttatatctgcaaacttttacccggtggttctaagtcggtaattaatctcagcagccttaaatacaccgtttacgagaagtgtaaagttaatgttcctcttgtagttggtgataaattctctacaactaataactgctatgaagtactagcaattgcagcagatggaagcatgttttgccagaacgataaaggaaaagctcacgtgtttagtacaaatgacatctcgctcgttaaatcaatgctagatattacagtaggtgaacctagtgaagaatgatcaagtttatatcgttaacggccttcgggccgtctttcgtgctaaaaccgaacgtggtataatttctacatatcctattgctgaatttacttttgatgacggcgaaaagattactgttaaatttattcctttgactggcaagtacagcggcaaagataatattgatttagacatatattatgaaggcggggtatggaaattgaaatcgtaactactaagaaaaaacttagtatgagtattgtaaaacagatgcctctggcttcagccgaaaacattaaattcgcaatgatggacccagaatcacgggtcctaggatatatcaatgcgtttcgctggaacagacttgacatccaggtggcaatcattagcacaggaattgattgggcattagttcctatgtatgaaaccacactgcgtgaagaaacctgtcgtgaacagcatcctgatggacaagagtaccatacacatgaagtagtgtattattacactagtcaaaaaattggtaatgtttaccgtacatcaaaaagaactactgataaagctcgagcagaagaagccgtcaagcgttctaatgcattagttaaattcgctaaagggaatcatatctacttatgaaaacaatcgtaaaatcttattttggttcgcatctgtatggtacttcaactcctgaatcagatgtggatttcaaagaaatctttgttcctcatccgcgtgatattctgatgtgtcaagcgatgaatcatactaaccgtaatacgaataacagtgcaaccaaaaatactaaagatgacattgaccatgagctgttcagtttgaaatacttcttcaaactcgctgctgatggtgaaactgtcgcgttggatatgcttcatactccatcggaattggtagttgcatctgaccttcctgaagtatggaaattcattcaagacaaccgagctcgtttctataccacggacatgaaggcttatcttggatatgtccgtaagcaagcaggtaagtatggcgttaagggttctcgtttagctgatttgcataaagtcctggatgttatccgagacgttcccgaatggaaatatgacgatcgccctcaacaaaaaggtatcaacgagcgttggaaagttaaggacatcgccgatcgtcttcctgttggtgaattccttgagtggacaacctttacagaccataaatcaggtcagcagtatttctataacgtgttaggtcgtaaattccagacaactatcactgttaaagaaatgaagtactcccttgagaagcttgatgctgaatatggcgaacgcgctcgtaaggcagaagctaacgaaggtgtagattggaaagcactaagtcatgcccttcgtggtggtcttcagctgcaggagatttattcctccggtgaccttaagtatcctctggcgcaggctcccttgattaagaaaatcaaagcgggtgagttaccgttcaaagaagttcaggatattttggaaacgaccgttgacgcagttgaacgcctggctcatcaagccgagaagaacggactgcctaagaaagtagacatgaagttctgggacgatttcgtcgagaaggtttatcttgaaaaccacaattcttactacaaatgatacaatgaaggtcttcttgaattacggaagacctcataaaggtagacggtggtatttggaagcagtttgcagagagactggtcgtagagaaaatgctaaattctctgctcgaccaactcgaaaacaaatccaccgatttatgtcatgggccggagaagagctccggttctcactttattgggctgaaatatgattttactgtggagcgtagtagtgccaatcgttgttgcaataatttactttgtcgtgggttggtctgtctgtaagcatctaatcaaaaatggaaccatcgagaaagcaggagagtattggttttatctcatcttttggttccctgcgtttattgccggagcgattatcatgttcttccgctgggcaggtaaacttccaaaacgtatagcagaaaatgctatcaataagcatgcataactgaggagccttcgggctcctctttttgtttcaaaagaatgcacaaagtagtatacaagctcacgagctggtgatactatagacccgtaccacccaaacagataacggagaataaaatgaaaactttagaaatcgttgtaaacaacattgataaagcctttaaagctgctgaagctcacggcgtagaatttgaaccaatgatggtaggagaagcgttctctaaacttgctatcatccgtggtgaaactgacaacttgattgattttgtagatgacttctatctcggttcaaaggttcgtccttactacatcaatgaaattttagaaaaataattaaaaagtagtttactttggagctgtagaatgatactatagctccatcaaaacaaaacagagtaacggagaataaaatgtcaactatcaccatcaagaaagggatttacttcggcaaagagatttcaggtacgtatgagttactcggtgagtggttcccggatagcttaagtgctgaagattctcgtcagggtgatggtaaagtctttgttgaactgaatggtaaaaagcgtggtgtttgggtattcaaagatgatattacagttgacggtgtagctgctaaaattgaagttgttgaatccgttgatgaaatgaaagagcgtatcaagaaacgctttaacgtcatgggattaatgactaacggtttaattcatgggaatattcgttctctgattatctccggagcagcaggtatcggtaagacttactctttggacaaagcattacaacatgctcatgatactaacgctattgattataaatcagtgaacggtaaaatctcaggaattggtttgtactgccgtctttgggaatcacgtgaagcaaattcagttctgctcattgacgatgtggatgtattctctgatatggacattcttaaccttctgaaagctgctttggattcaggggagaaacggaaagtttgctggagcactgcatcttctttcttggaagataaaggaattcctaatgagtttgagtttgaaggtactgtggtctttatcactaacgttgatattgaccgtgaattagagcgcggttctaaacttgctccgcatcttcaagctctggtatcacgttcggtttatcttgaccttggtgttcacactaatgaagagattatggtccgagttcaagatgtaataatgactacttctatgttacagaaccgtgggttaagaaattccgaagttattgaagttttggaatttatgaaagataacgtaaatcgtctgcgtaacgtatctctccgtactgctctttatattggtgatttcgtcgcgactgaccgtaaaaactggcgtgaaattgctgaagtaacaatgctgaaataatttaaatgggaggagaaatcctccctaactgaggaaaatataatggctactttgatttctaatgatgtaaagcgtgttttgtttaaaggcggaatgtatatcgttgatactcctaaaggtgatacttcttcctggactattaacgagtggattaattacattgatgaaaatggagcgtgggtacaatgagtttagcagctattaaagatattgaatgttggttaaacgatattaaagtatatccgcctggtcatatctttgcgggtaaacccaagggtaaagcagagaaagcctgtgaagcaatctgtgaaaagctttataagtttaattttggcgataagaaaaatgtattagctgaagtccattcttcttatcatgaactacgtgtaatggtaaacgtatttcgtgctcctccattcattgagctcaggaaagaatacgctaataaagtatttgatactttccttgcaaatgtacaggatgcagtaaagcatttagacgaaatgcataaacaacaccaagatttaaatgcctattataagccttggcgtaaatcataccaagagcttaaaaatcgtattgaacttattcgttatgaggtgctaaaatgaaatgggtaatgacagaaagtgaagcctatgcagcgtatgtttcaccagacgatcgccgtagtgagttgtttggttattatggttcatattgcgttgccgaagaagcagttaaggggcagtcttggtggggctcagatggtacagttaatcgtaagccaacggaactaattacattcaccgatgaaaatggtgaatcatggacattccctaaaaaggctgctatcaccgtccaggaagaaacacctgaagctaagcgtaaacggttggaaaaaattaaagaagccgctttggcgaaattaaatcccgacgaacgagaggccctcggattatgagcaaagaatttagtactactcgtatggtagatgctttcggatatccatgcaatggttatcgcgaattcattcatccggaagttgaaaatcaatttaaagaagttgtaagaaatattttgctcaatgcgtttaaaactcaaggaaccaacccacgggatttaggcatttatcttgaagaagcaatcagagaagtccaaaagagcgtatcggctaaacttcactgggctgaagaaaatattgcgtggtcaaacaagaaacgttctgatttaaattggcccgctgatcgtgagcaaatcgtcaattatgctaaggtgtaataatgttaaaaacctatgaagttaaatttaaacgctttattgatggcaaatgctatgacaataaagaacgttcaacacgaatttctgcgccgtcagcgtaccaagcagtgtttcagcatgggcagaccaatggcgtggcattccctgagcaagacgttgaagatattatcttagatgttattgaggtaaaaggtgtttagtactatagtgtctatacatgcgtattacgaagggcagttaaatgctgcccgaaccaagtataaacgagggatggaggaatctgtggaatgtctcaaaggtattcagacgtttgcccagaagacccagaacctcatcttgatggaccgtaaacaggtctcattggctgaagagctaaaagcctctaagatgattatagaagacaataggaaataccaactgaaattgcttaagcggcgacagcaccagtcgccatggtttaacagtgatttccgatctttttaagggccttcgggcccttttgttgtttacatcttagaaaagccatgataagatagcttcgttaactaatgaggagattgaaatgaaagcacctacttggaacgaacttcaagaaatgttcaatactgaagaagcttttggaactatttctgaaatggttgagaatttagtagattctccttcagaagataatcttctgtgtttagcacagttcatcattgaaacttacatcgagaatcagaaatgacagtatacgtagatgtcttgatgaatcatggctggaaaatgagaggtcatcaagtaaagaattgtcatatgtttagcgacaaccttgatgagttgcacgctatggcagaagctatcggaatgaaacgttcttggttccaggataagcgagttccacactatgatttgcgcgatgttcgtcgcaagcaagcagttgctctaggagcagtagaagtatctcgtagagacgcagttctgctttggagaaaatttttcacaaagtagtttactttcggcgaggctgttgataagatggtctcgtcaaccaaactggagaataaaatgaaaactttaaccgagattatctctgcacttgttgaagaaaatcgtgtagcccgccaagcacaccgagcgaaagttgaaaaacgcgccgaggagttgaatgctggatgggcgaagacccgcttcggtcgtgaatactttgataaagctgtagctcctacttggggcaaagatgatcgccctcatgctccctttgatggttatctttgggaaaatgaattaggtgaagttgaagcttatcacgcgggcagttacttgccgtatgttacagaatttgattcgctggataagcctgagtatacaggtgaccacggttggtggaaactccgcttaactcaagcggagtacaaagaacttcgtgagtatggttatcctcttgaagtacgcgttccatataaagagtggaaattgcaagacggaacggatgttgttatggcagaagttagagcccataagagcatcttagaggctatccaggaacattcaaaacaggtctttgataatatattcaatgagctgaataagaataaaggggatgcaccggaaggacgagtgactgtctctggtaccgtaacgtcagtaaaagtttatgaagactattacggcgtacaatgtaagatgatggttgtacttgagaatggagctacggtttacggctcccttccaaaaagtattccgtttgaatacagaggcaaagtacagtttactgctacatttgaattagcgaaagatgataaaactcatgctttctataagcgcccaagcaaagttataatgcttgaggaataattgttgtataatgggttcagggagattttgagatactctttgagcccagtccaaaatagaggaaaagataatgaataagaatgaattaaagatgtttgtagccggtgaatttgataagcataatggaaaggggttgtcaaagcgtgagaagcacgtaaaggttttggcagctttgcatgatttaaacccagctgcttataatgtagcaattgctggtaacgtagctcgtcgtgtgctaaatagcatggcagcgcatgaagccaattatgctggttttgttgtagaaaacattcgtcgttctcgctggttaggtgcaatgtcagcagagaaacagctcaaaaagtttgctatcggcaatgctaaaatttacggtcagcgttatagctttgcggcaggggcgtttaaaactgaagaaagacatgaccgtagcgctgcccaaatcttctgctctgaatttaatgcaaacctgcgtcgtattcttaatcgttcaatttgcttacttaaaggcgatgaccgtgtgaaataccaggtatcttctactagttctagaaatcctaagggtgtttcattcattcgtgccgaagaacttgacaatgtcactgtacgaattcatattaacagccatttgtccagcggaaagtatccagcccgggcgcttttagcgcaagttcgtactgctttagagcatatggatgtagttaaaaaatcatgttgcaaacagcaaggtgaaaactcatctgttcttgaagtgcatttggacccatttaagatttttcccaaaacattgagcaccccagttattgatgaagatgtagcacatatgtatctcaatgttgttaaacctcttccattaacaccagtaaatcatattgaaatcgctaagaatagtattactgccgaaatggaatcagttaagcggtttattgataccaaagaagctgaattaagtaagcatgaattgatgatggcagatttagtcaaatcgcttaatgagtacaaagagcggtatgaatctctcgagtatgcccggagcttactgtgaaaaatcaattaaaagaagacatggtcgttgatgataacgaccttgaaattgagtttgagtatccacctgtacctgaattcaaaattgactggaatgcctgtcttgaaatggtagaccgtcgagaagctgcagctaaacaagttgtgccttgtgaaaaatgtggtagtattcaagtacagcttgttgattggacaaccgatattctgaaaatgaaatgccggatttgtaaacacagatttgagagaaaattaaaatgattgatattaaacttgatacacatgcagtacgacagttatttccagaaggtacagaagctcgtgcccagcttcagcagtcggtaatcaataacatcgttaaagaaatggtgttaaaagattcccagaataaactaaaacaagcagtacaatctgaagttaatattgcaacagtaactattccagatgttcgagcggaagttaagaaacagcttcagcagatgttccatactcgtggttggagtgatatttctgctaaagaagaaatgtcgcacatgatgcgtaacgctacccaatcatgtgctaaaaatgctattgatgatatggttcgtcaaactattgatgatgctgttaagcaagctgaaggtcgtattaagctgtctattgaaagcgctaaccgccgaattcaagaaatcattgttaacgcaatgaataagaatttcgctgatcaaattaacgctgccatcgccgctaaattggcagaacacttcccggtaactgctaatggataaaattgattttagcaaattaaatattcctcgcatgggaattcctgatgatattgctaggcaattagctagcgttcaaccaatgccagataattgcatcaaagatattctcgatgctttagatggtaaaacattagttataactactaaggctgaaaatggctcgtaaacgatatatggaagaagccgaacgagtaatgctactcatgtattcggtttattataatgagactggtcaaattgctaacagttccaatctcaaaggagctatgacccgtggaagaaattttgcccaagctgcaattgatggcgaagtcactaagcgtcttggaatgactaacgtctataaagcgtataaacacccaagttggaaaacagttcaagctcaagtatttaaggaaatagaagaagatgttcacggtttttggttacgacagcaacatccataagtgtgtattttgcgataatgcaaagcgtctgctcgatgttaagaaacaagagtatgcattcatcaatgtaatgccagaaaaaggcgtatttgatgaagtagttatcagtgatttgcttcgccgtttaggtcgtgaatcaagggttggattaactatgcctcagatttttgctcctgacggcacacatatcggcggttttgatgaactccgtaaattcaaattcaatgcatgattatcgtggaaccctccttcgggagggtgatattgtagctctttattatggctatggtggattagaaaccggcgagattaaacaaattaaaaatcatcgagcaaaggtagaggtaacttactctaatggagttaaagttatgtctaaatggaaatacggcgagtgtatggttaaattatgattaacatgaggaaaagctatgagttatgatattggcgatttaaaagctccacgcatggtaactatttcagcagaagagcttgaacgcctgcaagcaattgaagaactgctgtgggaaattgaatgtgcgcttccatccggtttagaaagctggattgatgatgaagacttacagaagttgcgaggttaaaatgactaacgctgaattagtaaaagaaatcaagcatatcgctggcgtcactggtggttgggacgccaactatgattttgaatatcagccaaatgctctagatgacgatgcagaagaaatctttgttttagtagaagatggagactggacacaagagcataagtatcaagaccgtactcaaatttggtattatcctgctcgcggtgttcatttcatggtatcagaatctcgttcaggttcatatcatactgattggtattataatcctcctgaagtagatatcgttactcgtcatgaaaaagtggttactcgcactgaagttgaatggcgcattgaacatgattctgttaatgattctgaaccaacaccatgcaaagtagcaaaggtctaaaaccctggtatgcggctcgttgggaaactgtcgagccagaggaagatgctattcctgaagaggattataatacctctgaacctaccataaatgaattgcttgattatgaggacaaagtgaatggggcttattggtaagcagtttgaagttattgagaatgatgatgaactgagcgaacaatttcctatgttcattccgggatttaagtttcaagttatttctgcagataatgaagacgaccttgaactggtaggaatcactgcagttattgatttactgacaaataaaatcattactattaacgacccaactccacacggcgaatcttggttctggtgtttctacagcgaagatacgatgcaccaaattaaagaaattggtcaaggtgaagatgttcctctgatttctgaaattaaacttaaccatttccaaggtgcaatcgttccaattaccagagctctttatgcctttgctggacaggaaaattgtgattcagaagagtatgatttaatgcaaaaagctgcggattacattgtcgcacttgaacaacgtcttggagttcgccatgtctaaatcgtgcattactaaaactattacagtaaaaattctcgatttcgctgatattcatcgtgttacaagagaaattttacgcagtcattggtatgaagttggcgatgtagtagaatttagtggaggctattacgacgatgacatcaatggaatggcttggactaaaatgagtcttcttcatgaagaaactaattcatacattgatttcactgtagacgattatgaaggcatatatgctttctgtacttcattctgcatcaaagaatctaatcataatgtatatagtagttactcgttaatttaactataaatactcttatctaatcgctgaggtaagagtaatgttattaacaggtaagttatataaagaagaaaaagaaaaactatataaggcacagaacggtttatgtccttgctgcaaacgtcctttagatgaggatattcaaaagaaccacctcgaccatgaccatgcgttagaaggtgacaatgcaggaaaggtcagaggcttgctctgtaacctgtgcaatgcggcagaaggccaaatgaagcataagttcaaccgttctggtttaaaaggtcaagatattgactacctcgaatggttagagaatttgctggtctatctccgccagaatcgtaaagacagtaatattcacccgcaatatgttgccgatatggctaaacgcttttcacgtcttggtaaacctgagatgattgctgaaatggaattgcatgggtttacatacgaggaaagtgatggaaaatcacaacttgcttcaaaatacaagaagcagcttcgtaagagtttaaaatgaatatcgaattagaaatccagggacttattaataaaaccaacaaggacctcttaaacgagaatgctaacaaagattctcgcgtttttcctacccaacgtgacctgatggctggtatcgtatctaaacatatcgctaatcaggtcattcctgcctctgtaatggaagcacacaaagaaggtgttatccattttcatgatatggactatagtccagctttgcctttcactaactgctgtttggtagatttgaagggtatgttgcagaacggctttaaacttggtaacgctcaaattgaaactcctaagagtattggagtagctaccgctatcatggcgcaaatcactgcgcaagtagcatctcaccagtatggtggaactacgtttgctaacgtcgatttagtattggctccttatgtggagaagacattcgctaaacatgtacgtgatgcacgcaaatatcaagtagcattagtaaaagattatgctatttcaaaaacagaaaaggacgtatttgatgctttccaggcatatgaatatgaagtgaatactttgttcagctcaaatggccaaactccgtttgtgactatcacatttggtatgggcacgtcatgggaagaaaaattaattcaacgagctattcttgataatcgtattcgtggattaggacgcgatggaattactccaatctttccaaagcttgtgatgtttgtagaagaaggcattaatctacgtaaagaagacccgaactatgatattaagcagcttgcattagaatgcgcagctaaacgtatgtatcctgatatcatcagtgctcgaaataatagagcaattaccggttcagaaactcctgtatctccaatgggatgtagaagtttccttggtgcttggagagactcttctggcaaacccgttcttgatggccgtaataatctaggggtagtaacactgaacctccctaggatagccctggatgcaaattataaaagttcggatgacagtaataaactgttcaaactattggatgaacgcctttatatttgtaaagaaacccttttaactagaattaaatcccttgaaggcgttactgcatcggttgctcctattctttaccaggaaggtgcttttggtgtgcgtatgaaacctgatgatgaaattcttgagctattcaaaaatggacgtagttcaatttcattaggatatattggcattcacgaatttgatatgcttacttttaaaggaagcggtaaactcgtcctgaagtacatcaacactaagctaaacaagtggacggaagaaaccggctatgcctttagtctgtactcaactccggctgaaagtctgtgctatcgtttctgtaagattgaccaagctaagtttggtgatgttaagggcgtaactgataaaggctggtacactaatagcttccatgtgtcagtagaagaaaacctgtcgccttttgaaaaaattgaccgtgaagcaccatatcattctattgctaaaggtggtcatatttcttatgttgaactgcctgacatgaagcgtaaccttgaaggtcttgaagctgtatgggactatgctatcgagaagttggattattttggtgttaatatgccagtagataaatgtctttcttgtggttctacccatgagatgacacctactgaaaacggattcacatgttcaatttgtggtgaaactgatccaaagaagatgaatacaattcgtaggacttgtggctatcttggtaatccttctgagcgcgggttcaatcttggtaagaataaagaaattatgcatagggtaaaacatgttagagaaaccaatgaagcaagttgattggaaccaacttagcgagtggggattgatttggaaaatcaacaaagaggttctgcatccgcttggaattgctataacccgtgaccccgaaagtggattatcggctggggctattcaaactgatgaaccctggaaatatgatgcagaagtagaagcacgtaatgaggtaaggttcaatgaatttcgacagaatctattcaaatctagttaattctgctgaacacccatctaagccccgtcaaactaaagccgggtatgaacttcatcatataattccaagaagtatgggtggttcagatgatttagacaacttagtatttttaacttataaggcccactatactgctcaccatttattggctaaaatatatggtggaaagatgtatgatgcatattggataatgagtaatagtaagcatagaaaagttacttcttcacaatacgcatatgcaaaagctaagaaatttgaaaatcagcgtggcgcaaaaagaagtgataaaactaagaagctaatgagcatagctaggtctaaagtaactcttcctgatgattttggaaaaaggatatctgatgggctaacaggaagaactttgtctactaatcataaagagcatatcaaaaatagttctagaaatcgctttaacactaaaacggttattggctattcaccagacggaaatacaatagaactaactggagcaactgaaataagaaacgcaggattttttcattctgctgtttataaatgttgcaaaggaattcaatctattcataagggatatacttggaaatataaagatgaattatgatagaatatatccatgttgctttgtgaacggccctggatgtagggtcgttctcttcgtcactggatgtttgcataaatgcgaaggttgttataatcgtagtacatggaatgctagaaacggccagttattcactatgaatactgttaaagagcttgcatcccatttaagcaaatcgtatatccaaggtcttactttaactggtggagacccgctttatccacagaaccgggaagagatttcaaatttagtttcttgggttaaagcaagatttccggagaaagatatctggatgtggacaggatataaatttgaagatattaaagacctagatttgctacaacatattgatgttataattgatgggaaatacgagcaatcactgccaacaactaaaaattggcgtggttctgataaccaaagactctgggtaagaaacggttctacctggacacatgattgaggaaatttatatgctgacttacaaaattatgtttactctgaaccacatggctactgaactgtttggaccagaatttctggctatgacagcattcatcttaactatttaaggaaaattatgaaattcattaatgctattcgtaaatttatttctaacgttatcgctttggttgcattaaccgcaggtgctttcgtagctattccatttattgttctcatcattatttctgactggattaatcctactaagaaagatgaaaaactgtctaatgaagaatttcagaagcgtgttaatactctgactgccaaacttcaacaggtcatgaaatgatagaattattttgttgcgataagtggtacaagtttaaagaagactctgttgataaatggctaaataacgcgtcgtcaaaggatgttgaattctacaacatgctcaagtttaagccatttttggtaacagctctgacacaggacgggtctgttgaacgagttaagacattcaatggtgttagcatagatgctgatgattttgatcagtggtgtatacttaatgatgctgaccgttgctatctcgaagaagccactgttgacaaaatttatcctatgactacagcggataaacttgaattaattgaaagattgatttctgagattaaggctgaactatgatagaaatctatggcatccctgaagaagtttggagatgccctgggtgtaaagcagttcgtgacttgctcgataagctgcaacttccgtatgagttctataacgtaatcaacgaggttgacggccaaccggtttatgaccgtccgttgattgagtcacttgctaaacgcatcgggtgctatccatcgcttgctattcggtatcctgtcatttttatggataacgttaagcagtatgacattccaacattcaaaaccaatcttattgctgctgggcatgacccagatatcatagaagattaaccggttcctttctaaggtcatcttgaccaccttctgtatatttctatacccttcatttagaggttcctatgggacctctcttttattctaaactcctttcacaaagttgtttacaagtcagttgatgagtgatactatagctctatcaacggataacagcataccgtttaactcgagaggaaaatatgaattggttaaattggcaagaagctctagaagctatgagtaaaggctgtaaagtaaagcatgagtattttactgatgacgaatacttctatatgcgtaatggcgctatccgtgacgagaacggatatgatatgactcgctggtataaaggtgagccttggcaaaacgaacattggtacatcgcatgaaaacttttgctgtaggtgatatcgtccgtaccagaatttgggatgggcttcaatttgaagtggttgtctacgttggttcagatggggttctacttcaccgaattaacaatctgattaagtggcaccttgaacgcttcgtgaaataccatgaattcaatagctaccactgtactgtagctccggttgctagtaaagaatactacgatatgctcgaagagctaaaatctctcaaagattgatttgctacaggagatttgatttaaaatctcctctgtcaaaacaatcgttactgaggaaattaatatgtcccaagcaatcaaaaatgtactgaactcttttgcttatgataaagtatctgcaatgctggaagaaggacgttgtgtaactccgtctttgcttgatcagtgggaagttgagcttcacggtacgatgaaagaagaaggccaaaaaattggtaaagcccgcatccgtgaattagttgttgcttatcttctgtctgaatttggcattaaagcctttggtgtagaaccaatcactccgggtatcggtgaaatttctgaaagcactattcgtaagatgaagaatcaacgtaagaaaggcttccgcgatgttaaagcggttaaggcggcgaaatgatttcatatatcgtgtgcgcatctattcctactggtgtatggcatagaaggattaagtatatccgggctcattctgagcctgatattagtcaagctaaacggatactcacaaatcaatgggatgaagatactagcgtaattatcagagtatttccaattgattcatccactctagacagccaacttccatctccgtcagagatgtggcaagaagggttaaacgagcaggaactgcgagagtatcttgatgcgtaaggttattctatacacagaaatttttactaaccgttgggtatttgatagtattttgcttgctgataccaagtttgccgatgatattggcagagctagaaaactggcgtatgaattggcagaaaaatccccaacatttgtacgtatttcatacattataacaacttctgattatgtgtataaagtatcaaaagaagcattatacagattttgtaatgttatgatttcttctggaaaggcattaaactataatcaattggtggaaattctaaatgactgaagaacaaattgtagaagttggtttgcttggatggtttatatctaaaacgcctgatggcagaaacacgattgaaactcctaacggggaattcatcattgaagaagattttgacgcgtttggatttatgaacgctctggtgagaatgaatacacatctgtagatgctttctctaaatttgaagatgctattgactcggtgaaagcatggctaaagtaaaccaaattatgattgtagtagaaggcattggcggatttactatagattcttatatgggtgtttggtttgacaatgaagagggcatgtattgggaaacgcatgcctctatgttaaatgaaactcattatgaaagtttatactcttcattcatggaaatgatgcatgaagtagatgaatctgattggtttgaacttagtttggttgagttcaaacgtatcatggaacagctgttccaatgctatcgtattatgaagggtgaactatgaaaattcaattgactcttacacatgaaaatattaaaggtgtgttctgtcttgaaaatagccaaataacttttgcacaagatggaacgtactggtatgctgaatcagatgatatcgctggttatggaatggagcgtgtatttgaagattttgaagccgtcattgatgttccattagatttcacgtataacgatttttatcgtatcatgatgaaattaattgcatgcgctgaattgattaagtaatgctttaatcctctcgcttcccaaatttgttataatagatattattaattgaagcgaagaggcaatatgagtaattatgtaaataacaaggaactgtataaatcaatctgtgcgtggaaagagaagtgccgggagtctgaagctgctggcggtcctcgagtagtaaaacagaacgatacgatcggccttgctattatgctgatcgcagaaggtctgagtaagcgtttcaacttttcaggatacacccaatcctggaagcaagaaatgatttcagacgggattgaagctgcaattaaaggcttaatcaacttcgatgaaactaagtatgataacccgcatgcgtatataacccaagcttgtttcaatgcattcgttcagcgtatcaaaaaagaacgcaaagaaatggcaaagaaatacagctattttgtccacaacgtgtatgattcacgggacgatgatatggttgcgttagcagatgaaacctttattcaggacatctacgacaaaatgacgcagtatgaatccaccgcttataaggcgccagggtctgctaaaaagagcgaacctacaagcgatggacctaatctggaatttttatatgaggctgaagattaacctcgacgggtttttagaagatgtgcaagacctagacgctatcccttatttgctaaagatgtatttaagggaggtgcttgatcttgatattcacattgacccgaaaaatccacatgacgctgatttcaggtcagattctgctataattgaacatagttataattggactgacaccgaattcacatttgaaataaattaccatccaaaggaataacatgaacaatattacccaggaagagcgcgacgagctgcaacagaaactaatggaagcggcagaagaacaagctattgctcgagccaacaaagttgttcgtaaaaaccgtcgtgaacttgagcgattacgagctcatgctggagacgcggtattagacaacaatttccctgcttacaagtatgctattgaaaaactgcgtactattttaaaacaaccttttaatgatgagattattctgacttgctggaatacctctcgtaaaactgtttgggacattctaaatgctggtacaagtaaaatttaaacgtatacgtaaagacgcgggatttactttgaacactgcgactggtacgatggcagtaaaggtagcagataatcaatatcgcgtgttaggctctaccgaaggatgtaagctaattgataagaactctcttgtctgggctgacaccttccaggttaaacggtggtatgaatggtaaacgaagagaactggggattcattgatttagatgaacaccctgattttattactagtgaagagaattgggatgtatgacgaatttgatgggttctaaccctgggcatgattggccggaaggaaattatacatgccggtgcagtaattgttcagaacgttatgcaggaccaaagcgtagttacttctgttataaatgtgatactgctcggagagaagcacctgctcccgattatgaagcgattcataatgctaaggtagatatgcttagacgctttgaagaagctaagcgtatatgtgaagcagcgggttatgttgtatacaagaaaatttaaagggcttcggcccttttgctttattacgggaatggtaaaatatccaaaattaacaacaaaggtcaatatatgaagattaatattttaatggctcgcggacttgagggatgcggcgtaaccaagttcagtctcgagcaccgtgagtggttagtaaaacatggccatgaagtaaatatcatttacgctaaagataaagcgtttactcgtaatagagcacatagctataaagatgtaactattcctgtgtctcttgcagatgactacgataagactttatctctgcttaacgcatgtgacattcttatcatcaactcagtacctgctattaacgcgccagaagcagcgattgataactataagaagctcgtagagaacattaaacctgaagttcgggtagtcgtgtatcaacatgaccatagagcgttgtcactgcgtagaaacgctggtcttgaagaaactgttaagcgcgccgatgttctgtttagtcatagctccaacggtgattttaacaccgtgttaatggaagaatattttccaagcggcggattgagcttctttgatgattctgattcagcgcctccggtttataactttcaaccagccatgaacatcaaaacaatccgtgataagtattggaaagatttctctgccattgattttgatatccaccgttggattggtcgtactactacgtggaaaggctatttcttgatgtttgactttcatgaaagtcatctgcgccccgcaggcaaaacgactatcttggaagggttagaacgcagtcctgcgtttattaacattaaagaacgctatgaaattgattattgccgtcattatcatcaggttaaaactggcccaggtttaaatcctcaagttcttgaccgttatgttaactctgagatgcttgagcgtatgtctcagtctggatttggctatcagttgtcacgtcttccagataaatttctcgagcgctcactggaatatacccacttggaattaggtgcttgcggaactattcccgtgttccataaagccaccggtgatgctttgaaattccgagttgatggaaagccattgacttctcatgattctggcattttgtggttgaatgatgaaaataaaaatgaagtctttgaacgaatgaaacatctgtcatctgaccggaagctctatgataaagagcgaaataaagcatatgaattcctggtagaacaccaagattctgagcattgctttaaagaacaatttgagttaatgacaaaataagtaagggccttcgggccctttttgctattcatgggataatataaaattaaactctactagagaggttatatgaaaattctacatactggcgattggcacttaggtgtccgcaacgatgacccgtgggttcaagacgttcaacgtcatggaattcaacaggcgattgaatattcaaaagaaaatgaaatcactacttggattcagtatggtgatatttttgacgttcgtaaagccattactcataagacaatggaatttgctcgtgaaattgctgaatcccttgaaggagaaggaattaatttaatcactattgtaggcaaccatgatatgcactacaagaatacgttgacacccaatgcatcaactgaaattcttggtaagtatgaccatatcacggtgattgataaacctacgactatggattttgatgggactttgattgacttgtgcccatggatgtgtgaagagaacgcatcagaaattatgaagcatatcaaagaatcgtctgctgaatactgcattggtcactgggagcttaatggcttctatttttataaaggtatgaaatctcatgggttggaaccagatttcctcaaaaagtacaagcaagtttggtctgggcacttccacaccatctcaagcgcagcaaacgttaagtacatcggaacgccttggacgcttactgcgggtgatgagaacgacccacgcggattctgggttcaagacactggattatcaacctttgatttcgtccctaatgaaatcacctggcatagaaaattgatttatcctgtcacagggcaagttgattttgaagagttcagaaatcttgcagtgcgaattattgttactgcagtagatgaaaatcttccaaagtttgaatccgaactcgaaaaagtagtacatgaattaagaactgtttctaaggtagataactcggtcgagtctgaagacggtgaagaagtagaagttaaaagcttattggatttaatggaagaatatatccaagcacttgaagacctgtccaaagatgacatcaaggccttaaaagttatgtctaaacagttatatattgaggcacaaaatcagtgaagacttttaaactaaatcgtgtcaaatataagaatataatgtcagttggccaggcggctattgacattcaacttgataaatgtcaaaagaccttaatcacgggcaagaatggtggaggtaaaagtactatgcttgaagccatcacctttgctctatttggaaagccatttcgcgatattaagaaaggtcaattaattaactcctttaataagaaggactctgtagtagaattatggatggagtatgacggccatagtttctacataaagcgcggacagaaaccaaacgtctttgaaattttacgagatggaaacaagcttgatgaggctgcaagttcaaaggatttccaatcatactttgaaagcctcatcggaatgtcatactcatcatttaagcaaattgttgtgctaggaactgctggatatactccattcatgggattgtccactgggaatagacgtaagctcgttgaagacctacttgaggtgtctctcctggctgatatggacaaactgaataaaacccaaatcagagaaattaaccagcagattcaagttaatgatgttcgtcgtgaagcattaaccaatgaaattaaaactcatcatgagtacgcagaaaagcagaagaaactttctggtgataacgtagctcgcctgcaggcgatgtatgatgagcaagtgaaagaggcacgaggatataaagcagaattagaaactcttcaaagcgaactgcttgaacttgtgattggtgatgacccagcagagtcaattcaagaagttcaaggtaaaacctttaagattcgttctaaaattgaatcatactcaaaggttcttgggttgtatgataaaggtggtcattgcccaacgtgcttacaggatttgcattctaatgacactctaatcactaagattaatcatcatgttgaagaatgtaataccattcttggcgagttaaagacgcgccagagtgaactggatgaactagctcgcgagtataatactattcgtacgcgtgcaagagacatcaaaaatcaaatgagtaatttgaagcagatgactttaactgcagttgataaagcacgtcgtattaaagcagcaattgataaagcatcacaggagttcattgataactctaacaagattgaattgctacaagaagaattagataaaattatcctcgtcaaaactaatttggttatggaaaaatatcgtcgaggtattttaactgaaatgctgaaagactccggtattaaaggagctatcatcaagaagtacatcccgatgttcaataagcaaattaacagctacctaaaaattatggaagctgattattcgttcacactgaacgaagagttctctgaaacgattaaatcacgtggacgagaagaatttagttatgcctcgtttagtcaaggtgaaaaagctcgaatcgatatagcattactattcacgtggcgtgatattgctgaaaaggtttctggtgttaaaataaactgtttgttccttgacgaagtctatgactcggctaccgacgcagaaggtgttaaggcaataactgctattctgaataagatggtagatgctaatgtgtttattatttctcaccgtgaccatgacccgcaggcatatggccaacaccttcaaatgaagaaggtcggacgattcacggtgatggaatgaatgagtttactacgggccagcatctgctggcctttcctgaagtaaagcgatatgtgttaactaatttgttttctgatgaaaagcacttagtaacagaagaaatgttacgagatgcttttacaggaaatgaatataatagagtcatgtccagcaggaatcccggttggatggttgaagattattacgattaaggtaaatataatgattaattttgttgatgtgaaagatatccaggttaaaaacgtacgtgcagattccaacccgaataaccaaaatcgtattcgtaaatcttgggttctggctctaactgaagaaactaaagcagctattaaagataagattaaagattctgaagctcgctttgctttctataaatctattgacgacgaagttgcagaaaaatggattgaattgatgcgtaagcattacaacgaatcaatcaaggctggtgctaaaattgttactgaccgtcatggtggcgaacgtctagaaaatgattactgcgtagatgctgatgagcaactcgttgcggcaggtcagattgttgcagaagaattaactgctacattcgcagcttgatataattatcctgaacttaattaaaaggtattgaaatgaaattctctaaagaaactctgaacattctgaaaaacttctccaccatcaactctggcatcatgctgaaacctggcaattttatcatgactcgtgctgttaacggtacgacttatgctgaagccacaatctctgatactatcgatactgatgtagcaatttatgacctaaacagtttccttagcattctgtctctggttggtgacgatgcagatattatcatgcaggaagatggtaacctggcaattaaagatgctcgttccactattttctggccagcagctgatccgagcacaatcgtgttccctactaaaccaatcccattcccggtagcaaacgtaattattgattttaaaggtgaagacctgcagcaactgatgcgagtgtctcgtggtatgcagattgacacaattgctatcactaatgttgatggtaaaattgttctgcgtggatataacaaagtagaagatgctgcactgactcgtccgaagtattctctgacgctcggtgattatgatggcgaaggtaacttcaacttcatcatcaacatgagcaatatgaaaatgactgttggtgattacaagctgatgctgtgggcaaaaatgaacggtgctaagaaacagactgcagcaaaatttgaaggtgcatcagcctcttatgtggtagcaatggaagcagatagtacctttgactttgagtaataaattcggggcttcggccccatctttaatctgaatgaggaaatataaatgaaattgacagtaaacgaagcagactttatgtgggaacagaaatatcgtccaggtactatttctgagtgtgtattgcctgctgaagataaagaaattttttcggctttagtagctaaaggaaaaattcctcatttaattctccatagtacttctccaggcaccggtaagaccacagtagctaaagcattatgtaatgacattaatgctgaaatgatgttcgtgaatggttctgattgtaaaattgatttcgttcgtggaccgttaactgcattcgcaagttctgcatccattgcaggtaagcagaaaattatcgtgattgatgaattcgaccgagcaggtcttgcagaatctcaacgacatctgcgttcattcatggaagcgtatagcacaaactgtactattatcattactgcaaacaatcttgacggtatcattaaacctcttcagtctcgttgccgtgtaattaattttggtaaaccatctccatctgatgttaagccaatgcaaatcgagatgcttaaacgttgtctcgcaatttgtgaaaatgaaggcgtggtagttgaagataagaaagttgtagctgctttggtcaaaaagaatttcccagaattccgtaagaccatcaacatgcttgatcattattcttctaaaggtgtgattgatgcaggtatcttgtctattgttctaaatgaccgcggctcaattgaagatgtcatcgaagctattaaaaccaagaacatcaaagaactccgtgctcttgctccgaaatatgctgcagactatacttggttcgtagataaactttcttcggaactgtatacaatggttactggcccaagtattatccgaatgtatgaaattattggtgaaaataaccagtatcatggtgtagcagcttcgattgaattacatttggtttatatgcttattcaacttgttgtagagatgcagtggaaatgatgagtttatttgaagatgatgatcagtataatgaacaccaaatcgcgtggttaggtaaagactgggcgaaagtccaggaattatctgattcatataaagaaaaggcagaaaatcaattcttcgagattatcggttctattaatgaaaagaaagagcatttgaacatctcgactatggattattcaaaattcatggttgaaaacgctctttctcagcatgccgactgtatgcctgctgtttatgttatgaaccttgttggtcaaggactgtctgaccaagcacactataactatatgatggcctctgttcctagaggtcgtcggtatggcaaatgggctaagttaacagagaacactctggatgcattgattcttcaagttataatgtcatattacaaagtcaatgcaattgatgctaggatgtatagagagactctggaagccaaaaataaacttaaacctgctctcaagaaaatgaaaggtcttgtgactgatgaattgctcaagacaatcacgaaaaacctgaaagaacaaaaaactcttaagaaaacagcattggaatggtaaagatgattgaaattacactgaagaaacctgaagacttcctgaaagttaaagaaactctgactcgtatgggaattgctaataacaaagataaggtactatatcaaagctgccacattctccagaaacagggtcgttactatattgtgcattttaaagaaatgttgaagcttgatggacgtcctgttattattgacctggaagatgaaatccgtcgagattcaattgcccaactgcttgcagattggggtctattaagtattaatcgtggtcaaactcttgcccagatgcagaataacttccgagtaattacattcaagcagaaacatgaatggaccttaaaatctaagtatacgattggtgcataagaaaaggccttcgggccttttactttataaaaattggagtataattatcccacctaaagactaataactcggtctataaacaaaggaaacccatgaaagaattttatatcagcgttgaaactctaggcaatgacattgtagagcgttatatcgattctactggcgaagaacgaatgcgtcgtattccatattctcctgtgatgtttagtcattgcatggaagaaacgaagtacaaagatatctatggcaagtattgcaagaagaacacattcccaactatgaaagatgcccgtgattggatgcgtcgtatggaagacatgggaatggaagcaatgggtatggatgatttcaaacttgcttatatcagcgatacatacggctcagaaatcgtatacaataaaaaattcattcgaattgcgaactgtgacatcgaggttacggcatcccaattcccagacccgatgaaagcagaatacgaaattgatgctatcactcactatgattcagttgatgataagttctatgtgtttgatttactgcattcgctttatggttccgtttcagagtgggacaagaaactcgctgctcgtttagattctgaaggcggtgatgaagttcaacaacatattcttgaccgcgtagtatatatgccgttcaattcagaaaaagaaatgatgcttgagtacatcaatctttgggaacagaaatgcccagcaatctttactggatggaacattgaaggatttgatattccgtacatcatgaatcgtgtgaaacagattcttggtgagcgtacgatgaaacggttctctcctctgaataaagtttcatctaagattatcacaaacatgtatggtgataaagaaatttattctatcatgggtgtgactattcttgattatatggatttgtataagaaatttagtttcacgaaccaaccaacgtataagttggatttcattgcttattatgaaaccaagaaaggtaaattagcatatgacggtccgatcaataaattgcgtgaaactaaccaccaacggtatatttcgtataacatcatcgacgttgaatcagtacaagcgattgatgctgttcgcggatttattgacctggctatctcgatgtcttattatgcgaagatgccatatcaaggtgtaatgagtccaattaaaacatgggacgcaatcatctttaacagtctgaaagaacaagacaaagttattccgcaaagtcgttctcacgttaaacagtcgtatcctggtgcgtatgttaaggaaccagttcctgctgcataccgttatatcatgtcgtttgacttgacatctctgtatccgtcaatcatccgacaggtcaatatttcaccagaaactatcgttggacagtttaaacttcatccgttgggtgagtacattaacaagactgctcctcgtccgtctgatgaatattcatgttcaccaaatggttggatgtatcgtaaagatgtagatggtgtcattccagttgaaatcgcgaaggtattttatcagcgtaaagagtggaaaaataaaatgatgggtgccaaacgaaatcaagaactgattaaaaaggttctgaatgataagaagtttggaactatcgataaattcacagaagttaatgtctatgaagatttctctgatgatatgaaagcagaactgctgacatataccgaagagtgccttgacaaactgatgtttgaatgtaaacatgctgaaatcttgggtaatactaatcagttaaaccgtaagattctgatcaactccctttatggtgcattgggtaacatttacttccgttattatgatttacgtaacgcatcagcaatcactttgtttggtcaaatggcaatccaatggattgaacgtaaagttaatgaatacctcaacaaggtatgtggtactgaaggtcattcatttgtagtagccggtgatactgactcaatttacgtttgtgttgataaggttatcgagaaggtaggtcttgagcgtttcaaagaaactaacgatttggtagaattcctgaaccaattcggtaagaagaaaatggaaccttggattgaccaatcatatcgtgagatgtgtgaatacatgaacaacaaagaacatttaatgttcatggaccgtgaagctatttcttgtcctccgttgggttcaaacggcattggtggattttggaaagcgaagaaacgatatgctctgaacgtgtatgatatggaaggtacccgttatgcagaaccgcatctgaaaatcatgggtatggaaactcagcaaagttctacaccaactgctgttcaaaacgcattggaagaatctattcgtcgtatgctgcaagaaggtgaagaatctttacagcaatattataagcagtttgagtctgagtatcgtgagcttgactataaagtaatcgcagaggttaagactgccaacaacatcggtaagtatgatgacggcgcaggatatccagataaaggtacaccatatcacgttaaaggtgctttggcatataaccgagcaaccgcaggatttgaaggtataacaccaatcatggaaggcgagaaggtgatggtcatcccgctgcgtgaaggtaacccgtacggtgagaaatgcatggcatggccatcgggcactgagctgccacaagaaatccgacaggaagttctagtgtggcttgaccacagtgttctgttccaaaaatcgttcgttaaacctctgacgggtatgtctgaagcggcagggttagactacgaagagaaatcgtctcttcttgatatgtttgacttttaaaaagttgtttactttaccacaaggatgtggtaccatggttctcgaaataacatactgaggagattacaatgaaatcgttacttgctgttattgttgctctcacgctgactggttgccaaatgccgcatggtgatattgtccctgcttcttctgttggacaggtgcgagcaattggtggtacggtaggatactatcgtgctagcaaccaggtctctgctgaatcgctcgcggtagagcgtcgtttggcgaaagaaaaagctaatcctaatcgtcagctatctgccatggaactcgacatgattgagcagaataagcatgaactggaagaaatcaagcgcctgcgtaaaacccaaaaagaacgtacgtgcactgctaaagctgcagcggtgaatgatcagattcgtttaactgattttgctaatggcggattaagttataatgagcataaacaacgtatggagcagttaaaatctctccaaaaccacatctacaacaaatgcatgtctaactgaggaaattaaaatggaagcagtatttggcttaatcattcttatctttatctattttctgccgacttttgtagcttgcagccgtaagcataaatcacggggtggaatctttatcacaaatctagtattcggttggtccattatcggttggttaattgcgctgatttggtctgcttctaacgcacaacagaatacaattattatccagcaagttaaataagaggtctcatgattgtaactccaatgacagtacaagatatccgccaagaattcgctgatgctttgctcaacaaagaatttgtgattgataagacgggtgtgaagactattgaaatcgtaggtgcatcatttattgcagatgaaaacctgatttttggtgcagttaatgatgggtacattgcccgtgaacttgagtggtataaatctcaaagtttattcgttaaagatattcctggtgaaactccagctatttggaaagcaattgcatccaaacacggtgagattaattctaactatggctgggcagtttggtcaacacaaaactattcacagtttgctaactgcgcaaaagaacttatcagtaatcctgattctcgccgcggaattatgatttatacacggcctcaaatgcagtatgattttgagcgcgatggcatgagtgatttcatgtgtactaacaatgttcagtatctgattcgtgataataaagttcatgctgttgtaaacatgcgctctaatgatgtcgtctttggatatcgtaatgactatgcgtggcaactctatgttctggaacagttaaccaaacttctgaatgcatcaggtaaaaattattcagttggtgacattatttggaatgtcgggtctttgcacgtatattctcgacatttctatctcgtagataattatgctcacacgggtgaaacccacattgcaaagaaagattataaaggtgagtggaagtgattccacgtaagtctggatatcatcgtcatcatataattccaaaacacgctggaggaacggatgacgatgataatatcgtatatcttactccggaagagcatgctaaggcacatctggaattgtatgaaaaatatggaagatatgaagatgcgcaagcgtttaatactctttctgcccagtggttaaatggaagaacgatatctggatataagcaatcaacagagcatattaaagctagaatatcaaaaattgattatagtaaagtatcatctaaacttaaaggacgagtgtctccaacaaaggggatgaaattcgtctttagcgaagaaagatgcaaaaacatttcaaatggattgattggaagaaagctttcagaagaaagtagaaataaaattgctaatacattgcgtggtagaatatcaccaaagagaatagaactttactgtatatattgccacaaaagaatagttccaagtcgctatgataggcatggaccaaataaaagaggatgtacattatgattcagtttgtaattccaagttataagcgcgccggggcagtaactgccctgactatgtttcctgaaggttatgttccacatcttgtagtacgtgaatcagaaaaagaagcatacgaaacctggcatggtcatgctgctaaaattgttactattcccgatgatgttgatggaatcgctggtactcgccgtctgattactgaaatgtatgcagggcaacgaatttggatgcttgatgatgatacgaccattcatctgactgaaattcgtgaacgcgacgatcgccgggttccacttggtgtcggtgaggcaatgagtcaagaggtatttgatgatatggtcaaatatgtcgagactgctatggattgtggttattatcacggtcatgctcgcttgccgattttcaaaatcacatcaagctggggtcattatcgcgagaacagctttgggtttaccaatactttctacgatttgactaaacttaccgcagaagatattggttacggagttattgaccttaacgaagatgcttatgcttttctaaaattaattaacatgggtcatcctcatctggctctgtttaagtacctcgttaaatccggcaaagtgcagtctcctggcggttgttctactcagcgtgatactgctcgtcagaatagagcccttgaacagctacatgctgctttcccaaatcaagctcgctggaaatctaaagacggtgaaagacgtggtttattcggtgataatgaacctctgaaatcaattcgtatgtgtattaacactcgagtgaaatctcaggccttccatgagtttggtaaggtagaaccatatctgtgagggcgaaagccctccaaggacctcttatgaacatctatgataaatctgatgtagctggtaacatattcaaggctgaagaattcagatgcttcgtatgtaaatctgatgagtttgttcatgaaggaactactggctcagatggaatgcattgctggtggcatggcatgtgtgttggatgtaaaatacactatgaaatagatatggaaacagtggtttataacaccaagaagaaatggaacttctgttaatagcttcaagaacaaagtaatataattactctatcctttaacctgtgagaaaaatataatggagacttatggaatataatgaatgtctgacttaaaatctcgcctgattaaagcatccacttctaaaatgacagcagaactgactaaatcaaaattctttaacgagaaagatgtagttagaactaaaattccgatgctcaatattgcgatcagcggagcgttggatggcggtatgcagtctggtttgactatcttcgcaggtccatctaaacacttcaaatctaacatgtctctgacaatggttagtgcttatcttaataagtatcctgatgcggtctgcttgttctacgattcagagtttggtatcacgccagcttatctgaaatctatgggtgttgaccctgaccgtgtaattcatacaccggttcagtcggttgaacaattaaaaatcgatatggttaaccagcttgaagctattgagcgtggtgaaaaagtcatcgtgtttatcgactctattggtaacatggcgtctaaaaaggaaaccgaagatgcactgaacgagaaatctgtcgcagatatgactcgtgcgaaaagtctgaagtctctcttccgtatcgtaactccttacttctctattaagaacattccttgcgttgcggttaaccacacaatcgagaccatcgagatgttcagtaagacggtaatgaccggtggtacaggtcctatgtattctgcggatactgtgttcatcatcggtaaacgccaaattaaagatggtactgagcttgagggatatcagtttgtcctgaacgccgagaaatcacgtactgtcaaagagaaaagtaagttcttcattgatgttaaattcgatggtggtatcgatccatacagtggtctgcttgatatggctctggatatcggatttgtggttaaaccgaaaaatggatggtacgcacgagaattcctggacgttgaaaccggtgagatgattcgtgaagaaaaatcctggcgggcaaaagatacgagcagtacggaattttggggtcctctgtttaagcatgagccattccgtgacgctatcaaagctcgctatcagttgggtgctattgattcaaacgctgcggttgatgaagcggtagcagaaatgattaactcaaaagtttcaactaaggttgatggtgttaaactccctgagagtggttcagtatcagctgctgaagttgaagatgaattagagaacttcatgaatgaagactgagtttgatttagaatctgaactcgagaaatttgaacaagaatctccctcggaagagggagacttcgagcgtcaagaacgagtgttcaagaaaagtcatgaaataatccaagaagctatgaagactgttatccaagaaattgtgataaaattaaatggtcaatcacacttggtttatgttcataaattaaatatttctccttcgggggaagtaactattgagtttagtactccatctgaagctcataaggatgaactttatcctcatgtggaagcttgtgttaaacaacaaatccagagtgcattaaagaccaagaaaaaatcattatggaaaatcttttaagaggttaaagtggtagaaacaatcttagctaatctgatttacaaccaggctttctttacgaaggtttggccatatatggacaaagagtacttcgagcaaggacctgctcagacggtgtttaacataattaagaagcatgttaatgaatatacagcaattccttcaaagactgcgttatgtgtagcactggataattcgtctataactgaaacggaacatgaaggcgcaaagaaacttattgataagttatctgatgctcccgaagatttgaattggttagttaaggaaactgaaaagtacgttcaagaaaaggctatgtataacgctacgtctcgaattattgaaattcaggctaatgcccagcttgagccaaataagcgagataagcgtcttcctgatatgggggctattcctgatatcatgcgtgaagcgttatcagtatcgtttgatagctatattggtcatgattggatggaagattatgaagctcgttggttatcataccagaataaagctcgtaaagttccgtttaaacttagcattctgaacaaaattactaaaggtggtgccgagactggtacactgaacgtgttgatggcaggcgtcaacgttggtaaatcgttaggattgtgttcattggctgcagactatcttcagatggggcataacgtcctttatatttccatggaaatggccgaagaagtttgtgctaaacgtattgatgctaatttgctcgatgtatcacttgatgatattgacgatggttgtgtatcatacgccgaatataaaggcaaaatggaaaaatggcgtagttctagtactcttggtcgtttaatcattaaacagtatccgactggcggtgctaacgctaatacattccgagctcttctgaatgagttgaaactcaagaagaactttaaaccgactgttatcatcattgactatcttggtatttgtgcttcttgccgtattcgtcaatatactgaaaacagttacacgttagttaaagctattgcagaagaacttcgcgcattggctgtagaatctgaaactgttctttggaccgcggctcaggtaggtcgttcagcttgggatgcttctgatatggacatgagtgatattgcagaatctgcgggtctacctgctacggcagactttatgttagctgtgattgaaacccctgaacttgctcagatgaagcaacagttaattaagcagattaaatcacgttatggcgataagaacatcaacaataagttctttatgggcgtgcataaggctaatcaacgctgggtagaaattgagaagcaaaacgacccaactaagcctaatccaaccaataccgtccgagaaggtgcaggtgcacagaaccgtgtagccgaatctaatcgtcaagaacgagtatcacgttctaagcttgatgctctggcagaagagttaaaattctaggtaaattttatgatttttgtgtttagcgcggtccgtgaccagtcaggtcactcttttgttgtaacagccacagataccattcatcgaggcattgaggcatataacaaagcagacctatctgtatgcgactatggagaggtcaaggtgtatgacagcgatggcatctgggttaactctgctacatatctacccaccaagaatctgacctctgacattttgttgaaaaaattgttcaaaaggtagtttactttcttcaaaggccatgatactatggccttactgaaacaaaacgagtagaggaaaacatcatgtggacaattgaaaaagcattagacgtagtctttaagagtaaagatgaatcagcggaaaccgtaccgcattgtggtatggtagttggaagcaaagtagttaaatctccatatgctaatctgcgttgtggtggcgtagtacgaaaagcattagatgaaggcgatacagttttagtagttgttgagccattcaaaaacactgatggcaatgtgtcaatgttagtatacgcaaacggtgattatcgcctgatttctgctcttaacgtacaagctgcttgaggaaaccaaaatgaaaaagattgtacttgctttagtgttcgcagtatcaagttgctctgcagttcctgctatggccaactatgacaaagacctgtgcgagtggtcaatgactgctgatgagtctgaagtagctcagcagattcgtgcagatgttggtcatattgtggaaaacgtagacccaagtaaacaatcagaagtgcaagcagaacttaaagacgacggcgcagcacttaagctgaactatgttctttactgtgatgctcagtttgataacttcaacattgttaagtggattttaggatgattacatacgttttagtaatggcgctatctacgggttcaggcggaatgtctactgaaaagatggcattcactggtaaagatgaagccgtgattaagcaaaagtgtgaagatacaggcaagcagtttatgcttatcaaagacaatccaaaatcaatgtctccgactctgtatcctacttataaatgcttacgtattacgcatgaataaatagtaggaggctctatgaaaacatacaaagagtttgttactgaaatggtcgcaggtgatgctggcggcaatccacagaatattgcatcaggtaccacttccggggacattgtcaataaaggacccgaaacccttccaaagaaacggaaagcagataaagatgctgccaagaaaaagtgataaaatggccttattagtttaaggccagaggaaatattatgtcttgggttgacaacgagtttgcaattcgtgcaatatcacacttacctaaatttagacacgttactacgtcttcaacgttcaaattaaactgccgttgcccaatttgtggtgactcacagaaagatatgaataaagccaggttctggatttttgacgcaggccaaggattacgttgtcattgcttcaactgtgagtataacaagtggctatcgcagtatcttaaagataatgaacctgacctctatcgagagtatcttcttgagaaaagaaaggagcaagtctttgataagccaaagagcgtagaaccgtctgagaaaattaatgcaaaactccccgtaatagaaaaacttaatttctgtgagcgattagatagacttcctaaggaacatccgatagttaaatacgtgactgccagatgtattccaagcacttcttggaaaaggttatggtttactaaccaatggccttctcttgttaactccgttaatccaggaacctataagaatgagacgaacgaaccacgtttggttattcctatcttcaacaagaaaggagagattgagtcgtttcaaggacgagcactacgaaagaatgctccacaaaaatacatcacaatcaaagcccacgaacacgcgaccaaaatttatggtctcgacactattgacgagtcaaaactcgtattcgtcatggaaggaccaatagattcgttgttcattgataatgctattgcaattaccggtgggtctttagatttagctcaagttccatgtcatgataaccgagcatggattatggaccatgaacctcgtcatcctgatacgattaagcgtatgaaacgtttagtagatgctggcgaaaaggtagttttctgggataagtcgccttggaaaagtaaagatataaatgatatgattatgaaagagggggcaactgcttctgaaataacagattatattaatcaaaatatatcgcaaggtttaatggctaaattgcgtcttgacaaatatgcgaagatataggggccaaagccccttaaattaaagcaatcctccagtcataataaacgacacaactttttctaacggcattggaggaagaactagcccgtgtgtgctagctaatggaactaccacataattccatgcagctaaagcagcagtggcgattccgacgtaaagatatcttccaaatcctcctttgtctttacattctcgtttcacttcagacatgaatcctcctgctatttatgttaagtgatataatatttatctaatttaattgaaaggaaaaataacatgccacatttcaacgaatgtagtcaactgatcgccggtgcagataaagctgaagctcgatacgcaggtatcgtacgcaaagttggtggtgaccctctgcaagtaatgcttgatatgcaaaaatctcttcaggttcgtcttgcaaatgacaagcctggtactaacatgcatcctgatgaattggctcaagctggtgatatcgtgcaatggctgcgtaatcaaaaagactacattgatgacgaattccgcgaattgctgacgtctcttggcggtatgagtaacggtgaaaaggcagcatctgccgtatggaaaccatggaaagccgaccacgtcaagatgcaggaaacttatatcaaagacttgtctgataaagatcagcttgaaattaaattcgagatgattgatatcctgcactttgttctgaatatgttcatggctcttggattagatgcagaagaaatctttaaactgtattatctgaaaaacaaacataattttgaacgccaagacagtggttactgatggctaaaagaatatctaagcgtcgtttaaaaattatcagaaaacaaaaagaaagggccttagtattggcccttcgaaaagaaatcactcgagaaattgataaagaaatattaaagacgcttacggcagttgtataaatactcctgtaacctaaataggagaatataatggcttacgtaaacatcaaaacttttgaccatacaactgctgatggtgaagttaaaggtacagaagtatctgtagcttttaaggtgtattctgattcacatcgtattgctaacgcgcagtatcagattttcccatctgaaaaagctgcttattcaacagtagttgatgatgctgcaacttgggcaaccaccaacgcgaaaatgtttgaagctgttccggctgacagcgaagtataaaattaaggactccttcgggagtccttttatgctatattgggaatagtatattattcctactaactgaggagaacaaaatgatatgttatactaagccctggtatcaatcaccattaaagaagtctcattttgattgttggtacagaggtgtaagagctgcagcgttattgcttaaagctgcgcctgctttgattaaagcaaatgataagtggtttgaagacaacaacatgactgaaggagctatgtgtggcaaacgtaaaaatctataacgcaaaaatctataaagtaagcttacaacgcgcagttcaatcaagaaatgatgcaaaaggagctttgcgtctagaccaagatagaatttttactgttgctctatacagtacgttcgacaaagatttcaaagacttagttaataaattcgaggcgtttggttggtgtccttctgaagattatggaattattaagactgcccatgtctttgacgtagatacagttccaggaagtcctgtttctatactgcatgctctccacttgaaaggatacactaatgtatgtcatgaaactagcttatatgaatacgaaaatgacataatttcaagaggcaaaaagattatcgttgatagcacagattctctaatagaatttactaagttagtttggttatatatgggcgcagattttatcaaacttgctccaagcccgctgttacaaaaagcagctgatggatataacagcagtagttgtctgtatcgcaatactgagtggttcatgtgatggatttgtttgaaatgatggaagagcctcaggaagaggttcaagttcatccagtgatttctaaggacatcaaagacgaataccgtataattatacagaagtatggtattaaagccccagaagctcttctagatgaactagcttcaatctggtctgacccgccgccctggtctccgtgggcaaaataatttcacaaagtagtttactcttctaaaaagccatgataagatacctctcgtaaccaaaaatggagaatatcatggctatttcattaaacccatctatttcagtaaaattatcaaaggttattcctatcgaagaacccattcgttccattgatgttcttaacttcgcgcgagaaagcaaaggattacctttatatgatttaagcgtatgggaagcattagccaatcgttttgactgcaaagaacagtcaattctgtggcagtgcatgaacaataagattggcgaagaatttcataagaaacttgactctatcgttaggcgccatcaaattgataacagagacactctctatagaggtctatcatgccgtgaggctaaagccttttatgaagctcttattaaaggagagcaatttgactttggaaaggtggcgtcattcacaacagatgaaacgatcgcccgagagtttgcaggcaaatggcattactcgacctttgtagtcattgaagtcaataattgtcagcaatcatttgattatcataccaacatgaaatcgcttttaattactgcaccagattctgaattcatgcgaccaaataatgtgattgataacattaataacattgataacattgctcagcgcagaagcgctgacatcgagatgattgataaagaacaagaaaggatgctaccgatgggaactaagttcaaagtggtgggtcataacaaagttaaaaaatctggtttacttatggactactttagtgttactatagcttagtcaactagtgattatctagaactagggacctagacccattataccgtccgtaagacgaaagcatttttgaggaaaacataatgaaattcactgctgaaaccgctaagatttatactcgcctgattacaactttaggttctgctcaacgtcggcacaaggagttcaatctcaccccagaatatctgtttaacatcatgcagcagacacattgcgcatactcaggcgaaaagtttggaaccgtcaaaggaaaccatcctgacagcatgacgcttgaacgctggaataatgacttgggatatgtagtagggaatgttattcctgtcaagcaaaagtataataccttacgtggaaataacactattgaaggccttgaacgaaaagcgaatgaaatcgcagcacgcatagttcgttcttcagattctgttaagccaacaagtgataaagaagcttctcgtttggaaaagattcgtgagtatgaaaaaactatcacatcaattaaaactaacttacgtaatcgcgaaaatcatctttctcaatttgtgcaaaaagaaaagaatggaactgcaacctcggcagatttagaacttattaatgcattgagaactcgtatcagtggtggtaagtctgaattagctaaagttgagcgtaagttatctgctattttagcatcagttccgaatcgtccgtcagatgctgaaatccgtgtacaatcaatacggttaattgttaactcacttcgtcggttagaagaatgctcaatgttagataagttaaaattgaaaaaaggtcttccattgactgcgtccttcttccaacttttgagaggtaaaatgtaatgcaacactatggatatgtagtagcgtataaggataaagacggatttgaccatccagtcacaactgatatgtatgatggagaacgatgtgtagtcttcactaatgaagaatcagccaataaagcacggattcgtacaatgtcggttttaacagacaaattagcaaaaggtaattttactgggaaaagcaaaaccaaaggaatgctttggtggaaaacaactgagctagtgtatgaaccacttagcgatgttgagcgtgaaaaactcaaagcaaaaattaaaaatctacatgtagtgagggtaaaagtggcatgattacgtttgaccaattaaaagaaagtcaaaaagcgatttttaataaagtcattgaaatggtcaaacaaggagctaaaggtcaacatattacgattaatggacctgctggtacaggtaaaacaactttaaccaaatttatcattgacgctttgatttctcagggtatctctggcattgcgttggcagcacctacgcatggggccaaaaaggttttatctaagctcagcggaatgcaggccagtactattcatagtcttctgaaaattaacccgacgacatatgaagaaaacgttctgtttgagcaaaagaaagttccagatatggcgtctattcgagttctcatctgcgatgaagcttcaatgtatgaccgtaagctgtttaagattttgatggcaactattcctgcctggtgtattgtcattgccattggtgataaggctcaaatacgtccggtagaacctggaagtaatgaacctgcactgagtccattcttcactcataaagatttcttacagcttcatttgaccgaggtgatgcgaagtaatgctccaatcattgaagttgctactgaaatcagaaatggcggatggattcgcgactgtgtagttgatggtcatggtgtccgtgggtttacgaaaggaactgcccttaaagattttatgctaaattattttaatttagttaaaacaccagaagatttatttgaaaaccgaatgcttgcgttcactaataaatctgtggataaattgaatgaaataatcagacgaagaatatacgaaactgaacgaccattcgtagtaggcgagattgttgttatgcaagaacctcttaccaaggaacttaaatttgaaggaaagaaattcagcgaaattcttttcaataatggtcagtttgttcgcatattagatgcagttgaaaccacttcatttttgggtgccagaggtgttccgggtgaatatctggttcgtcattgggtattagatattgaaacctatggcgacgatgaagagtacgctagagagaaaatctgtgtcatctcatccgaagaagaaatgaataagtttcaattctttttggcaaaaactgcagatacatataagaattggaataaaggaggtaaagctccttggtctgagttctgggatgctaagcgtaagttccataaagtgaaagcattaccagcttcgactttccataaggcccagggcatctcaattgacagaagcttcatttatactccatgcattcacatggcagatgcttctctcgcacagcagttattatatgttggtactacccgtggtcgatatgatgtattttatgtgtgaggtaatatgtttgaattgaaattagaagaccttcaaacaatgattgttggcttacaagaatctaagcttgaagcaccggataatgttaagcgtgctattaacattaaaattgatacagttctgaatgagcttcgtgatatagcagataatgctaatgctattacttggttcacaggatatgacccaaaggtgtatctgagcgaatatattggttgccagttacgcgaaattaaatttatgctagaggctcaaaatggctaaagactttattattgattttgaaacattcggaaatgtgtcaagctcttccgtgattgaccttgctctaatcacctttgattctgaccctgaagtcctggaaagcttcgatgaattggttaaacgtggtcatcgtatcaagtttgaccttaaatcccagaaaggtcatcggttgtttggtaagtctactcttgagtggtggaagaaacaatcagctgaagctcgggctaaccttgcctcaacgccagatgatttatcagtaattgctggaattaaagaagctcagcaatatctgattgataatggaattcacccatgggattcctttggctggtgtcgtggacagagctttgactttccaatttttgttgattgtcttcgcgatgttcaacgagcccaaggaatttccgaagaagaaattgatacatttaaagaagaaccatgcaagttctggaatcagcgtgatattcgtactgcaattgaatcgctgcttctgactcgtggtctgacaactactcctcttccaaagggtacgctcgacgggtttatcgcgcatgatagtatccatgactgcgctaaggatattttaatgctcaagtacgctcagcgttatgctctaggtctaagcgaagcaccaagcccagaagataccgatcctttgagtttacctaaggggcgtggctaatggaagattttgaattcgacgaaaacttcgaagagtggttcaaccgggaaatcctcccggaaatctctccaacgatggttctggttgccaaggctttgatggctaaaggctgggatgcaggatatatgttcggcgtagatgttgggtgtgaaatttctcatcgatagctatttactttatgaaagagccgttatataatggctctacattaacaaactgagagaaacacgatgaaaaatttggttgtaggcgaaaacgttaaagtgattggtggtaagcatatcggtaaagaaggcgtaattgttggaatctttaaccgttctaacaaaatgtcttcatatttgcttcaattggaaaatgaagacaaagccgtgtattcgctgcaaaaattcgtagttgctctcgaatcgcgtgatttgcttgattctatgtttaacgaaagctatctgcgcaagtgggtacacgtgaattcacttgacaatgttattacccaatcggtgagttctactaattcagccactaatctgtcactgcacaaaaatgttcttgtcactgatgagtgggaagaagacggtaaaaccctagtaaacgtagtgtttcaaggcaactatgcagttctgcctaaagccgatgtagagccgacagaatcacaaaatccaggtttagtataaaaaaagttgtttactttaccacaaggatgtggtattattatcttatcaactactgaggagaatagcatgaaaactgaaaacaccgtaaaaattactgccgaagcttttgaagacattctgttcaacccggacttaatcgtcgttcagaaagagaaaaccttcggtaaagaagagcactggacttggttgtatgtattcgcgaatcacggtgatatcgtcccagttcgtacctttgctcgtgtaatcacagttgatggcccagaatacatggagattgtgtaatgaattttaaagaaggcgtacagtacaaattcgtcaatgatgaagcggaagaagaattttcttcacgttatgaggttaatgaagactttgtgtttgaactctatgaaaatggcgggagttttactgttactaaagttgaccaccaaaataatagagtatcaggaattatgtgggctaatggcacagaatgcgatgaagtcggcggtgaagaccttgtaatttttgatagcgaattcaaatactttactgaagttggaacttctgcgaatgtaattccaaccgatttggttatgaatctttctattcataaccgtggtcaagcaatcgctgctattgcagcactgcagagtgcatatcaatgttaaatttagctcctatttttgaagcatcaaaactgtcttatcctattcctaaccgtagcattgggaatgtcatgctgcaactttcttcagaaactggagaaatgtgtgattggattaatcgtccatggcggcagaaagaagaatttgaaggcgagtgcgcagatgttattaactgtgtagtagatgcactttggcttcatttcagaaatcgtcataaagatgatgcgcatgtattagatgatgaaatctccatgatggttactcgtgcactgaatgagcaaatcatggtcaaaacacaaaaatggaaggatgctgttaatgccaatgtatgattacaagtgtgaagtctgtggaaaaaagatagaaattatgcgtaaaatttcccatcgtgactatactgttaactgctttaaccctaagtgtgaaggtcaaatgaagcgagtagtttctgctccggcagttcactacgatggattaaagagtggtgattattgatgggaactaaagcacgcattaccatgaaacccggagaaatccgggttattaaagtaggtaatataacttatagggttaaattaaaattaaaatgaaaaagattttaattacagcgcttgccttcatgatgattggatgcattgacgctgataacgcaactcgtgtgttagataacgcgggatttactgatatccaaattaccgggtataagttcttttcttgctcagaggatgattttcagcatacagggtttactgctgttggacctacaggaaaacctgttaacggaacagtatgctcagggctttttctcaaaaatagcacaattcgttatgaataaatgaccttcgggtcatttagttgtttacatggacatcatgttttggtattatagtcttgttggccagaggagaatattatgattattggaatgacaactgcgcaaaggcgtgctaaacgacagttaaaaatggtagagcgggctattggaaaatataggtttgcttggtggccaattaatgacgtgaatggtcgtactatttggatgcagaaatattatgaagtctgtgaagagtggatttcacttaatgaaaacaacgagtaccggattgaacagtactacggaaattctcgatatgcatacgctaacgttagtgatgctcaatggactatgtttgaacgacagcggccacgatatcccgagtataaagcggttaaaggaggccatgaggttcttggtaaattgatgtatatcaaagaagaattacttgctataattaatagttgatataattccttcactaaccgaggaaatgtaatgattaagaacgaaattaaaattctgagtgaccgagaacatatcattaagcgtagcggaatgtacattggtagttctgcgtttgaagcgcatgaccgttttctttttggtaaattccaatcagtaaagtatgttcctggtattatcaaacttattgatgaaatcattgataactctgttgatgaagctattcgtactaatttcaaacacgcgaataagatttcagttgacattaaaggcaacaaaattattgtaacagataacggtcgtggtcttccacaggctccggtagtaactcctgaaggagaaactattccaggcccagtcgccgcatggactcgtcctcgtgcaggtggtaactttggtgatgatgctgagcgtaaaactggtggtatgaacggtgtcggttctgcgttaactaatatcttttcagtatctttcactggtgcaacatgcgatggtaaaaatgaaatcattgtccgttgttctaatggctcagaaaatatctcctgggaagaacatccagcaaaagacaaagaattcatcaaagataagactggtactgtagtatcattcattccagatttcagtcactttgaaagcacaggattgactgatgttgaccagtcaatcattcacgatcgtctgatgacattagcagtagtttatcctgatattgaattcaaattcatgggtaaacgtgttcaaggtaagtttaaagcttacgcccagatgtatgatgaaaatgcggtagtgcaggattctgatacttgtgctattgctattggtcgttcggatgacgggttccgtcaactttcttatgtgaataacattcacaccaaaaatggtggtactcacgttgacctagttctcgatgaactgagcaatgaacttattccagcattaaaacgtaagtacaaactagaagttaataaagcacgaattaaagaatgtctgactgtcattatgtttattcgtgacatgtctaacatgcgatttgattctcagactaaagagcgtctgacttctccttggggagaaattcgtagccatattgatattgattataagaaacttgctaacgctattatgaaatccgaagatattcatatgcctattattgaggcaatgttagctcgtaaacttgctgcagagaaagctgctgaaactaaagctgctaaaaaggcacagaaagccaaagtagctaagcacatcaaagcaaacaaatatggtaaagatgctgacacaactctgttcttaacagaaggtgattctgcgattggttatctactcacaactcgtgaccgtgaacttcatggtggatatcctctacgtggtaagttcatgaatacatggggaatgtctgctgcagatgctatgaagaacaaggaagtatttgacatttgtgcaatcaccggtttgacgattggtgagcctgctgaaaatactaactaccgaaatattgctatcatgaccgatgcggatgttgatggtgttggttcaattttcccaagtcttttagcgtttttcagtaattggcctgaactgtttgaacagggtagaatccgctttgtgaaaactccggttattattctcaccaaaggtaaagaacaacgttggttctattctcttggtgaatatgaagaccataaagatgatttcaaaggttggaaacttcgttatattaaaggtcttggctctcttgaagaagatgaatacgaacgtgttattcaagacccggtttatgatgtagtatctcttcctgaaaactggaaagaactgtttgaattaattatgggtaacgatgctgcaccacgtaagacatggatgagtgaataaagaataaatagtaagggtactattgcccttacttagaaggaattaacatgcaacgttattggattactttgatctcaggcgactatggatatctgttcgctgaaaagaaacctctgcccggaacttgggtaaccatctgggttgaaaacattgatggttctaaacatgaggtttatggtcgagttagtagggtgtggtaatctaagggacctccgggtccctttttctttataagaatggatttatatggctttaatcaagaagtgcttggagatgattctaggattcttgcttaaagttatagtgatataatttcccctaaatcactgaggaaaatattatgaaacgtagttacatcccatcagaagaattattcaacgatgctatatatcgtgaatatcgtatcatccagcggttctttgacatccaagcagctgaggaattcaaagaacgcttcaaagaaatccataataaaatttttacaactaacaccgctactgctgaagagttacttgaagtagcagaaatcattaaacgacataattgataggaataaaatgaaaattaaatgtgatgatgaagtaatcattggttcttctgacgctgatgattcaacgtttactattaaggcctcaggtaaagcttttgacatcttgtcaaataaactctataagtataaagttcgtgctgttgttcgtgaactttctactaactgcgatgatgctcataaattgaacggcaatgaaaatcgtccattttatatcaaggctcctactcgtcttgacccacgatttgtaattcgtgattatggcccaggtcttaatcataatgacatgatgacgatgtacaaaacgttctttgaatccacaaagaataacagtaatgatttcatcggtgctcttggtcttggttctaaatctccactgagctacacgagtacatttaacgtagtatcatatcataatggtaaagccaccggttatactgtcatgaaaaaccgaggtgaacctactattcgtccgatgtttgtcgatgatatgaaagaagacgaagaaactggtcttgaaatcacggttccggttaaagtagaagatattgatacctggcactatgaaatcgcatatattttgcgtacatttggtgctgtacctccaaaggtagattctcttcgccgtgaaattgaatatttcccggtagataagaccgactggttcagcgttaatagttcgtatgaaagctatggtctgtacgcagtttatggaaaaatcgtatatccgatcagcggtgtagatgttaaggcagattggctgcttaatcgttatggcaaggtttatgttcatttccctcttggcgaattagacattactccatctcgtgaagagctttctcttgatgaagaaacaattgccaatatccagaagcgtgtgaatgctcttgaagaagaggtaattaccgcagatattaaagcgtttgaagcgtatgaatctgaccgtgaattcctgcgcgagttcaataagctgagttctaaggaacgttctattcttcagagccgcggtattaccattgggaaccgcgatattaaacaagtagttgcgaagtataatcttgataaaattcgttcatattatgtagataacgaagtatcagtttatgtttcatgtgatgaacctgctcgtcgtaaagtgtcaagcagttcttggcatcgtcataaccaagtaaacatttctgatatttgtggcgttgatagaactaaagcgttcgttcttattgatgataaagcgggtaagcgtattgctacggttcgtgctctgtgtaaatctggattagttccaatctgggcacacattacagtaatcaaagacaatgaagatgaattgcatgtcattgatgagctgaagaaaatcatggatactgatgaagttgtagtattccgtgtgtctgaacttgaagcccaaagaaaagctcttcctgattatgacactggtccaaaagagaaacgtccgaaatctcctaatgtgtcattacattggattgataaagacgggtattgggaagaagaccgtcagactttagtatcatctgaaattgctgagcttgaaggttatgcaatcggtcgtaatcgtgatgaaatccacactttcccagataatgtttggtggtggaatatgaacattgcgagcatgcggtctctggcagaagcgtgtggaattaagaaattctatgcaattcgtccgggtgctatgaaagccgcggcaaaagctgatggattgctttcatttgaccgacttattattgaccaatacatcaagtgtattgataaggtagattatgaccagtacatgccatcaaatgctactggaaatcgtatctgtggaaatattgcgcattacgataaattgaatttcttgtcgagtaagtttactgcgtcaggaatgaaaaatccgttcctgacaaaattaaacaaaatcgctaaggtttgtcgtacaagtaaaatcaaagatgaaaacgatgatttagctttatgtaataaaatttataataaactgtctggtgatgctgagacaatcttctataaaaagattgaacagtttaaagatgattatcctgtcatcgcaagtgtcttggatacttggcggactgacagcaaactcgtcgatgatattgtaaaaatcatggagctccttgacggagcttctactcaaaattctgaaaataaaggtgaataaatggctgttacctgtctgtctgaaatccaaaaagatgcaatcgttaaaaacttcaaaaacggtctgtacactaagaaagagctcgccgagaattatggtgtttcccgtgacaccattcggcgtgtgtttaaagagcgtgaagctcgagctgccgcggcagctgttcctgctaaagtagaagctccggttgagcgtgaatttaaatgggcagcaagttccaaattcatttcaattactgaaggccgtactacttataatgccgatagccaacatcctggatttaaatctgcattgcagaaacttgtagatggtgatatcgctggtgctattgaccacattaacctggaacaaggcatcaagaaattcgttcagggtaacgtccgaattgaagatggtactttattctataaagatatcgagctgaaatccggtctgactgagcgtatcgttcgagccatggaagatggcgaagactttaaacgttatctgcctttcctggaaaacctgatgcttaacccatctcgtcgtgcagtttatcgtctgtttgatttcctgaatgcaaacgatatcgacatcactgatgatggtcacttcattggttggaaagtagttcgttccacttatatggactgtgcttcaaacacgtttgataactctcctggtaaaactgttacaatgccgcgtaaccaggtagatgaagacgatcagcgtacttgttccgcaggtctgcatgtctgctctaaatcttacatcggtcacttcggtagtggttctgaccgtattgtttcagttaaagttcatccgcgtgatgtagtatctatcccggttgattacaacgacgctaaaatgcgtacatgtggttatgtagtattagaagatgtaactgatcgttggggttcagaacttcgctaattataaggagccttcgggctcctcttttattatgggtgaaacatgattaatccatttaacgtatctcattctaaagttgttaatcttcgtggtactcatcatgcggctacagtattttgccatcatgtggttaaacatgaaggtgatgttcactatgcttggttgcactgtgatgaacttgtagaacttggtgatgattttgttgtggaaccagacacttgtaaccacgacgatcgtgtttattttggtgaattacatatcagaggaatttatggcattgatgaacaaagccctgcagagattgaaccaactccggacatttaccctagatttgaataagctaaggggtgaagcaaaagtaaaaatcattgatactgcaagatatagtttagatatcgatccatctcaagacagaattgatgttcttaaaagatgtagaattgctataccggcagagtatgtggtagcagattttctcgatggatacgtgaacgatcaagttgttgaccataataacaacgatccgtatgaatgggcatgggacgtattagctcatccacactaccaaggtgttagagttgaagttaaaacacactttgttcatgaccgagcaaatcataagccatggattaacgttacgactggtaaagacggtctattccctaatggaagtggaataaatctagggcccatgtttaaacataaagtcgcagactgtataattatattcgttgcagaagaagtgtcccagaatgtcatacagtacacaccaatgtttgccggcggtatcgatcacctcatggaagtagtaaaaccttcacgagttggagctggcgggtatatcatgcacaaattttaaaaagttgtttacttccgggattggccatgatactatggccttacaaactgaacgggagtaaaacatgagttacttagagctaaaatcacttcgagctaaacgcggaaatgcttctattaaagctgaacttttgaaagagtataggattctcgaatctatgaattggcattatgctatcattgcttgtgataatggcgattcaacttatggcggattgtatcctaatggagctgccgctgcccgtgatgagcataaagataaagttaaagccttagaagaaaaaattcgtaacttgtgcatttaacggtttactttcctgttcttcggtgatactataatcttgttagctaaactggagaacaaaaatgaaaaagttacttacgattttgaagaacacctttgtagtattctgccttatcgttactttcattggtgttttcgcatgggatttagttaacgtctggattaatgctttcatctgaggaaaatataatgattcgtagtagttttgatcgtcgctttaacttaatgagaactgttgttctgtcttttatcgttgcggtagcgctgggaattgttgctatattcgggttcggaatttattttgctattcaagcggtggatactattcagaccgatggccttaaatccttagtagaaaccgtatgggaaggtcaaaaatgaaacgacacattgtatatcgtctgttggcttcgggtcttcttgtattttgggttggtatcgtgacagcggtagtagtattttggtaataagaggggcttcggtccctcatcggagaataaactttaattaactgaggaaattaacatgcgtaatattatgacttttgctgatctcgataaagctggtgcagaactgatcggttctattcgtaacggtgattgggcagctggtgctccatctcgtgaaattactgagcgtgaaggattttattttttgatgttcaatgatggcaaagcaggttatatcggtgcatctgctcgtttctttgtggctaaacagcgttcaaaagcagggtttgagagtgttctttctcatatccgttcggggcgttctcagttgggtcgtacccttcgttcaaactgtgtaacatacggtgtgttttggattcctgctaataaaatgaaaccgctcaccaccggttatggcaaaggtcagcttgcattggcgtttactcgtcagcattcaagcgacgcacagacctactctgagctgaatcgtattctgaatgataacttcatctttactttgcagaaatactaatgagaaccttcttcgtgatgggctatgtgtttctgatggccctaatgatttgctcaggaacattcatgtggtatggccttgtgcctaccactaaagtaatcggaagcattgcgttcactgcagcatttattatgtttgagcgcatttgtaaaattgtaggagtttacaaatgattaaaggaattgctggcggaatttgggctgctctatgcgtatcgacattgactacaggtgaaacttctgttatttcgcaggcgttagcgcaaggaactttatcaattattcttattatagcagccctttccaatgattaagaaaattttgattggagcggctttagtagccgctttgcttttaattttgtactatggaatgatttacgggatgatttatattgtgcttttcatttccgatgttatagtacaaatcggctcactaatttggtaggtacaatggatatttttgacactctattaaagcaagcaggttctattgatgatttggctaaagcgtcaaatcttcgtcatcgcgatttgaaatctatcattgataatgaagcaaaagagtatgcgatttacactgtagaaaaccgtgctattccgaacttgattgatgggtttaaacctgtacagcgttttgttattgctcgggctcttgatttagctcgcggtaataaagaaaaattccataagcttgcgtctgtcgccggtggtgtagctgatttaggatatcatcatggtgaaacgtctgctcaagatgctggtgcattgatggcaaacacatggaataacaactatcctctgttagatgggcaaggcaacttcggttcgcgtctggttcaatctgctgcggcaagtcgttatattttctgccggatttctgacaacttccgtaaaatctacaaagacacagaaatcgctccagtgcataaagataaagaacatgttccacctgcgtattatctgccggtaattccgactgttcttctgaatggcgttcgcggtattgcaacaggttattcaacttctattcttccgcatagttttgaatctgttttggaatgcactaaagcagcacttcgtggcgaaatgatggaacctgaagttcagttccctaaatttaatggaaaaatcgttcaaaccgaagacggttctgttgaactacacggtgtgtataaagaaacttcacggaactcaatctatatcagtgaaattccatacaagtttgaacgagcttcttacgttgaaaaagtacttgacccgttggaagatgcaggatatatcacatatgatgatgactgttctaagaccgggtttggctttaaggtgaaattccgtaaagactatgctttgagcgatgaccctgagcagcgtcatgttaaaatcatgaaggactttaagctcattgagaaaatgagtcagtacatagtagtcatcgacgagaacggtaaattgaacgataagttcaaaacttcaggtgagttaattcgtcatttcgtagaagtccgtaagacattcactgccaaacgaatcgagcataaaatagctgaaactaaacaggcgtttaatcttgctcaggcaaaagctcaatttatcaaagaggttatcgcaggtaacatcgttatccaaggtaaaactcgcaagcaactgactaaagaaattgaacagaatgaactattcaaagaccattctgaaaaactcgtttcaatgaacatctatcacatcactgatgatgaagcgaagaaacttgctcaggaagcaaaacgtcttgcgcaagaggttaagtactgggaaaagacaactcctgaagctgagtatctgaaagacctggaagaactatgatagaattttatttaattataggttctgtaattgctgtattaggtctaattttgttgctactcaattaatctagggaacctggaggtcatctccaggtccttccatataaatctatatccctccaaaatccctccttagaatgccccaaattattttcacaaagttgtttacaagccggttagcagatgatattatagtctcataccaaacaaattgaataaaacatcatggagaatcacaatgtctaaagtaacttacatcatcaaagcttccgaagatgctctgaacgaaaaaactgctgctatcctggttcaggtagctaaaaaagatttcatcacttctgctgaactgcgtgaaatccttgaagaaaccatgaacgcaggttctgtcaactcaaatattggtgttctgattaagaaaggtctcatcgagaaatctggtgacggtttaatcatcactggtgaagcacaggacatcatctctaaagcggcagttatctatgcagaagagaacaagcctgaacttcttaagaaacgcaatactcgtaaagctcgtcctctgactgaagatatgaatgagcacaaagacctgatgatgaaacttctcggtgagatggaagatatcttgcctttgaaagaactgactgtttaccgcagtaactatatcgcagttctggaaaaacgtaccttcggtattcgtagtcttgaagttaacaataaaggtactttccgcatcttcggttacaagatttctgaagagcatcagaaacacttcactgacctcggaatgtcttgccgtgtagctgcaacaggcaatacttacttagatatcgcccgtactgctgaaaacattgaaaccatcatccgctctattaaggaactgtaatgaacaagtttaaagtattgaatgaacttcagcgttgtgttgaaaaagttaacttgaatgctaatatcccaactgattgttgggatgtatggttccgtgggcactttatcggatacattgataagaaattcgcaaaatgctatgctatctacaatgcagatggtaaacatatcatggatgtagataattaccaaaaggcccttgctaaatttgttccaatggcggaagctgttaactcaatggaatggttagagaaaatgcagggtgaacctgttattcgtcaaatcggtattcgtgaaaagaaaagtttgtggcagaaaattaaaggattctttaaatgagcaagttttccgaacaaatgaataaatttgttgatgcttctcgtcacggtgctctaattaatgagccaaaagaagttagtattcctgaaatttgctttaaagtagctgattggtgggatggacgattacttcaacgtcgtatcgtttgtgcagcaaatcgttttgaattgaaaactggtggaacaattgtagttccaggcactcgccattattctgttgatatggcgaacgttctagatatgttccgtgacaaattggtttctgaccatgtccatggagacaatcaaggatttgttgaccagtggggcgagtacttcacacgtgaagaagcattaatcatcgctacacatgcaggtcaagttaataccgttcgtcctaaatcaggaccagccaatgaattattctcagaggatttatactaatgattagtacattaaagaataacattacgcttttaaaaattcaacgtaaatcgcttcagcgctcattagaaatgatggacgataattggggtacatataccaatgaagccgggtttaaaatggcagacagcaaattcatgaaaactctcatggataaggaatacatctgtccgtttagtcatccatttaatggcggcgctaaaccgtttcttgctgaaatgtacaaagtaatgacagaagaaatgattaaagatattgactattacatcaaggaacttgaaagtgcaaaatctagtagctaaacatgattttaataaaggcggagcacacaaagataaaaagcgtgctgccaaagaatcaaaacgtaagcaaaaacacaaaggtaaagacaatgcgcattctgaataattccaaatgtactactttaactattatttgtgatgacctagaagctctccacaagaaattaggggaccattctggattagtagcagatatccattctgaactaatggaagacctccagaatgctggctatggagactggatggtacacgattggaataatggtacctttactgtagctattatcgctaatgttgaacctgaagaagttattgaacaatttcagaaatgtgttgatgcttatgacattggagattatctatgaatactgaagccttacgcagagaagatgaagccaaggatagaggtgacattataagtggagttgagtatatcgaaagcattttaggtaatcgcggagaggttgttttagcatgagtcataacttagaatctgtcgttgaatcacaaagatatctcgaagcgttaatgaataaaatcgcgcttggaagtctgattgacttgtcttttcaggaggcaattgacgtatgtcactggttgaatcgtagggttcgtccaattggaaaggaattgtatttaacggctaaagtaaaagatggtcgctacgggctctggatgtcctctggtgctgagtatatcactaccaaggaagatttgaattctcgttgggaattggcataaactggtttacaacgcggtatcaagatgatactataatcacataatccattatgttgtaggaaaaataatgactaagtttgaaattgtccaagaaattgttactgttgcttctattctgactaagttcaatgctgaacatatcatggagaagcgagatgaatttattgcgttcttgaatgaaattggaataaagaacgagcaggggcgtcagttaaatcagagcaactttcgtaaaatggtttctgaattaactgacgaagagaagagaattctcgttgaagaatacaacgagggatttgagtctatctatcgaacaatggctatgcatagcaataagtaatcacttagctcttccaagtgctctaaccgcctgaccacatatcgatgttagtctttcgttagataatgcaggtttggaattgtaccagtacatttcaacagttccagcataaacattgtctaaattgaaatatggacagctaaacatatacgatatttcaggcggttttctttttgtcggtaagaaaacgaattccttatccgtccaaaaatatctacccgataaatgcgtgctatattcagcagttgttttgtcgattggatatcctcccaagtttttagaatctaccgtgctaggtaaagtcccctcataagcaattaagtctacgaagtagttcaagtttttaggtctgaacgtaaagaccgcagaaaaatctgcaccgcttgatatatgtactatctggagttgttcgagtgctgtattatcaaatcgggaatctctatccttttgaaccagtttatcatacttgtcataagtactgtcgacgtaagcggtaataagactatcagacttatatccagcaaacgccaacaatgctaaaagtatgacaacgaaaacacgggaaaagagaactcttcccgtggctccatctttgaataatagctcgagcaacccaagaaacatatcaaaaaatggtattgattgtttgcttgccatattgctctccttacagagctatttattgcaatgattccaattcagctttaagcttcatcaagtctttcataatgtcatctttagttctttctttaggaacttgtacgtctttagtcatcacaacttgttcgtctacaaattcaaattctctttgtgaaaattctccccatgaatcaacaggaaaatcgtcaagttggtatacatccaaaatcatttctttatctgcaaataacccgatcatggtggggtcttcgccattatagtaattaagtatcttgttggttttagcattaactataatgatatgagaattcttgtcaagagaatttctaaatttgtaccaacaattatcgttacagtcccgataataagcaccaccctcaaaattgtggtgccatttaatacctttcatttgtttaacaatcattattttacctttaagtttaaaggggtcgaagccccttattatcaagtagcagaatcaacccattgaacgcccggtttccatacttgtaaccgtccgccgataagttgcatgttctggttagcttcgttgctgttaccgttaagaccaacaagtacccaaccagcaggaacagttttaccaggtgccggtcgaccaattgggccaaagtcttgttgagcaccagtacgaacccattgagcacattggttaaacctatcgttgatatagttagtgatataaccaccataaacatcaccctgtatgttgccatcaggatgaattctccagcgtgcgcctggccctaccatttggcctgcagagccatgtaattgccattcacttccaccggctcttaaacccatcatggtattattgtcacgcggcatataaatcacaccacgctcaccaccattggaatgtcggaaccaaaggtgggttgtaccattatctgcggcaggggccttaacatcgacagcaccaacaaagctaccaataccgtaattactaacaacattaccgtcaacagttaaagcaccgttaacagcagcgtctccggtagtccagagcgatgtagtttttaactgatcacctgtaattattaatcttccggttacggtaccacctgctaacggaagatatgtatcaccagcattactaatagcagaagcaaccttatcatcaacatatttcttgttggtggcttggttattctgcgtaggagcatcgtcaatttgcacatacttggtagtaggaacaataataccgccgttggcattaataacaccattaacagtcgctgcactagaaactgttagctgtctgttaatctgggcatttccgtaaacagtctggtttccatcagcatctactttgaatatatcattaaacgtatcagcaggattaatttggttgttggtatttgttgataccataatagtaaacgagttagatttactaatagccatttttcctgacataccacttttcttgaccaacccgaagtcggagtttttgccaagaacgatcattctgttatcttcagatacattcaaattaccagtgatttttgagttctgggcctcaaattcaccaccgactgtcattttaccgttttggtcaataactgtggcttggttagaattatcaccgtttggtcttaaatggagtgcctgacctgtttttgcgtagataacaaaagcgccagatgaatttgaacgaatacctgggccataagaccattcaagtagtggctcacttgacccgttggcttttactctaatctcagtaccagacgaatcaccgaagggtcgaaaagcaatatatttcgcgccgtctggagatgtagtagaagccgacaggattaacgcgccgagactaccaccttgggcttcacgaaccacagccccatttttaaatgtgatggccgggtctgcattactaacgccgttgacattcaatacaccaaatgccacagattgccattcaccaacaccgaggttattacgagcagcagctacagatgttgctccagtaccgcctaaattgatcggttgaacccctgcaacaacctctttccatgcagaccatgtgccgttttggcagtatcgaacatatgtaccttcaacattaccttttgtagtaaaggtctgcttacaagtccaatcagtatcagaaattttacgcaaagatagaacttcaagaacaaagttgccgtcagaggtaggtttgttcgatatattagaaccaccaccatatgagaagcatttatacatctgacgagtacctgggtcggttcctttaatgacaagaccattaaggtcaacagtcttatcagtaatatcaactgcctcttcagtgccgcgataggtctgattaaaaactaaatccccttctacctcaagaccgttagatttaaccaggaggtacttagtaggagctggggtagaaactgcagtttgataaccaaattgcacgtatccttcaggagtaactttaagcattgctactacagcgccgtcgccaactttacgtgcaagggttaatctgctgtacttgtctgagttctctgaacctaaatcaaccatcgttccattaggattttcgacctttaagttagcgttaatagtcaagttgccggtcatggtatcaccagtcttgcttacttgcttattatcgccagcaacgatatcatttttaatggtgcccagatagttgttaaggttgccaccaaacatcgaaccagaggtaatattcccgtctttggttagcattgcttctccaccaactttaactgctacaggaacatcaagtcggccgtcagaacggaagctaaaatcaccggcagaagtacctccagtggtttttgcgcgaatattaatttgtcctaagtctgctgtattcggagttgcccaaattacaccacgttcgttaccgtctgttctaaaccatacatgagcatttccggttcctgcattaacatatactgatgcagtacccgggccggaagcatgtaaattaggaacagttaaatcaccagtcatggtgtcgccagctttcttaacttgggtatcgtttgtcagattaccaagtccgacgtcagccttagttggtttgtttgctgtaccgtaaagttcattgtagttaacatttcctgcagcaagaccactattgttagctgcatatacacgaactttagcactagcgtagtcgatattaatggctgacatggtgtctccagcattcataaaaataccggagccgtggctgtaaagaccattttgaacactaacaccagatttagtaacaccacgccagaaagtaccgccataagcctttaaacgtgtcaacatatcagcgttagagacaatgtcattgatggatttaccaccattaccgcctaagccgtaagcgccattttctaaaacattaccagcgccttcaccgacatcacgaacggccgcagtacctaaacctaagttatttcgagcgtctcctacgttagtagcacctgtaccacctcggttaaccggaagagtaccggtagtatcaccgaaatctggttttgctaaactatcaaaaatctgtttcattgaaacaagaatacttccggacggtccagtatcaccagtgtcctgattggtttcatagataattactgtacctgaatcttggccgttgtatccagatgcgtttagcactgtaacataaaggccattgccataacgaggaatcttagcataaaaatcaaatgacgcatccgcatcagtagcagaatcgtttttaacaacgtaatactctggaacgttcgttttagaaggagacccaacccggcgccattcaacccagttatctaaactgttggtgctccatgatgttaaatttcgtcctgataacgtgataaaatcaacgtaatgtctaccgtgcccagaatcaataccaccgctaatcattaaatccagttgcgaagaacccattcctggatgctttattgtagctacttttacccagcgagcagttgacgcagttgcagcagaaattacgtattgccaggcttgacgattgttttctacattcgtcagaagagtaccggatttaccaggacctcttccgttcatggcataataaacctggtaatttctgaacgacagattactatcattggttaattgaagaacacctgcgcctttttggtttttaatatagacatcattagctcctacgcccatttcaagaacactagtgcttccactgtaaattttaatggctttattggtggataatcttaaatccccaggaagagtggtattacccgagccgtcaagcaagaccagctttctagcttcaacgttaccggcaccacgctgtacaaactggattgtttcagtaccatcgtcaatagtaccgatttcaagaataccattattgcttgtaccaccggcaccaatgtaccaaccatcattagtagcgcatttgccaacgatatgacgagttatttcaccgctcaaatcagtagtttcaaaactaattgctttattcggagaaatagttacgttgtcttttaatgtagtagttccatcaacgctaagagttccggaggtatctaagaaaggaacccctttaccggcgagctgtactacggcatcattttcatctttagtataaatggcaagagtacgcccatgtgtattcaaagcgatttcgccacgggctacgatatctgcacctggtgctttattctctgtgctagttcttttaaattgtatttgttttaagttttgatcggccatggctacctcttagtatgtgccaaaatctattgttaccccgcgtgaaataacctgatctaatctaggagcatattcaccggatgttgctgtgtttactataactacgccagcttcagctcgtagtgcacctgtcatggtatcaccagctttcttgactgctgcgttagctacgttgctaacagtatttattcgtccatcgacataatctttacgcgttaaatgctgagcggctgtaggagcattattagaactaagaatagaagctgttatacttcctttgtttatttggtccccggttctagcgttccaaactactgtccgttctctaccatccactgaagtacgaataccgacaccgtaccatgaaacaatgtcaatgttcgctgttgttagagatgctgagtctccattaccagaataaagcccgtttaaactgttgccgccactgaaggtcgcagaaacttttacgccttctttaaattcgacttccttttggaaaccttgagaacctgtgccaccattagctttagatacgaaatcattatcatttgcttgaggtttatctatctcagtataaacctttacacctctataagttagggagtttcctgccggcacaagaggaaaagtacctgcgtgccaaataggatttccgccaactgttgaacctgcttttaaatcggccatagtttatcctcttatatattttctatttatacgaaaaaaggaagcccgaaggcttccttaatcagatgtttctctgaacgattgaactggaataacaccgctcggatcgacttttgaatttggaagttccataatcatagtggttcctccttcaacgcctttattcattcttacgccattcacgccaaattcttgaacaacgctattcagtttttcgctatgagaggtttgaacaaatacaaggtttttgattttagagtcaccaactacggacgtttttggatatcgtgataccacaatagtaaatccatcagcgtctgtaggaacagcggtaaatctttcaaatcttagccatctatcagctccattttttggaatttctaatgatacgcttgaagataataaagatgtacctttgaaccatcttaagttagccctagtagtagaacctgcatcaagaaggcttttagatgcatacatatcacacactaaaaacaccgaatccccgggagataatccataatcagcgattttgcttatagattcattttgaactggatatcgcttatattcatatccagtagaatccgagtactcattagtgtcttcaatggaacgataagggcagcctgtatatcctacatcgccaacgttatcatacactgtatcgactttagctctggaatcttctttaactacaccatcatttccgtaaaatgactcaattaatatacgtccttttgctgctccgagcactccaacataggcagagtttggaaatgatttggaaaagtcagaacctggccaagaagcagaccacttgtttttaaaccatctgtctattaacgggctggattgaaatcgttcatgtgtcattataatatacaatcctgaagttaatccatttgcatattctacaaacgctttgttattagcgttgttatcatcagtggtaacgtcaaatgttttgaagttaataaaactgtcaccattaacttgaacaacattaatccccctccgtaaggaggaggtcatatcaaaggcaccattaatattcaattctggcttattaggaacagcattagaatgcgtagcataagcttttagccaatacttcacagagtttgcctcagagaggattcgtgtttccacgaaatcctcgccaaaggctgccattaaaattggttcagccattaatcacctacccattcaaatttgagagtttggtttggacggtctggccagattttaactgggccaagcttaatccattccaggacttcaagggttttaacctgagttgatactgagctcggagcaccaatatcagctgcagtcggaggagtagcagacgtgaacactcgcatccaatcatcaaacttattaaggtttggattataaatcctcatccacacagtatgcgcgaaacgcttatcagcagtttcggttgtcggaggataaggagtccaaagctgataagtattgtttgtagttacaccaacctgagttaaaacaccaccagctgcagttttttcttcatatccggtcactactaaagtgcttgggttagcagggtcaattggtgttctgatcggaaccatataaccacgaagaccttgtaatttagtagcgtctttaatttcagcagtccaagaaccttgtctcagtacagtttcattcgttggaacataccatgattcagaacctgtaatgacgatagcagaaccgcttaagttaagattaccagtcatggtatcgccagctttattaacataacggccatcagctagtcttgcatagtttttggtagttaaaattggatacgatccagttgaatcctgtgcaaaaatttgtgtatcagcgtcacgggaacgaataaatgcggactgtgattgggcgccgaatattgaattcaatccctcgacagcaagcatctgaacgtccttaaccataacagttccgccaactattgcatttccagaagacctcagagttttagttgacacttcgttaggaacttctaacgtaccgttaccgccaaatgtgtaggtctggcttgcagcagtagttccagttccgtttttgacacgaatttttaaagttccagctgaagcagtttgcggctcagcataaattataccacgctcgcttccatctctattttgaaaacgaacatgcacgtttccggtgtcagcagttggagaaattttaacttcaccgccattagcatatataatattctggacagaaatattattgctaaatgaagtgtcctgactaaatgaccaagctccagaaatagtctgcgctatatcgctacgagcatatttgtctggggtttgaccacctagcattccggtgtcataggctttaccaagacgaggtaagtaatgtttcaacgtgaggttcaattcatatggagacactgcgacgcccttagaggcatacccgttatccggaagagttgagccatcggtatcattacctttccacgttccatcgcccgtagatagcctcacggtccctctaacgctgtctgtagcttgccatgactctgttacctgaatagtctgtttcaagtaagcaggagaaacaattctatcacttaatgtgcctgcatcaacttgtgcctgtgtagcatactgagcaagaccgatatctccttcagttgctgttttagcatgtagcgtggcagcagtaactattttcttggcgtcggtgccggttctaacctcagcagcagtggcaagagtggttgtacctctttgagaagtacttgcttcctgtatgttgatggtataatggtcccagaggttcccagtaatagttaagccagaactagtattaacttggatacgatcagtattagcaaatttatcaaataataatttagggtttaccattactgtacttgaagtaccagcttcaaattcaccctgggcaccaggtgtcgcgaagcgagcaataccagtacgatcgttagttgctgtacggtcatttaatgttttaggtgtaactgctttattagtcactccgccagcattaacttctgtctgtgaagctatttggattaatccaatttctccatcagtagcaacttttttatgcaaagcttctggtgtaacgactgtaggaatatttgaagaagccggagttccgtttctaacttcgctatcagttgctaaccaaactattcctgactgatttacagtagctttatactcacgaagagtttttggagtaactgcatttttgtaatcagaatgatcgaatatacctgtgccggcagaagaacggtcagcagttgtgttaggagcaccgccaatttttactaattgaataacacctaatcgtgaatccgatgtagtacgataaagcaacttcttaggagtaacaattgtaaaatcgtctgttccttcatccattttagcgttagacgcaatttcagctaaacctctacgggtttcagtagcagctctttcgttaagctttttaggagtaacgattacgttatccaagtaagaagcagttgttgcctgattaacttcactagaagttgcaattcttgctataccagtctgagtttcagtagaacgacgtccgtttaaggtttctggcgtaattgctaattctttttctggacttgactccgcgttagcttgagcttgtgtagcaagagcaataacacctaatcgtgctctggtagtattgtctttagcatcaacacgttctacggtagggtcagattcagttacaatccaatagctttttcctgttgctttttcttcaatatatgcaagctcaagaacaggaacatatgacgtagttccgttaaaggtaatcgagcttgattgaacccatgctgcatcaggtggatactctgagcgttttggaaattgcagtaaattcaaattgctagcgatagtatcaccatcagaagctttaattactacagtctgtcctttacgcatataattcattgcgattttgacagtatccccaacagctacgtctgtaggcaaagtaacgttaattgttttaacggtattgttatctgcgccaaatacagaaatatgctcattaggcattaaagtaacgtcagaagtaattattcttactcgggtgcgtaaatcattttcaaaaatacgccagattttgtcaatcgagtcatataccaaaaacccattacccgaagtacgtacttgaacctctgtttgtccaggagtcccaattgagatagttgggtcaaacgtacgcacagtcatatggttaattggcgatgtaccgtcaaggtcagtaaaattgatgatatcgtttgaattagcgaacaacggcagagtaataaaaatctctgagttggaagtataacgacgaactacgttatcacctgcctgaacttgcgtcggaacaatcccgttcggaactaccattttagcagtatcgccaaaatcggttaaacttgcacgccatgcaccattactaaacgtaagcataatttgtgaatatggacgtgtaagtcttacctcacgcagacgcgattcaccaaatacgatagacgcaccagtatcttgtgctttaattaagattccgttatagccaggacgcccgccaatatcacgaactacgatggtatcgccttcatctggtgctaacggaagcagtaatgtagcattacctgcagcgttagagtcaacgttgatgaactgaccagattgaatttcaaactctcctttacggacggtataaatccaattcgggtcaacacgtaaagaagtccaattcgcctggttaaaatttccagcaggctttggaatatctttatttgcaatccagatacgacgtccataagtcacagcaaaatcagtgagatacccacgtgtcgggtcatatttttggatagtgttttcttgaataacgtactcgacggagacgccgtcggttttaacgttgcggtcagctagtgccacatttataactttatttccgcctgcgtccaagccgttcgttgcacggaaatgttgtttcagtaaatcgctcatagagtctcctatggggttatgcttcattatagaagtatttataatggctgtactaactaattgaacgaggttcaaatgtctgatttaaattgcttattcgccgaagaagaccaagtaaaagaaggcgtcattctgattgacttgtcgcaaatcgcaatggcgacaattcttcatacgtataaagaaggcgataaactaaccactcctatggttcgtcatcttattctttctactttaaaatttaatgcttttaagtggaagaaggacggatacacaaaaattgtcatttgtgttgataatgcaatcaatggatactggcgccgggatgtagcatattattataaaaagaaccgtgctaaagcccgtgaagaatccaattgggactgggaaggttactttgaaggtcttcgtactgtaattgatgaatttaagcagtatatgccttattacgtcattgatattgataaagcagaagctgatgatagtattgctgtactgaccaaaaagttcagtctcgaaggtcatcctgttatgattgtttcttctgacggtgactttactcaattgcataagtatcctaatgttaagcaatggtcaccaatgcagaagaaattggtgaaatctaaaacgggttctcctgctttagattgcatggttaaaattattaaaggtgacaagaaagataacgtcgcttctattaaagttcgttcagacttttggtacactcatgttgatggtgagcgtactccttcaacgaaaatgacatttgttgaagaatgtcttgatgctggcgaaaacattaaagatttgcttactgaagaacagtataagcgtttcttggaaaaccgtgtgttaatcgattttgattacatccgcgaagacattgttgctaacattttagattgttataataactatcaattaccgggtcgtggcaaaatttatagctactttgttaaatccggtctgtctaaattaatgaaagaaattaacaacttttaaggtgaatataatggctaagaaagataaagagcaagtagtatttgatgaagtggtacatggacaggctctgcgagatatgattaaggaagcctcaggtaataagctaaaagcagaaagctatcttgaacttaacaaagacattaaagaccgcgccaagaaagaacttggcgtagaaggcaaactgtttaatcaactgcttgctctgttccataaaggcacacgcgatcgttttgaaactgaaaaagatgaagtggtagaagcttatgactctattttcgcttaaagacgagggggatacctccccctctgaatccattaatcagctgttagataagcaagctaacggatttactattgagtctatggtaacagaacttggaatggggtatcttgaagcaacaactcagtggttagaagaaaattctattcctgagggaaacttcaatagatatattcctccagcaatcatagaaaaaattatgtcagaagcattggaagaaaatatgcttcgtccatcatttagtcaaacacacaaaacgaatagtctggactttttattatgattcgtctccgcatgcctggaaataataacagatacgttaacggtaagagcgtttatcttttatatttaatgctcaaacaacactttgccggtcgatatgacgttgttaagtataactgggttatgcgggtctctgataaagcttatcaaaagcgtagagacaaatatttctttgagaaactcgctgagaaatatacgctaaaggaattgactctgatattcatgagcaatcttgtagctaatcaagacgcttggattggtgatatcagtgacgctgatgcgttgatattctaccgtgaatacatcggtaagttgaagcagattaaaacaacgttctcggaagatgtaaagaacatttactattttgccaagaaagttaatgtagataagcttcatgatatttttgaatataatgagaaagtcggaacatcttatgtgttcaaacttctgcagtcaaacgttatatctttcgagacattcatcatgcttgactcgtttttagatataataaatacacatgatactgcaacggataacttagtttggagtaattactctactaaattaaaagcttataaaaaacttttaaacgttgacggtgctgaagctaagaaactctttattagcataatcaaatcttgtaaagaaattagtatataattaatctatcgtccagttgcaaggacccatgttgcaacaacaactgttaaatttaaaaaggtaatcatatgtttaagcgtaaaaatcctgctcaacttcaacaacaactggctggtctgaaaggtggttcttctttctctaacgaagacaaaaacgaatggaaactgaagaccgataatgctggtaatggtcaagcagtaattcgcttcctgcctggtaaagatgaaaactctctgccgtttgtaaaactaatcaatcacggtttcaaacacggcggtaaatggtacatcgaaaattgtacttctactcacggtgattttgattcttgcccggtttgtgctcatctgagtaaaaacgattcttataacagcaacccggctgaatataagcttctgaaacgtaaaacctctttctggtctaacatcctggttattaaagacccggctaacccagaaaacgaaggtaaagtattcaaattccgtttcggtcagaaaattatggacaaaatcaacgcgatggttgaagtcgatgttgatatgggtgaaactccggttgatgtaacttgtgtgtatgaaggtgcaaacttcgtcatgaaagttaagaaagtcggtggtttccagaactatgatgaatgtaaattccttggtcagtccgagattgcaaacatcaatgatgaagaaactcagaaattcctgaccgaaaatatggctgacctcagcgaaattgtggctccatctcagtttaaatcgtttgaagttaacgaagccaaatttaaacagattatgggtacagcagctcttggtggtgccgcggcaaaagcagcagctcaagccgataaaattggtgatgacctggattcctttgacaaagacctgtctgattttgaatccaaaccgacctcttctcgttccgcagacgatatcatgggcgatgctggtgacagtgttggcgatgacgatctgaatgatattctgaacgacctctaatataaagggaccttcgggtccctttttctttatccctccaaaaatattttcacaaaattgtttacaagccagttgatgagtgatactatatctacatcgaaacaaaacgagtagaggaaaacatcatgggtaaattaaacattgatatcgtggcagaaccctacattaataaatcaggattttgtactgatttgatttttgaagatagttcacgtttttatgacactgaccatggtattgattttgatttagttattaaagaaggccctggtggcggttggccaaatattgacctccgtggttctaaagaagcggttcgtgcttggttagaagcaaacgagtgggaagatattgattttatgatggaagactggaaagagtaattacctttggggacttcggtccccactttgaggaaatgataatggcacaggttactgtagaaatatatgattatgaacacttcattgaaaccattgaaaaatacggtttgattgaagttagtaacaagtctgccccatggggaggaaacgaaatcactgtagaaggtgatactcctactctatggttatggcttgaacgagaatattttcctggcatggatgatgaatgccgtgaagatacattaacgacttttagcgggtaaattatgaaactgaacacagaatatcgcattatcccaagtcttgctgccgagtgggacctttcatcaagcggaaatcgccggatgcgcttgatgattgaagaacacggtggttcgttctttcctactaaaatgctcgacgaagataatagtttcatcacagaagtaaaatttaaagatggaacaactgctgacgctgaagaatttggagatgcatactttgaaatcgctgattatgaattcaaatacttcgaaccagtatatgaaattggtagtgcaatccaacctggtcctactcgcttggacttgatcgttaccccagaaaatgcagaagaaatgattgacttgatcaaaaaagttttcaaaaagtagtttacaaggagctatgcttgtgatagtatagctccataatctactggagaataaaaatgaaacttcaacgtcaaagcatcaaacttggttctgaatatcgtggtaaatggaatttctgcatttgcgataaaaacccagaagaattagagcgtgttgaagaagtactgtgccaaatggaagctccattcactatgggtggtgaaactgtctattggaatgattactgtgataactgcccatgctatgaagatgggtatggctcaggcttctggattcctgttgaagatgttgaagaattcaaaaaagcatttaaacttgctaaggccaagaaatgattgaggctgaattagtagttttgttaatttctgttactgccgcttttattagcggcgttatattaggattatttttatatgtctaaatttagtgtaatgggatatcctcgcgttaatattcgctgccagtttgatgaaattcctggagtaactcacattgagctcgtatttgaccctcattcgctatacaatcaggtttcaggtaaaattgattcagcatatggcgagtttttaattaatgaccaggtgattatttcagctctttctggcaatcaagcaggttcgttgtacattctgaaaaaggaagtatttgaggaaatttcagaagccataaaagaaggatttaaaactcttcagaacatgattaaagctagtgggtacaagtcatgtggattttaactgactgggattgtaagtactgtggtggtagcctatggcaattaggtggccggtgttttaagtgtggaatgagttgaattttgctgaggtttaaatgattcaaatagtttatgcctttgctcctacaaaaactgtagatggcaaaaacgaaaatgcttttggtttaggcgatggtcttccttggaaacatatttcccaggatatgaaaaactttgctaatcgtactcgagatactatcttgatttgcggagcaaagactttcatgagttttcctaaacctcttcctggtcgtaagacaatcgttgtccaagacatgagtcgtgcgttggcaactgctaaaaacggattttttgctgacgcgtatgttagtgaagaagaatttatcggtttcttgggtggtgacattatggccgctcatacttcttacaacagtactatcacttttaatagagaccttaattattctatcataggcggtgccggaatcatccagaaggcatatccatatgcagataaggttatacaaacaatcatcagaaaaagtcatagagtgaattctgatgtcactctacctattgaatttgtggtagctccgacctatgaaaactctgggtttaaagttattgaaaatcattggtatcatattgatgaagtgactaacatttcagaggtggtctatgagcgcaaactatgatatcactcagctatcagaagacaaagtccaaaagaggtggaaaagatttccatttaagcatggtattcatcttctagttttcagttataatggtcttagcacttataacggttcaactacagtatataaccgaagtggaaatatacctattgaaattgaacgtgattataagaagatgttcatcggaatgtcacatggcaatgtgatggtcaaagatgatgtagtgtctattattggacgatttgaaaagcgtggagaccagcttttctttacacctcttcaggaaaaatttaatgcgtgaataccaagaattaattaaagacatttttgaaaacggttatgagacggatgaccgaactggtaccggcactattgcgaagtttggtactcagttacgttttgatttacaaaaagggtttcctgctgtaactaccaagcgtcttgcatggaaagcatgcattgcagagctgatttggttcttgcgtgggtctactaatgtccatgaattgcgtcttattcagcatggttcattactagaaggtaaaactgtctgggacgacaactatgaaaaccaggcaaaagacatggggtattccggaggtgaactgggacctgtgtatggtaagcaatggcgagatttcatgggtgttgaccaactgaaattgatcattgatcgtattaagcaacttccatatgaccgtcgtcagattgtgactgcatggaacccggttgatttggataagatggcattaccgccgtgtcatctgctttatcagttcaacgttcgtcaggggcatcttgacctccaatggtatcagcgttctgtagatgtattccttggcctccccttcaacattgcgtcatacgcggcattgattcatgttattgctaaaatgaccaatcttaaacctggtcatttggtattcactggtggtaatactcacatttacatgaatcacattgagcaatgcaaagaaattctccgccgagaacctaaagagttatgcgaacttaaaatagcatttccggatacgtatgaaacatggcagactggttctcaggttcgttggttagagcagtttgcacgtccacaccactttgaattagttggatatgaatctcactcaacaattaaggggaaaatggcgatatgaatattcgatttgttcgtaaaggacaaacaatattaggcgagatgtgtgatgcattctctagtgatttgcctgaagttaatgacaagatagtttttgacgggatcgaacaaagggttctgtctattgttaaatcatatgaatggtctataggcaaaacacaattaatctgttggtttgaagttgatataacatgaagatatgtcgggtggttaataaataccattccgacttcgatgtaaatatccaacgcggaacaatgtggggaaattacgtcggtaaagattgcgataatcgtcctgatgctattgctgcgtttaaggacgattttattgctaagattcggaacggagaaataaagcgagagcacttagaaactttaagaggaatgagattaggatgcacctgcaaaccgcttccttgccatggtgatataatagctcttgtagtgaataaactttttaaagatacatttgaattagaggacttatgcaagtaattaagagctcaggtgttagtcaagaatttgacatgcagaaaatcattaaagtcctcgaatgggcgtgcgaaggaaccaaagtagacccatacgagttatatgaaattattaaatcccatctacgtgatggcatgagcactgcagatatccaaaagactatcgttaaggtagcggcgaatagcatttctattgatgaaccggattaccaatatgtggcgtctaatgcagctatgtttgaaatccgtaagcgtgtttatggacagtttgagccacctgcttttattgaccacatttctcgttgtgttaacgcaaataagtatgataaagaaatcctgagcaaatggtcggcagaagaaattactttgcttgattcttatattaagcatgagcgtgatttcactatgacttacgcaggaacaatgcagcttatcgagaagtatctcgtaaaagaccgtcacactggtgaattgtatgaaactccacagtttgcctttatgctgatcggtatgtgcttgcaccaagacgatggcgaaaatcgtttagcaaacgttattcgtttctatgatgcagtttctactaaaaagatttcattgccaactccaattatgtctggtgttcgtactccgacacgccagtttagttcatgtgtggttattgaaggcggcgacagtcttaattcaattaatgaagctgctgcgtcaattacaaaatacatcagtaagcgtgcaggtattggtattaatgcaggtatgattcgtgcagaaggttcaaaaattggattcggtgaagtcaaacatactggagttattcctttctggaagcacttccaaacagcagttaaatcctgctcccaaggtggagtccgtggtggcgcggcgacactgtactatccaatctggcacttggaagttgaaaacctcctcgtacttaagaacaacaaaggtgtagatgaaaaccgtattcgtcatttagattatggtgttcagattaataacctaatgattgaacgcttgattaagaatgattacatcacattgttcagtcccgatgtatgtcttggcacgctgtacacagaatacttccgtgatgcacaagcgttccgtactttatacgaagagctggaaaagaacccagatataagaaagaaacgtattaaagctcgtgaactgtttgagttgttccttactgaacgtgctggtactgctcgaatttacccgtacatggtagataacgttggtgaatatggtccttttattcgtgatgtggctacggttaagcaatcaaacctctgcctcgaaattgcgttaccaacttcggatgttggccaagaagatggcgaaatcgcgctctgcacactcgcagcattcgtgctcgacaacttcaactggcaagaccaagaagaagtcaacgaaatcgcagaagtaatggtaagggctttggataaccttttggattaccaagactatcctgtagacaaagcgttaaaagctaaagaccgtcgagcactaggtgttggcattactaactatgcagcttggttagcaagcaactttgcttcatacgcagatgctaatgatattactcacgaaatgatggaacgtattcaatatgcactcatcaaagcctctgttaaacttgctagcgaaaaaggtccatgcacgctttacaaagaaacacgatacggacgtggtgaactgcctattgactggtacaacgaaagaattgaccaactcgcagctccaaactatgtctgtgactgggaactcctgcgagaagacctcaagcgatacggtatccgaaattcaacgttatctgcgcttatgccatgcgaatcgtctagccaggtatcaaactctaccaacggtattgaaccaccacgtggaccagtgtcagttaaagaatcaaaagaaggaagcttcaaccaagtcgttccaaatgttgaacacaatgcttccctttatgattatgcctggcagctcgcgaaacagggtaataagccttatctgaaccaggttctgattatgcagaaatttgtagaccaaagcatctctgctaatacttattacgaccctgcgaatttcccgaaaggtaaagtagaaatgtctgtaatgatggacgacctgctttatttctggtacttcggtggtaagactctttactatcataacacccgtgatggttccggtaacgatgatatgattcaagactctgctgactgcgcagcttgtaagctttaataaaagggaattataattagaccacggatggttaacaccacagaataggaaatagaatgagtacagtttttaataccaagcaagtagatatcatgaccgaaccgatgttctttggttctggtctaggaattgcgcgttatgatattcagcgtcataaagtattcgaggaactcattgagaagcagttgagtttcttttggcgtcctgaagaagttaacgttatgatggaccgtggtcagtttgaaaaactcccagaacatcaacgcaatatcttcactgataacttgaagtaccaatctcttcttgattcaattcaaggacgagctccagcagcagttttatctgcacttatttctgacccaagcctagatacttggaaccagacttggacgttcagtgaaactattcacagccgttcgtacacgcatatcatgcgtaacctatatgtagacccagctaaaatctttgatgaaatcgttcttgacgaagcaatcatgaaacgcgctgagtcaattggtgtttactatgatgatgttatagcgaagactcgcgcatgggaaaatgccaaaaatcgctgctttaatcaagataatatcgaaattaaagaagctaaacgtgatttaatgaaatctctttatctttgcttacatgttattaacgcgctagaagctattcgtttctatgttagttttgcatgtaccttcaacttccataaaaatatggaaatcatggaaggtaatgccaaaatcatgaagttcattgctcgtgatgaacaacttcatctgaagggcacacagtacattctgcgtcaacttcaaactggcactgatggcgaagaatgggttgagattgctaaagagtgtgaacaagaagcaattaaaatcttcatggaagttaaccgccaagaaaaagactgggctatccatcttttccgcaacggtggtcttccgggactgaacgttaaaattcttcatgacttcattgactatctgactgtatctcgcatgcgtagttgtggtcttccttgtccgattactgatgcaccaactcgacatcctattccatggattcgcgaataccttaactctgacgcagtccaatctgctcctcaggaagttgagatatcttcttatctggtagctcagattgacaatgatgtcactgatgatgttctaattggatttaaaaagtacttataaggaaaggggcttcggcccctctttattatgaatgatattgctaacgagttttcttttataaaatatgttcaacttgagttagaaccagattttaccatcaaaccaattttgatagcaaacaagttgaatgtagtttatgccatcgcagttgatgatgagctggtttacatcggtaagactaaaaatcttcgtaaacgtataaattattatagaactgctattaatcggaaagaccaaacctctgattcggctaaatctgccaagatttttgaagcactaatggctggtaaaaaagtagagttctatgctcgtcagtgttttaatcttttgattaataatgaacttggcgagatgtcaatatccactatggacttggaagaaccgatgtttattaaaaagttcaatcctccatggaacatacaacataaggtaaagaaatgttagagctatataaaaatttaatgaatctgtgtgaaagctcagaagttgcaaaattcttttataaagattttaccggtcctatggatggtaagttcagagtgttttcatatcactatgcaagctacagtgagtggttaaaaccagatgctcttgagtgccggggtatcatgtttgagatggatggcgataccccaattcgaattgcttctcgtccgatggaaaagttctttaatttgaatgaaaacccattaacgatgggaattgatattagcgatgtagaatacattatggataaggctgatggctctctagtatcatcttatgtcgatgatgggtatctataccttaagtcaaaaacatctctctacagtgaccaggcaagacaagcttcagctttgcttaacagtgaagaatattcttcgcttcatcaggttattcttgagctagcgctagatggttatacggtaaacatggaatttgtttcacctaataatcgtgttgttttagcatatcaggagccacagctgtttgtgttaaacgtccgtaataacacaactggcgagtatattaaatatgatgatttgtacgctaatgctaaaattcgtccttatttaatcaatgcttacggaatttctgaccccacgacttgggttgaaggtgttcgtgaacttgaaggcgtagaagggtacattgcagttctaaacactgggcagagatttaaggttaaaaccgaatggtattctgctcttcatcacactaaagactcaataacgtcaaatgaaagactgtttgcgtctgtcgtatctgcaaattccgacgatttgcgttctctttttgctggagatgaatatgcaattaagaaaatttctgcatttgagcaagcttatctagattacctcggaaagtcacttgagctatgtcagtcgttctacgatgaatacagaggtcgtgctcgtaaagattatgctattgctgcgcagaaagccacggttaatcagcgccatttgtttggtgttatcatgaacatgtacgaaggaactgtagatgtagataaactgcttaaagacctcgaaagggtgttcttgaagtactgggcaggatatgttccaaaagagtacgaaaaagaaattgaaatttctgaagaatagttgtttacatcctcatcagagtgtgatactatagacttatatcaactgatgaggatattgaaatggatatgcaagcaattactttagatatggttgttaacaaatatggtactcattctgatgggatttttgtgtggaatggtaccaagaaggtgggcttcgtcactgacctacggacgcacatggcgcgcaaggaagctgctcgtaagaagcaaaaagagtacactaatcgtgtgaacgagcagcgtgccgaagcccttcctgaagccgtagatgaaatgattgatttcctagataatcatctcgcgaagtatggtgcagaggtgttcaagaacatcacccagccaaacgttcatgctaacggatgcaaatgctatgtaatcgttgacccgatttatggcaagcatcgtcttggcattatgcatcgcgagctgaattattctgagatggcagaatatgtagaagcttgcttcaagtgttctccttcagaaagttctgatcgtcacatcctcatttcgggattatcccgtgatgatatcgtagaggttatccttaaactatgctcaaaataaacacaacttggttgatgattggagtgttagcattatccgcaggcggattgaaatatctttcatggcgggtagaaaatcttaaagctgacctcaaagtcgtccaagatgaatctgatcgacaagcaaaagaaatagaaaatatcggtgtttctataaaaaatctgcagacaacatataaaggctatcaggaaaaccgagcagctcgtgatacttccaacgctaaaatgaataaagattctaagcgtggaaatgtagtagcagctaaacctgggttagttgaaaaacagattaatgcaagcttcaataagtttgcagaagatatccaggaggctaccagatgaaacgaagtctattagccatgggtattatcagcttacttgctggatgctcttctagtgcaccggatgtcccggttttgcatcctgattggccagacccaattcaaaagtgggaaggacactgggaagtaaaagtaattgacggtaaagcctgggtaggtatgccatttgaagagtcgcaagagtatcgcatctggatgaatgacattttacgttatactaaagatgctaacggaatgatatgttattatcgttctgaccttaaagaacctcgttgcgttaagtaaactaaataagaggaaaatattatggaaccgtcacaccttcatacttacttcgtaaaagacgcatcacatcttttatcgattaaaaagacacaacttaggaatatgctagctgttggatcgtgccagttaactcctcttgttaagaaagctattgctgtaccagaaaatatttctaatggatatgtttatacagtccgtgttagtgtgcctggagctttaaaagaaagagtgtttgagcttaatgaccaaacacgaatttcatttgatgtgtggtttaaactattcatggcagaatttatgtatcccgattttttggagtttgttcagcgtaaagaggcactgaaggaagcaatttctgaattggaagatgcctcaattgaattcggtaaggcactccaatttgtagaaagtggcggtgtagagcaagatgaagttaacaattttttgaagaaacatggaaagcgtcgctcattggcgcatcgcaatctttctaaaatggtgatgtagtgaatcaagaacagtatgaaacacttaaagggttaattgctgaaaatgaattggcgtgcatcgtgtttggacgcgcagctgaaaattatgacaaaaatgatatactgtcaatgaataagccattgcgagcaattaaagaaaaatatcgtgctaattggggtgaaaagtctaaggctcttcatgattttattgacactcttaaggatgtataatgaaaaaattggttttgacacaaggggctccaggctctggtaaaacaacctgggctaacgaatacgtagcagctaatcccggttggtatgttttgtctcgtgatgatttgcgtgaaggcatctttggccttgataaacgtaatgattacaaatattctaagcttcgcgagaagtccgtatctgtatgtcagttttctatggcgaagactctgcttgagatggaaaccaccaaaggtgtcatcattgctgatactaaccttaatccaacgactatcaagaagtggcaagagttggcatacgaaattgatggtgtcaagtgggaaattaaacgctttgacgttccttggactgaattgcttaatcgtaacctctatcgtggcgcgaatgcagttcctattgaagtgcttcgtagcttctattctaagatgcacccatatgatttgtacattccagacgaatcactgccaaaagcagttatctttgaccttgacggcacgttagcagataacaatcatcgttctccttatgacttggctaaatgtggtaaagaccatccaaaggaaatggtaattgaatttcttaaaatgcttcgtaacaaaggatataaaattcttactgtttccggcagagagtctggtactaaagaagaccctactgtttatcaacgcattacgaagaaatggttgttggaccatgttggcgaaacaggcgaacacttccaacgtaagcaaggcgattcacgcaaagacgatgtggtaaaagaagaaatcttctgggaccgaattgctgatcgttataatgtcaaacttgcagtagatgacagggcgcaggtagttgaaatgtggcgtcgtatcggtgttgaatgctggcaagtagcccacggtgatttttagaggaaagtataatgtttccaaagtattccgaagtagtaaaagtatcatttacgcaagttgttgctaatcatttaacagatgagtttactccatctgaagtagccaaaatgcatgcagagtttttatctgcaatgaatgcacttattccaaacggcgaagttattaaattttctattgaccggtcaggcggttcgtctgaagttaaaatttcttgtggcgaaggtgaacacgactggtttatcgttggaattattgctaattttgaaacccaacaggttatgacttatgttgtctgacgctaaattttcacatgatgaatttatttcgaaggttaaaatcttcgcacaggaagtagcaaacagggttcctggaagtaaagtgactctccgacgagagtcatcctttaactatgttgatgcttatatcattacagttaataatggaaagagcaatcaacacactcaattggctttaaccggaacaggccaagttgaaatgactaacattttaggacatatctaatgactttacgtgaggctgtagaagctcttttagttgaacatgctcgtggcattaaagcagaaattagccaaaatggtattcgtctaattaatgctgttattggttctgaccaaggtgtttggtcaattccacgcgaagaatatgatgctattttgtacagtaacgttgatgttaaggaaggccaacctctttatggctatgtcttttccgatgttattgaacgaggaaatcatccgtttccagatggtacaggcattcgtacttctcgagtagagagttttgcttctcctaccgacgagttaaaattggttaaaacaaataacacaacttatctggtgatttaaatgaaagcgtcgacagtactacaaattgcgtatctcgtatctcaagagtcaaaatgctgctcgtggaaagtcggcgcagtaattgaaaagaatggacgaattatttctactggctataacggttcaccttctggcggcgtgaactgttgtgaccatgcagcagaacaaggttggattggtgaaattccttacaaatctacaggattgcgtcaagacggattccaagtcaaaaaagtcggattgctcaaagaacatcgagcagcccactctgcatggtctaaagtcaatgaaatccatgctgagcttaatgctattctttttgctgcccggaacggcagtagtattgatggagcaacaatgtatgtcacactgtctccatgtccagattgtgcaaaagccatcgctcagtctggtattaaaaaattagtatactgcgaaacatacgacaagaacgaacccggttgggacgatattcttcgttctgctggaatcgaggtgttcaatgttccaaaacgtaatttggataagttgaattggtataacattaaagaattctgtggaattgaataatgaaacttagaattgttgaaattaataaacttaacctaagcggtgatgttgttatatcatactcagtagaacgccggtattggtttaaatggaaaccattagcaacatttaaatttgaagatcaagcagttcgattattaaaagaattatccaagcgcaaatctgtaattatcaaaactattaaagagacatcaaaatgaaactgactactgaacaaaacatccatattcgtgaaactctgaaggctgtgctgagcatgggcgaatcccagattgtgtttgaaaaagctgatggcactattcgtactctgcgctgtactcgtgataaagacattattccatctgatttggtagaaagcactactaaatctgctcgagcagaaagcactacttcacttccggtatatgataccgagaaagaaggttggcgctcatttacctttgataaacttatctcggtaaatggtatgaaagttgagcatctgctgcagatgatcggtaagtaatttgctttaaactgaccatgttaatataactacatggtcaaacaataaaggtaacacatggaacttccaattaaagctctaggcgagtatgtaattctcgtatctgaacctgcacagcaaggtgatgaaattgtttctccttccggtattattcttggaaaagaagaacaaggacaactgccggatatgtgtgaaatctattctatcggtgatgatgtaccgaaaggatttgttgaagtcggtgatttgactccactgcctgttggtaatatcagaaacgtacctcatccgttggtagcagcaggtgtgaagaaacctaaagaaatccggcagaagtttgtgacttgtcattataagtccctggcgtgcgtatataaataataatatgaattgggcgtcggaaattagttacccgagcaattctaagcggtggatgcccgagctaaacctcggttaccgtccaccaaattttaacctcatttgaggaatgtttcaatgaacaaacaacttactaaagctctggaactccaacgtaatgcatggaattccggtcacgaaaactacggtgcttcaatcgatatctatgcagaagcactggaagttctgaaagggtttaaacacctgaacccagcacaagctgaatttcgtgatactttagaagcgatggatgaactgaagtatgctaagcatcttggttctgctgctcgcaaagctgttcgccactttgtggtaacgctgaagtaatttgtacgcccaccatgtgtacgcatgggtaacgtatgatgtggacgttgttggttatccccacgtaaaacatccgaaaccaccggtgatttgctaccaaagtgcagctagaaaataaacggcaagtgcatgctaccccgaggcgatggccaatcgggagtacgcctcaaggcctatacatccatcggtgtatatcttatccctgagaaatcagacccggaacctttaagctaacggtgtgcaacagataagagtttaaacgtaccccttgagggcttgcgggagctacaaccgaaagaactgtcgaaagaagttgaacctcggaagaacgtgctcccatgtatttctccaaaatggaagatgataaaatggctaaacaagctaaagcaaaaactgcagtaaaagaagttgttggtacctctaaacgcgctggctacaagcgtgggtcgaacaagcgtatcaatcagacggttgagaaaatcatgcgtcgggctcgtgcggttcttcgcgatgatgcttctcgttttggtaagccgaaagcataagttcagggactccttcgggagtcccttttttattttccacagaatgaaaaaagttgtttacttctaagttcaacaaggttactatagacctgtaccacccaaacggacaacggagaataaaatgaacttcactaacttcaaccgcaaatatgtacagaacaatgcttgggatgtttctactactttgctttgggaacacaacaacggtacagtagctcaaatcgatatgtactgggaagataactacgtattcttcagctttgaaaatggtcctactctggatattcagttcaatggttctgaaatcaaagttggattccatgatgaagttcgtaaacgtgatttatcttcacatccgtcttggaacacaaatcgtcagctgcttgttaaaatttatctgcgccacatcctcggtcgtaaaacaactgaagaacaacgtgaagcaatctgggatatcgtttcaaacgaaatcaagttttaactaactcggggcttcggccccactattgaggaaatgataatggaaaaaggtaaattctataagcttaaaaagactccaatcttgtctccaggcgctcttatcaagggtgtttttgagcaaatcggtaataatccgattaaaattaccagaacctttaaatatgcggaaaataccggattagttgaatttgaaatcattaagccagatggagaatacaaacgcgttagtgtagatgaagttcgcttttcccatatgtggtgtattattactaatcaagagtttcagcattattttgaagaaaccacccacaaagaacctgaaccgaagaccgatgacggaagcaatgattggggtgtttggacctcaaataaaggaaatgatacctacaaaggtggattaacaaaggaagaagctgttaatcttgcaaaagtacaacgcctgaatgcaactaaagacacaaaagttgtaatcatgcagccttttgctatccctgtagttcacgttaatattcgtccgttttaagaggaaattgaaatgattgtatcagctttctatgattcacgaaagaaaaaggttgaaaccattatcagcgatactcgcgatggtacacctgctaataaaaatggcgtgaaagcatacattgataagtattgccctcctgaatttcgtatggttgatggcgtagattctctgagcattaatgttataaatgctaaaattgaatttattaatgaaactgtgccaattgggtattctgacggtgatggctcaaatgccaaaatgccgaaagaaaaattcataactaaattttgaggaaattaacatgattgtatccgtgcctaaatctaaagctggtattttttcttgcggcttgaaaaaccacccaatggttgatatcatgtcagctaacgttaaacaacacaccgttgagtatgaaattgatgctccggatttctttgaattgcctgaatggacagtgagacttgatgcatgaaatatcatatcttcagtacagtaagattagcaaatggaattcctggagttgtatgtgatacggctccagccattaaagcctactcggttgaaccttggtatgaagttaattgggttgatggcaatcgttcaatccatgcagaatccgagctttatccaattactcagttaagggctgctaacgacgatgtctattaatcctcacttcggtcatatggttgcccgacgtatcaccagggaaatgctaaagactgctgagtattataatatagaattaattgatatagaaccctcggacactccagggttaatctggttcaatttcaccggtgccgcaaatagcgtcgccaaatttaaacaagcattgaggaatttccccgaatgtcaaaacctgtaattgcgactgatgttgatggaatcatcgttaaatggcaaagtggtctgccttactttgcccagaaatataaccttccggtagagcatatccttgatatgatgactactgaaaaattcattaaacccgctgagctgtttgattgtgaagaagaattagctgttaagctgcttctgaagtacaacaacagcgattttattcgttatcttgctccatatgctgatgctttagctacagttaataagctcaaagaaaaatacgattttgttgctatcacggcccttggcaattcggtagatgctaaccttaatcgtcgctttaatctgaacgcattattcccagatgcatttacagaaatcatggtctgtgattatgatgaatctaaagatgctttactggaaaaggctaaagtaaaatacggcgatcgcatcgtctgttatgttgacgatttgcctaaacatattgctgcggccagcaaagtatttgaagacactgaaacccgtgtgttctatatgcctcgtggtgagcgagagggttcagtgactgctcctggaattatggttgaagattggcatcaaattgtaacttgcctggaatctctgaaatccgttaagaaaccgcagaagtctctttctggattgtgggaagaagctatcaaagaccaaattcgtaaagagcaacatccttttaattggcctccacaacaagttccaggagattggtggaaacaacctatcattccgtttagacctggttcacatgttcctcctggaaacgactggtggaataacggtcgtattacatgtgataaccatcaaattaattgctaacacactgggtatggtataatagccataccctaggaggaaatatgtttgtagttcatactaaggtaggtaaacgttggttatcatgtgattatggccatgttaatcagttttatcgttggaatccaatttggcgtgaagcaaaggcgtgcccgatttggaatgaatgcatcaataacgggtttgtttatatcgatggattaacttatcatcgtagcgtaagcgaactttcagaagaattaggtgaataatgatttttgatatcatcaaagcaattgaagatgctaagggttctaaagctaaaacccaaattcttattgacaataaagataacgttgatttaaaacgagcttatctgctggcgtattccgggcgatttaaattctttattaagaaagttccagaatatactcccgttaaatatccaaatgttccttcaaagacgttttctgatggtctagattacctccaagacattctggcagcacgagtacttactggtaatatggcaatccaggggctagtagatttgctctctaagatgaatgagggtgatgctagtgtactggtacgggttcttcttaaagatatgcgttgcggcgcttcaggttctattgctaataaggtatggaagaagttaattcctgagatgccacagatgttagcatcagcttattctgagaaagcgctatcgtatattaagttccctgcgtttgctcagcttaaagccgatggagctcgatgcttcgctgaaatccgcggagatgatttagatgatgtaactcttcttactcgttccggcaatgaatacctgggtctagataaacttaagcgtcaacttatcgagatgaccaaagaagcccgagaacgccatcctaacggtgtgatgattgacggcgagttggtatatcatgtcgaagtgaaagaagaaacaaacgacctgtttgacatgtttaaagagcctgagcttcctgagctaagtaaagctaaggaattccaacagacggctcgcacggaatcaaacggattggctaataaagcaatcaaaggaacaatctctgctgaagaagcggaaggtatgagattccaagtttgggattatgttccgcttgatgtagtatattccgaaggtaaagttcctggatttgcttatgatgtacgcttccgtgcactggaaatgatgagcaaaggctatgacaaggttattctaattgaaaaccatgtcgtacataacatccatgaagctcgggctatctataagacatacgtagaccaaggtctcgaaggtatcatccttaaaaatatcggtgcttattgggaagataagcgttctaagaacctcgttaaatttaaagaggttatcactgtagatttgaaatgtgtcggttcatatgagcataggaaacaacccggtaaaatgggtgggttaatgttcgtatcagaatgtggtcgtattcgagttaatgcaggctctggtcttaaagataaacctgaagaattacatgaacttgatcgtactcatctatggaaaattagagattctcttccaggaactatctgggaacttgaatgtaatggttgggtaactgctgaaggccgtgatgatggtacggtagggttattcttacctatcattaaacaacgtagatatgataaagaagtggctaatacattcgaagccgcgtttggtgttaactttactgaggcaacaggaataaaatgaaagtattatacgaagtaattgctaaatcttctgacggacgtgggggtatttctgttcacacagaagttcttgagtttaataacattaatacattaagaaacttcaaagaaaacatcgaagcgtatgaatcagtaaatggattacaggtttggcgtacagtaacaataattaattaattaaaggccttcgggccttttttcgtataaatagaataaacaaacgaggatatgtcatggaacttttaaatgaagttttcgatgaagagaatagtaaaatctatcctgtcgagaacgttaaaccaaaactaaaggtgcctcaggtctttttgattaaggtgccgggtaataacaatttaatgattcggttagtacaagggtcaggtcaaggtgatgcagttaagaatatcaaaatgggtgataaattcattcaggtatatgttttctctgtgtcagaaaaaggtaatattggagcccttaagggtgggttaggacaagaccctattggtgctatcaataccatttttgagaccgtcaacaaagtagttaagcaaattaaagctgatgcggtaatgttccgctttaatccgaagaaaatgcaaggacaggataaagccattcaacgcattcttgctcggttgattactactcgcaccggcggtcggttcaatctaatgaaagatatggcttactataaaggtaagtatgcttattctattatggttcgcaagggcaagaagcttgaagagattgaaggaattcctgaaatttcagatgagttatacacaaaggttgaatccaaagtaggtgaaatttatgtgtctaaagaaaccggcgaaaacgttaccaaagccgaagcattggctaattccattggcgaaaaagaagacaagaaatctgaactcgctgtaatgagtaaaatgaaagtgtctcgaaaagatttaatccgagcacaatacggcaaattcgtttcgtatgttgatgaagattggccagaaaataaacgcgaacgttggtatgaattaactactaacactccagtactaaacgcagaaggcgatacggtagacctccaaaaagatatcaaagccggattagaaaaatcaattcctttttatgttgatgatatcaagcactatcgtgttcgtggcggatatggaagtaattttggtgatgcagttgagagattatttgtaggccaaatgtctagaatgcatgacgactggaaggttttcattccttcgggatcagacaaaatgaaaatcgctgaacaacgaatttcagacgttgctgatgttattgctcaagctaaaaatccggcatctatggaaacaatgcgtaaaatcgttgaagtagctactcgtggatttgatatgcctccagctgacgatttcggagctttacgtcaataccaaaatcttgtcaattatatgatatccgcttatgtgtcaattgttggcgattctatatccaaagcaattgaatataaccgtgaaatgcaatctcgtttaagcgaagaagaaagagatgcaatacaccattactgtggttctggttattcatttgttaataattatcttattggtatggaaagcttaggcgatccaattattgacaagaaaattcgtccgctcgattctgcctttgaaaaaggtttgcgtcttgaaccgggcactcttttgtatcgtggtcagcgcggaaaatacgaagagtttaaagataacattgagtctaaaatgttttatttccagaactatgtttctacttcgttaagtccaattatctttggtgcttattcaaatgctggtgattcattaatgccagatgctcctagctctgatttagaaaacaaagaaacaactatcgatgcagtatcttctgttattggaacagacaacttggaaagagttgatagaggcgaggaagttgcctatggtgatgagtttaagtttgggttcattattcacggtgctgataaaattaaggtagttatcccaggtgtcttgtcaagctttagcgatgaggctgaagttattcttcctcgcgggttggcaatgaaagtcaacaaagtatggggaactccttttagaaatggagttggtgtagcgaataacaagacattcatggtagaaatgacggtagttccgccagagcaaatcgatgaatcggttcatctctatgatggtgacatcttgatggaacaaggcaaagtggaacctcttgaagaaagcaagttcaaaggctttttaaacgagatttatttctctccagaccgttctacagataaggttagctacacacgtaccatggagctactggctggtgctatcaacttggatggtatcccagaaaaacttgcataaagttgtttacttatcacaaggacgtgatactatagacttacacaaaccaatgaggaaattgatatgaaacatgtattccgctttaacggtattgaatggtctgctgatgttaaagacgcagagaagtttaacgaagaagtgcttatcatgcttgaagggtttaacgaaggtactccaacagttcttatccaagacatcttccgtaagccaacagagccatcgtttgtagaagccgttcttaatggaaaggcagaaggtatcattcctgttaaagtagtttggaccacaaacgaaatgaaacttcttcgcactgagccagggtttattggctgcattgcataaaacaaaggggccatttggcccctaaattattctacttgtcgtagtagtgatattagaaattccaccaccagccccgcctaaacgagacaatcttgaagcagacgcactcaagccctgatttggattaatcgtctcaattttctgaatagccttatcttccaaccaatccatagcggcttgttttccaaccgaacctgtttgcatgctacggtaagcaaacgtgacatcaaacactgctatcgtgttttctccatcatatgtaaattcgggagctccacacgctacaggcatagcccctgagaacaagcatacagtatgtggtaatccatttctagcatgaaggttaacttggatatcacattctacgtcttgtggcaatcctcgcagaccagtcaccgggtcttcaactgcatttacccaatcttgcattgcccggtagttgcttgcttctgggtccatcctaaatgaaagaaccagcggttccatatctcttcctgtgatttttatattaggagcgttatggaacttatccatttcatatgataatctattctctggtattttagcagaataaaccatcaatcctgctgttggaaatgccatattaaagaaatcgagcagataagtacctaccgtaaattctcctaataatgactgcaccacacgttgagtcattgcgccaatcataaatgtattcacacctgatttacgaacaacttgccgagttccttgtgtcactatagttgttataccctgattgaattcacctggtgtcaatccaagccaatttccatctaaacccatattattatacagctctccaccaaagtcgtttagaagagcctgggttttactagagggtacagtagcgaatacaacagagaacatgttagttctctggaaatcgatatcagcagcttgactcttaaattcttcgagagtaaacattattcaatacctccgatataaacgtttcctctattaagagtaagtatttcacgcatagtaatttcaagcgtaaatgtgcttggaaggttaggagcaattgctaaaccattgaaatgtccgttcggcgttttatcaaaacggatactctgaatttggcatggaccaaatatatcctctctaccatccattgatgtagaatatccaaaattgcgaacagtccaaatagttgggttagaaactacaataacattacttaaaaacgatgttatttgctcaaacactgtgttttctactttagccccatctggagctgcggatttaagagttcctttataccattcatcaatagcagctttaacttcttttgcgtatgatgaatttccagtcacaccgtaagaatagtagttaaaaatttcatagatgcgaataatttgtataaggtcatctgcagacctaggagttaaatcccaagtaaacactttcgttctattatcaggcccggcatacatactacgggcagtgttataaatttgctcaccattatcggccattaatccctgtgttaaagattctatcgacccaaacaccgcagtagaagccacgttgcttaatacaccggtagcagtaccgccgccacgcgtaacaagagaatccccaacatcattaaatttatggctaactgaatcaacgtctgacttagaccgcggtaatagaatattagctactggtgcagtactagtggtagagcttgatgaattagccaatgctgacattggtgaatcgaatacagacgataacattacatctcgtctaaatgaacgcaaatcaggagtagttcttcctttaaaatcatatgctgtgaataataacccattgcgatataagtcatgtactctcatatcttgggcggaatcattcccagctgagcgttcagctgggaactgcgccaccttagtggttggcgcattcgtcagtttagatttaccttgggaaattcgagttcctgattttttgatgttttcaaggccatcggccagttcttcaaaaatcattgtttttccttaagaggttttcatagcgccttgcattccaggagcagctgttgaagtctgtggaggcgttctataaacgtatgtgctattcttatttacagcagtattaacctggataggttgtgactgtgtattagattcacgtgtacgagcagcttcacgactatccgcggcggctttaatagaagcagactgtttaacctcaggttgttctgctgcaggtatagcttcggcagttggagcaggttctgatattttagaatcaagaagcttttgcaattggtctaattcaacctttaaatcttttgcaacctctggggataacttctctagttctttatatctagtggttgtgctttgtactgcatccttagcagagtctaatcgagtggaatcagatgcgtcagttttttcaacatatgcttttgtacgcttgagttctgcctcagcattattacgagctgtgatgattttgaggcgttcatcttctggcaagtctgcatacgctgactgctttttctctccgctcagcagtttgttatattcatcgtcatcaatctgaccggtgaatttttggaacttagcagaaagctttcttttccattcaggttgttcgtcatattctctttcttgacggtcaacatattttgctctcattttagcatcttcttcatcgagttctgctccagtaacagtttgaaatctgtctaaagcagcgccttcaatgttatcggccgaatcattgaatcctaatgcgcgtaacattccagcaagaagcttactcattccgagcataatggtttctccgagcttatcaattacatcaaccaaacccgagccaatggcttttgctaatccaccccaatctcctttgacgaacgattttactatttcattcgacatctcgcttattgcagttaatagcggaccccattctttggcttgcttgttaaattcaacaaagttcttttcgaacagtttagtccaataattaaaatgaactttaattaaatctataagcattatcacacccaaaaccatggcggcagttttcgccatttgggccaaagcgctaacagtataactaaacagcatactgctaattttatctgttaatgaaatagtttttccaaaaccagatttaacgattttaattaattctccaaattttaggtcaagaaactttttattcttatcttcagtttcctttttaggctcagctttttcctcttgctcttctgtgctaggaaagaaatctgcatcaggtcttctgtcatcctgaggaggaataagtctttcaagtaattcctccaatggctgctgagtaggagcatccgggacttgttctgttatcgtttctaatgatgttccagtaccagttttttggacatcttgttgaacatcatgctttttagataataagtcagcaagcttcgtgagcttatcattaatcaatgatgcagtatcattaagttttgatactgcatcagttgtgcgctctgaagcttcagcagttaattcaacaccagctgaaacatcttctactgatttgataatttcgtttgatttagtttctattacatccgaaatcaaatcagtagacgcttgttggtcgtctaagcgacgaccaatatcttctagcgtattaatctgagcatcagcttgagactcagcctttttctgtggagccgagtcagcaataactcttctacgcattgaattcatttctgatttcttagtcattcaaatatttccattacgttaagcatgcctttgattggtccttcaggtccatcaatggctatagtgtttactaagtcatcagcccactttgtcacaaaagctggaagcttcataaagtttatatccattggttttccatctactgattcaagaaattcgctcaaaattgaatctactgaacctagtttggaataacgaggaggagctctgaatttgaattctttaccatctaaccgctgagttaatcgttggcaaatgtaaactttattcaaatcgtaggtaaaatcatctttaacaacggtttcttttattcggttgttaaatgctaataaatgtagtacaacgatatcggattcggctgctgttaatcctggacaaattgaatccaaaagaagattcatgttttcatctggacccttaacatctttcatcagattatggtgctttaatccaagttttggaattgatatcgtcttttcgtttattactattttcttaataggaagaatcacgtttaagttcatttttcaccttaatcaaatctacaggttcaagggcagagccatttgtgaacatatataagttagttatagatgtgttatttgatatttcatggataacttcatctatataaaagtcagttctgaactggtcctttaaatcaacaaagttgattttcataccaggagttagttcaaaattaccgtaacatttagtttgagcatacccgtcatattgagccatcgtagaaatgcgtaaggcttcttcatagccattcctaaaaatcatgtcagaatatccgcctgatctattaatgaatacgctgttttggccttctccattaataattcgggtaacatctttgtcaacaaatgagtgtgcataaaacgttgcgtttttcatgggatttctattatatctatttgatttaacaagccattcaaaatcccatgctaacggatattttaatcctgcagcaaactgacctattgtttgaggagccccgaacatgaatacatttggatcctgggatatcattgattcataatccatcatgttaattccggtgatatcttcccacgcaaaaataaattggtcgttgtctgtagaaatgcctacgtttctaacatatcgtaagtaatctttgagagtactagtccatggaactcgcgggacgtaagcgttaattccgttgataggaggagcaatcaatggttggtcaacatacatcgcgcctatcatttcctttatagtttcatacgcagaactaaaaaacgctctactgaacttaagattcattatgtcatgcagcgttccaagctgaagggtgataatgctatcacctttatcatcaacaccaaccgtaaagtgtttaatcccataaattcgggtttgtgttctcgatgtgttactgtttgcaacagatatttgaactagttcatcgccattcatacgcgtgtgcatatttttcgagtcataaaactgaagcagaccctcattagtcccgcgtaatgaatctctcattgttaatgtaataaatgtagctgctaattcaacgaatctattagctagccacgcatcatatccagaatataattttatgcttatattaggatatcctaatctttgtgttgtcatgatttaaggtccttttcaataagcgataaggttatgccacgctcaataggcagcatcttcattatagaattcaagtcatatttaccttgagaaaccaatctatggttaatttggtaaaatgtgaaaatctcgtcaggatgtagcaatagcttaaagatatcaacaatgttatcatattttaatactgtcgtggtatcacagcatgacgtctttagctcaaagttaaacggcttcatctgcgataaaatcttttccaaggtttcaacatctatagcatcgataactgtcaatttattactatcgcttaattcattccactggtattccccagatgaatccttcacagatataatgttgtctaaaatcattttacctgtatcatcaattatttctataggttttttgaacttaagcgttaatcctgaaacctctactttcggatttgtcaacggaggctgattaagattaaaaagatactgcttgtattttccgcattttgggcacttcattctgactggtattttagttttaccaatacttgacaaaaatactttaagaaatatataaggacgatactcgacaggatggtcatgaaaataatcatccattaattctgctataagctgtttttggtcttcttcagacttggtgttcatgtcgtttctaaccaataaaaggtctctataatcttctacggtaaatggcttaaaacgttggacaccatctggtaattcgcatctaactatgttggccataaggtaatcctctttatactatttataaataattgaataagaggagtggatatgaacatcacatataaatttgaaacaagaataaatggcaagaatatccagtgccgagcttttacactagaagaatacgctaatttaattgcagcgaagaaaaacggtacaatcgatgaatgcgttaaagcattgctcagagaatgcaccaatgctactgggttaaacaaacaagaatcggaattacttatagttatactttgggctcacagtataggcgaggttaatcatgaggtgacctggaattgcacctgtgggcgtaaaattcctgtgccgttaaattatacacatgcgcaaatcgatcctccagaagacctctggtatgacttaaagggattcaagataaagtttaagtatcctaatctttttgacgattccgacattccaatgatgatatcaaaatgcatagattatatcgtggttggaaatgagcagatttactttaatgatttaaacgatgcagaaatagatgatttatattctgctattacaaccgaagatgtagttaacatcaaaaatatgctattgaagccacaggttcaattggcagttcccattacttgtgaatgcggaatttctcacattcatgtaattaaggggcttaaagaattctttaagattatgtcatgagcaatatcgataaactatattctgaccttgacccagagatgcgacttgcttgggatactgatgtgtcaaaaacagtaggagctcgatcagttaaaaatagccttcttggaataataaccacaagaaaggggtctcggccatttgacccagagtttggttgtgatatcacaaacgaattatttgaaaacatgactccgttaactggtgatacgataaagcgtaatatagtctctgccgtgcgtaattatgagcctaggattaatcgtctatcagttgatgtgcttccgttatatgacgataacgctataattgtcaccgtgcagttttctatagta

SEQ ID NO: 3 - DNA, 175688 bp, unidentified
  source 1..175688: mol_type = genomic DNA
atattcaataggtggagtagggaaacttactccatcttttaataattattataattaatattaaattagatcttgaatttataaatgatttatgataaaatttattaattataattattatagatcaaataatttttgaaatcaagtaaaaataaatttgattttataaattatatcatgtaaaattattcttttaataatatattatattatattagatcaaataaaatttgactacaaattaatatagtatattatagatcaactgggtaaattggtgagtatgttatgagtttgaaattagaagatctgcaaaatgaacttgagaaggatatgctgatagatcccctcaagttgcaatcagaatcagcggatatcccgaagatttgggctaaatggcttcgataccattcaaacgctaagaaaaaattgatccaacttcatgcgaaaaaagaagctgatgtgaaggatcgtatgttgtactacaccggaaggcatgacaaagaaatgtgcgaagtggtgtatactgggactactgaaatcaaaatcgcgatcgctggggatccgaagattgtagaaaccaacaaactgatccagtattatgacatggtggtagatttcaccagtaaagcactggatatcgtcaaaaacaaaggatactctatcaaaaacatgttggagatccgtaaattagaaagtggtgcataatgtctactgaaaatgaaaaatgtgtagtgtgcaagtgtccggttccttctactggttatgtgactgaatccgggcgcgtgtgtagcactatctgtgctgactacatcgcagaaaaaacaaaaagcggcgagatcaacgaatccgatgatctgaatgaagttcaaatgttgctgtaggagaatcttatgattggatacggtgaaggaattacagatcgtgatgaacgtccagatctcttagaatctgacgaacaccctgatttttagtgcataaatactagcgtacccgaaaggggcttgataaaagaatgctggatgataggcgtactcttttgcgccgtccgatggagtttaccttcggcggggtgattgataatataccttcgatcaagggcatgtgaatagaatagccagaatagtacagcactggcgttaagcaaatgtacaaaagccccttcctttcggttggggcttctttttagaacttttcttcttctccgctttcgagttcggcctttaattcttcggctcgacctttcagcgcatcgcgcatagaaatatcgtctgacggcgcaacatcaacttcttttacacgatttttgtaatatttttcaagctctttaaggccgtccatagtacggcaagaggcgaccttgctcatgaaatcatcaatagccgcctcataaagtcgaaaatcgttgaaactcttcattttgacctctaaatttcgatttgtttgatcacgtagtcaaacttttcttcattgtaaatgcgtactcgttcgattgcgtgtttcataccatagtttttgtatgaatatttatttttagcatttttggactttgccagcgttgctaagttatcaaccaaatcccaaacagtagcaagagatttagaatcatgtttacgcagtacgcgcccaattgactgtttgactataacagcagatttgcaaggatgtccgaagatgatgtgatgcaggttcttgacagaaatacctgtactcagtacaccaatagaaccgattacgatcagccccttcgttgattccgcgatccgtttcatttcgtttcgctcatcaatccccgtttccccagaaatgtatacaacgttgtcatatacctttttgagttgctcatacagccatttaccatgtttgatctgattgaacatcacaaacacgttttcatctttttcccttgccagtttcaacgccagcttacagatccatgcgttacgcctggtatgcgatgttatatacttgatttcgctttggtaatcagcccccttcattttcttaatctcatcctctttatatctcatgaagatggtattaattcgaaggttggtaacttgaccttcctgcatcaaccgatttgtatcaactggcttgaagatttgaccaaaagcgccaatgtattgcatcatgtttgctttgccttctttcagagaaccagaaaggccaaacttgaaaatacactgatccattgtattgatgatcttctgtatgctttgtcctgttgatttgtggcattcgtccaccatcaaacacatgaactgttgaaaccactcaggaggcattttaacagccgattgccacgtagacacgtagatcaatgcattactgtttttagcagttcctgaacgtattccaagcattgcctcgcgaggtaaaaggcgatagttgacaatatcaccgatcatctgatcaacaagggcggttgttgggacaatgattagtactttgcctgtgtaattttccagacaccaacgagatatcaacccctgaataagagatttacccgctgacgttgggaggttaagcacagcacggcggtttttaatcgcatggaacaccgattgtttttgataccaatacggatcaatctgtttgtttccgtcgtatactgggtgttcttctaaccacttgtcaaaatctggctgggtaatttcttctgtttcgtggatcttaggatccatccagatagaatacccgcgagactccgcgaattttgttacaagataggctaaaccgtagggcagtttcccgttatagtccatcaagtatatgtagccgttccatccaccatatttgtattttgcctggtactgataacctggcggctggaagctgaaatagtcgcgcaattcatagactatgttagcctctgcctgaatctgcacatgactagtgttaaggaatttgacttcgatatccactatgtgtatcctatatacggtttatatgaatatttataggctaaataatgataaacattggagaaatacaatgagtattgattacgaaaaggttgaaggtttcaaagccttagaacaaaaagaagccaaattacagcttgctacctacgcgcaagaaacgtttgatgtcaaacttaaccgtcagaaatcattcgaaaatatgcttgctgatctggaagctgccgtaccagcagaaaagccggaactgttgatcgactcccccgatccggaaattgttacatacgaaggtgaaccatccgttcctgatgtttctccggaaacttctgaccagattgaaattgttcccgacgctctacaagctcctgtaagcgattctgagacgttttctgatgaactggcatggatggaagggtttaccccgtctatcatcatgatgggccgctctgtttcgaatactggcttttatacgtgtccgtattggatctatgattggatgaaacaaaatccggattggtacaaacaccctgacagttgtcctcattattcagcgcgtcaaaccctcaagtcactggcatggtacatgcatcgtgatgggatggttactgtaagggaaacccgaaacagccagttctacacgttcaaaaaataattttaaaaagtagttgaccttgccctgctattcgagtatatttgtattcgaaggcgggggaatggctctcgcagtgaagaaggaaatacaaaatgaacatgatgaaaaatgcttactacccagttctgtttgtttggactaatggtgaagttaagaaaatcgtcaattctaaagctccttattacactgttggtgaagcacttcgccacgctgcggaagcgaattatcctgttcatgccgaaccaggttatgctcgttggaacggttctaaatgggttgctgatacctgggacaactacgaagaagaaagaatggagtgtgatcctgattacgtatctcgtcaaatggaagctcatatgattgcagatcgtagactggataatgaagctcgcggattctattgattaacaaggggctacggccccttttcttttaggtgaaatatgaacttaaatcacgaatgtttaaaagatttgagcgacggtaacgagattggtaacgttatttttcttgatatcgatggcgttctaaataatatgcggtgcatgaaatttggtgaacatatggacatcgaatgcgcacgacacttacgccggatagtgaatcacgctaattgtgatatcgtcatttcctctacgtggagaatcggcaacagtacccataatctacgtgaaatattttatccgtggggattgtatcggatcattggtaaaacttgcactaactttcctcatagcactggaatgcgtggtgatgaaatcaaggcatggatcgatactttcggatgtaaaaactatctcattcttgatgatgataccgatatgctttcttcacaaaaagatcattttattaaaactgatgggttcgttgggttgaccgaggaacaatccacctatgcgatccgtaacattttcggggttactactccgttttgtcctgaatgtaatgggtatggacgtgttaacagctacgacaaatgcggaacgtgtaacggtaaaatactccggctataaataccaataaacataagaggttaaatttatggcaattccttctgtaacaattagcgccaacaaaaacgaacttttgattggcgaaactttgaccttagaggttgaaaatactgaactagatccgggtgatgtgtttctggcctaccgttggcaaaaagatggtgtagatattccgggcgcaaccgccgatacttacacaactacggttgacggtacaactgctggcgattataccctgatcttaaaacacggtgctgatgaagaatcagcaacagaaaccacgtctgatacaatcaccgtgaccacttatccggtaatcgcatttggtactgatttacctgcaacaaaatctgttgttactggtaaagaacttaccctgactgttgcggtaactggcggtaaaaccccgtatacctatgtatggaaacgtggttctactgttgttagtggtgattctgcaaccttaacaattagcgcggctgcaagtggtgatgctggttcatatacggtagaagtgacggattcactgggtaacagaaaaacttctagtgcttgtgttgttagcgtcacacctgctctttcatttgataaaaatctaagcccgacctcttccgtaacacatggttcagcattgatccttagtgtaactgtattgggtggttctgctccttattcttatgcatggactaaagatgattctccggttggtgaagattccgacaccctgaatattgcaagtgcggatcttgatgatgctggttcatataaagttgtagtcacagatgcgaattcagacaccatcacatcaactgtatgtgtagtaactgttaatcagaattctgatgatctcgtttctaaatggacggttcatccgattccgtggcgtgataccagctttaccccgatcggttattgggtacttgatgaaattctgtatcagaaagcacagggtaaagattggaaaactgattatgctgattacaagtatagtgaggaagtacaaacgatcctgaaagcgttcatggaaaatggtgaatgtgagatccaggattcacgaaacggctatattcataaaatgagtgaaatctaagaggctttaaatggcaactgaaaaatggactacggttcatcctattccgtggcgtaataccagttttacatatcttccatactggctatacgatattatcgttgatgcttttgagaaaggcgacgactggcgcgattatgcggaagaaaaatataaattagagtttgatactctgaaagaggcgtttgaagattatggtgatattcatgtaatcgaatctcgtaatggtaaactggttagtctgttgtcattgactcctgctcctgaaccagaacctgaccaataaaataaggcaaacaatgaatacacttctttttgatttcgacgacactttagcagaattttctcaggctttttatgataagtttggtgtacgtccggaaggaacgccaaaagaacgatatgacgaaatggcggcttctttggtgcgtactgatttttataaaaaccttccccgtattcaggctgggatcgacctccttcaatggagtttccaacgccgaatcggtgatcctgctactttgctgcttcgcgcggaagcggtcagccctctttgggttatgaaagaaaaactgaactatacagataagatttgcgctgaactggggatccctcgtctcgattttagtcgcattgactatccggaacagttcgcagaacatgcctatcgtggtgttctgatttcccgcaaccagaaacatcttgaaatctggaacaattctcatctagctaataaagttcctggtattttccttgcggaaaccctggaagaaaatattcagctagtcacggaagcgcttgcaaaggctaatcaataacaaaaaagggaaccgcaatggttccctttcttttacaatctttttaattcatcaagcgctgttttcttatcaccaacaaagaggattgctttacctcctgcttttctgaaaggcaacaccgcttttgcccgatcgtcaaacagaattcctttaccagcgaatgctgctttttcatggctacttttaacgtagtggaattctggaacgtaacccaatactttttgtaatgctttacgtttttgttcggcaacaccgtcagaattgaatttaccgacactggttagtattgctacatcaccaagtgttcttaaatgatggaataattcaaatccttctttgattggttccagattttcgtagaaatcagttttggcaatttttgctttgcactttttcaactcatcttctgtcatcatagagggttcgccatacattggcacaaatgaaccttcccagtcgaacaatacaccatccatatcaaagaaaaacttattcatatcaattcctcagtttgtgtatgcatactataatgtttaatcattaatgtcaaccccaagtgtcagttttcggtgcgtatgctgcaactttagccacaatttccttatccagttcagctacagatttctgaggcttaccacgggctttaactttgatgtagtttgacttaacaacaaacatccctttgttacttgatttcttgatctcgctgtcaacaccaactttgttaaaactgatccaaatgtctccgtccatatactgtttaagagaatcacccatgttcaggatcttcgccatagtaagggccgcgccttcgtgggtatccatgagaatttctttaggaactacacgatcgcgtttctggttctgctgcatagcaatatgaacatcgttcataacccatacgatatgtacgttttctttcttgtatcccagcttttcgacatcacgcgcgatgcttgccagcttgctcatgccttttaacgttacgtcaaagatgaggttaggtttacgatcttctggtgctgccataataccggaataaacacggttttggtttttgttggaaatgttgaaaacgtcggcgatcacatgatggagggtagatacgttttctgggtttttgaggttcattgttttgacatcatggcccgtttgtttcttgatctctgctgcgagtttatcgctacccattacaagttttttcagggcgtcaacgtccagggtaataccttcgatgcctagcagtttttccagtgtgaaccctttaccggaaccagcaccgccagccagaataacaacctgaccgaacttaggataagcacggcccccgaaggtgatcagcgcttcggttaaggtgctttctgtgaattgtttaaatgacttcatgtaaaattctccagtttattttctattatttattgacatgctttctgacagtggtgtatggttactgtgttcgacggataggccggaagaactttaaaccataaggtatacgatatgaaaatcaatttacatcgcttcattgcagacttttcccgcgaccgcgacatggattctttcaactattactcccgtgagattgaagatcgttttgcggctcatgttggattccgtcgccaccatacccctaaaatgcgtcctgaccacgacccgaagtatagccctattatgtggcaagcccctatcgatggttacgttgaagggatccggatcatgacgtttaacgcgatgtatggaaacgctttgatccatatcgcacgtgagaaaaaggcggaatttcctaacggctggcgtattgatgaagtgattcaaaatcttatgcagttacgacgtgaatacaaagcgggtatgtgtctgcgtaatgaacagtatccgatgtataaaacatatgcctatatctctaagcatctaattaattccatgttttacatcgttggtaatcatggttccgctatagatataggttcttatgaaatcgtggcttatgctcgcgaacaaggaaaggccgctgcactgaaaatcatcgaatctggtgctatcattcttaaccatcgcattgatactattgcttactatggtgatcaggttgaggttgaaggcgtacaccatgaaagattcaacaaagctgtatttactaaaaatggctatgcgtatggtaatgaaattataacttctgctgttcctctcgttcgcctaactgttgaagggtttggagaaaggatgtcttataaaccgtcagaagctcaaatgtgcgcggctgctgaaagaatcgccaaaaagcggaaaatgtataccgatgaatacctggcgtatgtcaacaagacaaaagaagatgtagatcgagaaatttcttgcatggatttataactttgatataatctaagcatctttttaagggaggatacatgaaaacgatacattgcagaaatgaaaacgttgtttactatcacggttcgtgtactgctgctggtattgaaagcatgttattgcctccctgtgattctgatactctgtctgaaaaaggcaggaagaaaaatttagaccgtgttttctttaccgctgatatcgggttagctcgtatatacgctggaagggccgcgcgttctataggtggggatcctgttttgtacagggttgtgtgtccggttgatgttgtatgcatgaatgaagataaaggcgcgagcgtttaccatgcagcatgggcgttttgtgaggaattatgaatgataaagtgttggcgtatctcgttttcttgctgggatatcgcttagaagtgatgggcgcgtattcatcaatgtatggtgatttaacggctatctggatggtcgggttaggggttgcttttacattcctttcctttgcaattgttaatgaatcggaaaaggatattgtatgaaactatatcatgtgatctactctggtgttttaggcattgacaaacaaacgttagttgatgtaatgtgtaaaaaactcgatgaacgaattggaacccgatacaaaaatcatgtatcggaaagtattttcatcaacgttgaccatccaaatgacatggaagaaatggttaatactcttgatgatcagcagatcccgtttgttgacaatttcaacatgagcgctggagtgtatacggtagtaacttttgttctaaaaaatgttgacatccgaaacgatagcgtgttgaatgtagttgcaaaaatcgattctaccaaaggaaaataatatgaaaattgtacaccgtagcatttccgaactgtctcaagccgaaaaagtgcaaattcatttcaaattcaatgatttgcgtaaaggttatgccgaaattgcccgtgaacatgggttagataacggcgatatttaccaggtagtacaggaaattgaacgtatccgcgcgttccgttctgcaaatctccctgttaaaaatgcaatgcgccgcgaagcgatcgaaatccatcgtaagcgtgtgtacaatttagaacgtgctaaacgtccgatgaagaaagaaaagaaacctcgcccgtttaaacgtgaacatcttaacacctctatggcgctggcgtttcaagatgcggggattatctaatgcgtaaatctgcgatggatcgttgggctagtattgctacttcaaacgtaaaaccaaatcaagccgcacctgatgtagaagcggttcgtaaagcgaaagaacctgagatcgtggcccttagccccgaacttatcgaacatcgccgccgtgcgtctgctattgaactggatctgcgtattgcgcgttcatataatctcaagcacgaacacgccgcgaagaacaaccattcttttgaccttactctggaagattggaaagtgttgatgacaactgaacgttgtcagtattccggcaagatgtttagcaataaaccaggtagcccatatgcccgtacaatggaacgtattaatccacgtctgggatatacacaagaaaatacaatagcggttatcaacgccgctaatgccgaaaaatcacagcttgatgcattcgttaagggtgatgtcattctggatgaagtaaaagtgaagttgctgcgtaaagcactttatcaagtcgaaaaacgtgtgaaaatgaaaggttaaattatgtttaagaaatattcttctctgactaaccattatgaaggtaagttcatcaatggtgtaattatgaacgggcttactggcggtgtgtgggttgcacgtgaaaagatccacggtgctaactttagttttatcaccgatgacggtattaccgttacccccgcaaagcgtactgatgttgttaagccagccgaagatttttatggctgttcagcagtagttgcaaagtattccccagggatccgtaagatgtgggaaaccctcaaaaagaccggaacttatgatgatttggttattcaagtctacggtgaatttgcggggcgtggtgtacagaaagatgttgattacggcgaaaaagatttctacgtattcgatatccgcgtaaatggtgaattccttccggataacctgtgctcgctgatctctcgatctcatggcctgaaaatggccccgctgttgggatacggtacttttgaagagatcaaagaactgccgatcacgtttgaatctgttgtgaataaagcaaatagcggcattggtagcgataatacagtatatggtgaattcgtatatcctatcatggacgttgaagagggcaacattgcagaaggttttgtaatgaaacctgtttcacctgcttttatgccaaacggtgaacgcgttgcaatcaaatgcaaaacaaccaaattcactgagaagaaagcgaagaaagcaacccgctttaatgctccggtttcattgtcagaaaaagacaaaaaccaactcgatgagtttgtttgttaccttacagagaaccgtgtgaaaaacgttctttcgaaactggatctggcttcgatcactgcgaaagatttcggtcgcattatgggcttaacggttcaggatgctatcgaagaaatcagccgtaatcatgggcctttcctcgaacagttcgaagatccggcaatggctaaaaagctgtttgtaaccgaagcccaaaacatgattcgccctgtatggggcaaaatcctgaaccatgaattttaatcagattctggttgatgcaaaagcggctaccctgatcggtagccgtaaacctcctgaacgtatcgcaaacattgctgttaaaatcggacgtgctttgaacgaacgcgggattcgggcttattctggcggcgctcctggtatggatagtcactttctgtttgactatagtccggataacaggtgtataatccttcctgagaatggttttaacggacttttctcaaacggaaaggatatcatcgactttcgagatttaaacacgcagaaagccgctgacgaagccagaaaggtagcaggtaacttcgatacacagaatgaatacgttcaaagaaggtatgcgcgaaacacgattcaggttcttcgtgaaaatcttgacaacccaaccgattttgttttattttgggcggaagaacgtgaaggatgtgttaaaggtggaacagcgatcgctgtaagattggctagattgtacagggttccatgtttcaatctcttcaaagaaagtgtattgaacgatgtgtgtgatacgttagggatcaatatcaaacccccaacgttggattttttatggtaattgaacatgcgcccttacttcgtgaaacatacgaaagatgggctgttaataacgcaataggtgaaaatatgattcatgtacgtagtatcggtactgacggtgaaactccagtagaaggccgatcaccaactctcgcagaacgagcaagagaaattatcaacgatcagaatgctaagatgatcgaacatgcgcgggatacaatcacaaaaggtgttctgaaacacgcgacacaacaaagccttatctatgatatgaagcacgatatcggctcttgtctgggtattgaatgtactcgctatgcgttccaacgggtttctgaatggttggaagaagaagggctaacattcgataccgaagaaaaacgcaacgccgcgaagatcacaaattctctggctagtaagtacaatcaaacgtaccgaaatcaggaagaacgtgaagtgttcggtttcaaaattcctgaaaggaaaacagatcgccgtgtaagtgaattcactttttacattagttggtaaaaaggtgttgacgggggttggttatagtagtattctaactcccgtagacaagacactaactcagaaggataaacatcatggaaatcgtaatgaaagcaacttatgctggatattgcctggaagcaaaaggtgttgctaacaatggcaaaggcttacgggccaatgttgaagcaatgctggatgaattacatacaatgtacgaatatgacaacgtagcgggtagcgttcttatccaggcgttggaagttgatggtgttgattgtgctggttggtgggatgcttacattgactacaatgataaccgggtttacctgttgagcaacaaagattatttctaaggaaccactatgagcgatgaagctgaggctttagaagattgggctgattttgatgacgaagaagacggggaatatttctgcgttaacagtggtgcttacaaagaccgtttagaacttcgtgaacttttatccggttcctctcaaatatcaggatccaaacgaaaaagtagtaaacaaaaagttcaatatagtgatggttctgtacgtgatgaaactgttgttgctgaatttcgtggtcgggttatcacaaaagaacgacaaattgatgtaaagaacttgtatgaagtggctaaggctgctaaaataggttatgtgattgtttgccctgtgtgcaaagaaaaacacacaaagacaacgtatcacaaagttttctgttcgaatggcagaaaaaccagtaaggattgtaagtctaaatatcacaatacaatccatcccgaacgactggatcgggtattttaaaataaacttaaaacgtggagtacgtttatgaacaacaaaactttcgaagaactgaacagcattatcacttccgtagattcctataaggtttctcactggtcgcaatatccaactggctccgaagaggcgctgttttatattgaatctcgtggtggtaaatttgatcaagtagttacggctggctgtaaccgccttgcgcaaatcctatcacgtccggtgactatggaaaacgtagattttgctaatcggttgtacaaaatgcactttgggcgcgaaatcttcaactacaaaggttggaaagaaattgcagaactgggttacatccctcttgaattcagagcgattccggaaggaaccccagtagcggttaaaaatccggttgcaactttccatgctgggaaaaatgcgctgtggttagcaggacacgtagaaaccctggcgatcaggggagtatggttcccttcaaccgtagcaactctatcccgcgaatgtaaaaaagtgttgaagaaatatctcaagaaaacctccgatctcgaaggtgaagcatttgatatggtattacgtacccgtttgcatgacttcggcgcacgtggaacctcttctgctgaatctgctggtattggtggccttgctcatctgtataacttcctcggtactgataccgtagaagcgctgattatggctatctctctgtttgaagattgtcagaaagcgtttgatgatggtgaaatggcggctggtatttcaattcctgctcgcgaacattccactaccgtttcttacggcaaagaaaacgaagaccttgcatacaaaaacagtattgagatcttcggtgaagggatgtatgcatgtgtgtatgattcctgggattttaaagcggcggttcgccgtatcgcagaatataaagattctattctttctaagggcggtactctggtagttcgtccggattctggcgatatggtagacaatatcatgtacgctcttgaagaactgggccgtatctttggctatacagtgaactcaaaagggtataaagtactacacccagcagtaaggatcattcaaggcgatgaaattcatggccctgaaacaatcaatcgggtgttgaactggatggagtctaaccgttgggcgtctgaaaacatcgcgtttggtatgggcggcggattgcttcaagaagttacccgcgacactcaaaaatatgcgatgaaaatgtgcgcaatcaaaattaacggtgtgtggactggtgtgtataaatgtccaaaaggcgctgaatggaaaaagagtaaaaaagggttgttaatgactatcactgatggtgttaactttaaaaccattgatactctggaacagaaagtgccggaaggctggaaagatgctatgatcacatactatgtcaacggaaagattactgcccgtgacactttagaggaaattaggaaccgtgccgggatttagtatccgcaaaaacgacaaaggaaccgtgattttctatgacaacatgccccttgtagctcgcaaggggctttttgctaaaatcgctgggtattcctttaaactggaagaagtcaacgacgaaacactaaaagagatcgtaagaattgccttacagttaagaggtaagaaagacgaacaaaaagctattgacatgatcaataaattgggtgaaactcaatgcttcatagtgaatcgtggttacaagtacgataccattgcaaaatttgaaaaagggctttgtgaattatgagttattatggtgtgatcccatacacaggaaacaagcaatcgctattacctgaactattcaagctgttccccgaaagaagttcatacatgcgtttcattgattgtttttgcggtggccttagtgtgtcgctaaacgtccctaaacccgttctaagcaacgattatgataagacgctgattgatatgtatgagcgtcttaaaacgcttcctgacctgtctccggtgcgagaattgattgcatcgaaggggctggggaaagacaataaagaagagtatctgaaattccgtgatgaatacaaccagaacaaagatcctttatggctctatgtcctgatcctgcattcattcagcaacgttaaccggacaaacgacaaaggcgattttaacgctgctgtaggaaaacgaaccctcaactttatgacagaaaaacgtttcgaacatttcaaaaagaatgtgacaggaattgaatttcgttctggttcatactctgatattgaaatcaacgataacgattttgtttattgcgatcctccgtatctgatcactgatgcggtgtataacaaattctggaacgcagatcacgaacgcgagttatatgctttccttgactccctgcatgagcggggtatcaagtttggtttatcaaacgtgacacatcatgcaggaaagcaaaatgatatcctgatcgagtggatgcaaaaatacaatgtgcataacctcgataaaaagtatctgttaggccagcatactgattcttacgaacaaaataaaacgcaagaagtctacgtgtgcaactaccagaaacgcgacgtaaatacataccctgaaacactggatgacttaatgtaaggtaacatatgtttaagatttttggttatatcccttctgtttataattgcgctccatgcctgaattctaaacgtctcctggacgcaaaacgaaaagaatatgagtttgtttctgtagccgatgaaaaagacgcagacggcaaaccgatcctgaatgaaacggtcatttctgaactcgaaagcctgttaggtactcgtagactgaccatgcctcaaattttccacgatggtaagcacatcggcggctttgaccaactgcgtgagtacgttcgcacgttgggataaatattaacacctttatttgattggtgttattatgctcactaaacgtattactaagaaagattacccaacaatcaagcaagctctctttgagaaacaagggggctgttgtgctctgtgcaagcgtcctttagagggcgacattgaaaaacatcacctcgaccatgaccatgctttagacggcgaaaacgccggacgtgtgcgcggcctactgtgtaacctatgtaacggtacagaaggtattgtaaagcacaaattcaaccgatccggtctggtgtcccgtgatgttgactacatcgcctggttagagaatctgcttgcatatctcaagcaagactactccgaaaaccgtattcatgacaaattcataccagataaggtaaaatggttttcaagacttaccaaacctgatatgattgccgaaatggtttctatgggctttgagtacgccgaaaaagacgaacgcaaagccttaaccgcaaaatatagaaagcaattaatgaaggcaacgaaatgaaatatctaaacgctcgattatcaacacaacagaaaaaaaagctgatgatgttgatatcctccactgacaaaaagatcatatctctgcatgattggatacttggaaggggtgactctgatttgtgttatgtcaaaccgaaagaccgaacgatgtttgatgatcgcggtcgcacattgactaatttttctcctatcaccgttattgatatgtgggaactccttgagattgtaggacgggatatacctgttgacggggttgaactgatcaaatatcttaacgagattggacacaatttagatattatccataaggcaacgaaatgaaagtagaaaaacgcgacgggaaaaccgttgattttgatgaagaaaaaattcgcaacgctgtgtataaagctggtgggactatgacggatgctgatgccgcaatcatgctggttcagtacaatcagatccgcgatggtagcgcaatgaagatcgcccgtatccaggaactcgttgaagaatccctgatgaaaacgaacccagcggtcgcccgtgcatacatcgaatatcgccacgatcgcgatattgcccgtgagcagaaaagtaaactgttcaaagatatctccggcatggtgaatctgtccaacaaagagatcaccaacgaaaacgcgaacaaagacgcaagggtattcccgacacagcgcgatttgctggcgggtattgtggcgaagcatttcgcccgtaatcatatccttccgaaacacatcgtagaagcgcatgattccggtgacatccattatcacgatctggattacagcccgttcaccccttacactaactgctgtctggttgacctgaaaggtatgcttgagaatggtttcaaaatgggtaacgcggatattgaaccgcctaaatcgatcggtgttgctaccgctctcatggcgcagatcaccgcacagattgcctctcaccagtacggcgggacaacatttgcgaacgtggataaagtgctggctccatacgctcgtatgacgtatgaaaaacatgaaaaggatgcacggaaatacggtatttctggcgatcgtacatacgcgatggaaaagactgaaaaagacgtgtatgacgcgttccagtcttatgaatacgaagttaacaccctgcatactgccaacggacaaaccccgtttgttaccatcactttcggtactggtacgggtatgtttgaacgtatgatccagaaagcgattctgaaaaaccgtattcgcggcctgggtaaagagggtatcactccagtattccctaaactggttatgttcatggaaaaaggaatcaaccttgatccagaggatcgcaactatgacatcaaacaacttgccctggaatgttcttcaaagcgtatgtatccggatattattagcgcggctaataaccgtcgtattactggctctagcattcctgtatctcctatgggttgtcgtagtttccttagcgtgtggaatgatgagcacggtaatgaaattcttgatggacgtaataacctgggcgttgtgacaatcaaccttcctcgtattgcgattgaagccgaagcacaggaagatgaagacgcgcatgatgcattttggcgtatccttgatgaacgtctggaactgtgctttgaagccctgatgactcgtatcgatagcctacgcggtgttaaagccagtgtagccccgatcctttatacagaaggtgcgtttggtgtaaggttgaaacccgatgatgaaattctggaactgttcaaaaatgggcgtagctctatcagtctgggctatatcgggctgcatgaaacgctgatgcttttcggatctggacaacacccattcgaccggatcggttctcagaacatgggtagactgattctggaatatctacgcgctgcgaccgaagcatggaaaaagaaaaccggatttgggtttagtctgtactcaacccctgctgaatctctatgtcatcgtttctgcaaactggactatgagaaattcggaagtatcaaagggatcacagataaaggctggtacactaacagttttcatctggacgttgaccgcaaggtaacaccgttcgagaaaatcgactatgaagccgattatcattacattgcaactgctggacatatcagctatgtagaattccctgatatgaaaaacaacctggaagcccttgaaaaagtctgggattatgcaatggataaactggactacttcggaactaaccttccggtcgataaatgctttgaatgtggctctgatgatgaatttaagccaacagaagacggttttcattgtacccattgtgggaatcaggatccggaaaaaatgagcgtcacgcgccgtacatgcggctatttgggtgctcctgctgtccgtgggttcaacgaaggtaagaacaaagaaatgatgcatcgcattaagcatcaaaattaatcaaaaagcccttgacttcggttgagggcttttgttatattgggcctatcgaaaaaggagacatattatgaaactgactaagaaaatgaccgatgtagtggcatgtgcgtttgcattaggctacaaagttgaaaatcatccaactcgcgttgaagtcatcaaccctatcaagggccgtcctggtttggttctgtgtgaagacggtacagcatatcgtaatgatgtctctttagaactggcaactactatccgcaccgcaaaacaaatgaaagatgttctcattagcggcgcaaaattgagggctttatgatgtattggacaaaagataaatttgtttttcgtgatgatacgtgctttgggactgcataccgaaacttagctattcgtggtggttcgttttcggctaatgatttgtctaaggtagtattccctattaaagttactgagtatgacgtattcggtgttaaagggtttactgattactttgatacaaagtttgaatcagaatcttacatttttactaatagcgatcgtgaattattcaaaaaacacgttgttgttaaagagaaaccattattaccaaaagaagacgaagcaaaggaaatctatgatctcctgaacatgcttgataatctcggtacttgtcatctgttcggtaaacgcgcccgtaaagcgaaagatgttctcaatctgttacgctctcgccggaattacctgatccgggaagcagaacgtaatctgaaaaattcagaaaaacaggtcgatgttcataaatccactcttgcgaaattaaaggctttgtgatgtttccgttatacgctaaagtgcgtcgaaatgtcggtgattcgtatcaggaatggagtgaatggctacgcgaaacaaagtcattctacatttcaaaagcaactgatatgaaaggccgtaacattcgctatcgtaaacccagtggtaagcgagtgaatgggatagattacattgttcttgattcgattcgggatgatataaaatgattagcaagatccttgataagttatttccttcccgtattgttgaacgcgagaagagacaaaatcgttttcagaacgctattgactatctcgaagaaattcgatttcagaaattcctcgaagataaaaagatgcgtgaagatgagaagcacccaaattctaaaatggctgacggtgtaacaaaatgtgctgttggtcggacgtggaaacgaaaagactacaaggatcttgtttctgctataccacgcggaagcctggaagattactcaaaagcaactggccgatcttatatcggatgtcttaacagactctgtatgattggtgttgtcaagagaatgactcctacgtataatcatgtttatatggctatcgtaaagaaaagaaggttgcaattctatgcagcatctggggaatctatcaatctaattgatgatttaattgaagttgggtatgtagacgacgggaaaattttaaaagctcctgattatctacgtggtaaactattgaaataggtataaattatgattttcaacaaaacaaattcatgtaatttgaactatctacgctgtgaactggaagctaacgaaattgaactgtttttctgtggggctacagatccggaacataaattgcattgggtatcaggtgagattgtaagcctaaccgatcagattgtcgaagaggctacccgccgcaatgcaatcgttaaaattggtgctattgatgtgaactacgaaggacatccttcatttttcattcaatattatccataaaagtattgacctgtatatatgaatgtagtaacatccttcttgtcaactaaggaggatgttatgaaaatcaaaaacactgctactgaaactctttgcaacgaaattgcagaaatgtactggagtaaaggtcacttagaggctatgaaagagtttcaaaagtggtgtgatacccaaaagttagctaaatgggaatacatcgttattgttgaacggatcaaagaactgatcctcgtgaagaaaggtaacatgaaatgattcaactgaaattagacacaaatgcggtgttaagcctgtttccggaaggttcaaccgctcgcgtagatctccaatctgctatcatcaaaaacgtggtgaatagcgtagttggtaagcgtgttagcgaagaaatcaacaaacggatccaggaacagttagctgttctaatgccgaactcatccgaaattacacagatcatcaaatctgaattctcggattacgtcgaaaaacgttatgggtattccaatgtttttgatgtcaactatggcaatgttcgcgaactgtctggtaaaatcaaagaatcggtaaaacagcaatgccaaaccattcttaaagatatcgagaaagaggcgattgctcatgcaacagaaaacattattgcagacgaagccgcgtttatcgctcgcgtctcgaataacctggaagttactgtacgcaaagcagtaatgcaacgggttaacactcagttcccagacattattgacgaagcgatcagagaacgtctgtttggtgaaaaagcatgaattacgaccgcatctataatatggatgtggtcaacggaaaagggatccgtgttgttttgtttgtgactggatgcaatcataaatgcgaaggttgttataacaaatcgacgtggaatccttgcaacggaacaccgtacacggaagagacagaaaaccatctgatttctctgttgagtaatccgcatgttgatggacttacattaactggcggcgatccgctttaccgcgacaactatcctactatcctaaaactgcttgagcgcgtttctaaggaacttccaaagaaaaacgtatggttatggacaggatataccctggaggctttacaggccgacccagaacgttctaagctacttccttacattgatgttctgattgatggtaagtatgaaaaagatttgccaacgaaaaagccgtttcgcggttcagataatcaacgtatgatcgaattcgctaaaaattcgatagaaattaaaaatattgcttgacctaatgtgtaactatggtaatcttaccacatcgtaaatgacgattaactttaattgagagataatatcatgatcctgaatttcaaaacccgtaaagaagcgcgtaactactgctggaagtggaacattcccctgaaaaccatccgtaatacagggcgcggttcttgcccgtggacagttcaagcaaatgaactgaaaacgttcgtggttggtaaaacttacaaactggttgaccgtgaagggtttactaccaattcacacggcggatctaacaccgcaaacactatccaggcgagacagatcgaaaaattcctgaataacgaggtaaaaattatctcgaaaaccaattcagatactttcaaaattgagcatactccggaaatgacttttagctctctgcgttcgtgggaagctcgttatttcgtcgaagttggcgcggctccggttaagaaaacgaaagctaaaccgaaaaaagccaacgttacggctccggtcgcacctgttgcaccagtaacagcagatcttgatcaaatgcttgatggtggttcggcaatgtcggttgaactggatcctactaaatttgttgaaggccgttcgtatgttctggttaaaccgcagcaatttaaaaatcgttgtggtgctaaccacgggatcaaatcatataccgatgaacacagtaatggtgtatacaccgtttaccatacgacttcgctcggtcatcatcaattgagcaaaacggtagaaaccattgattcccagaccggaaaagttggttactacctgcttgattctgaacgttcgttcttccgtgaactggcgacaggaactgttgatgaacctgttagcgtttccggtaatagcgctattgctatcaatgtagacgaagcggctaagaaagaagaaatcgcaaaagcaatggcacagcttgaagaagcggttaaagcccatgatgacgcgcttcaaaatctgcgtactgcttccgacctggttcgcaaagctgctcgaaaagtagcagaagtaagcaagtaaattaaactgggtgctccggcacccttttttatgaggtgacacatggaattattagaaggtaaatcttataccctgaacattgacgctaaagaatttgcagaaaaaacctggcgaaatgctttagctgaattgatcaaaaacaacggctatatcacaatcgatcgtattgcgattggggatactgaggacattgcttatgttctgcaagatgatttcgaatatgagatccctagccatatctggaaatacttcaaaccatatgatttgccggaagaagaaccgaagatcgctactaaagaagaaatcgccgcgcctgatttaaattttgtatcttccgatcctaaaatgtggatgactgtaaaacctgttcaacaagatatcaatgatctgcgatttgattatccttttgtcaagcggatcacttcgatttctgtactaccagcgccgacggattcacaggcacttgaatttgcattacagcatgttttcggtgataataagctgtacgcgattgacaaggaagctgctattgatgaacagaaaaaggaaatcatcaaccttctttctctgcatcaacaacttgaagcggtggaattgattgagcgtatgctttctgatacaaagaaagatatcattagcaaaatcactccggcacgaaggaaagcaattgatgaaaatcgagatttacggtattcccgaatcgcttcataaatgttacggctgtattgaagctcggaaattacttgatgagcatggattagaatacgaattttattctgttctaaagccagcaaataacagtgtggggtttgattacgatcgaccccgcattgaagagttagcgaaacgtgttcgtagtcgaagcatggcatttacttaccctcggatctttgtagatggtaattttattggcggttatatgcaattgaaagagtatttgggtgaagcatgaataaagaatacattcgcaaagtagcaaacgctattcacgcaacaacgattgattttctggaagggtttgatcatattatccaccctgaaacgctggatagttgggaagccaaactgtttaaaagtatcaatgaacagtttccggaaaaggttaagcgctggtttatcagacaggaaatcgtagcaacgatccttaatgaacgtggtgttgaggcgttcggtgtaacccctctatataaacgaaaccagattacagacgaaacaatcaagaaatataaaaagatggttcggaagtaataaataatcagttaaatggccttcgggccatttttttgtatataaatattggtattgaatacaatataggaaaaaagataatggtagctaaatcattccgcgcacgaagtggccttgatgctgctggtgaaaaagttatcaacgttgggaaggctgatcgtaatacgctgagtgacggcgttaacgttgactttttcaatgaatttaacggaatccagcagtatgacccgactcgtggttattctcaagacatggcgatcatttatgcgcgtcgtatctggtacgcaaaacagaatattgcttcccctgctggggctttcgacgaatccaaatggatcgcaactcgtaatgacccgaaatgggtttatagtaacgtaaccactccagacggtagcattattgaatctggtagttacattatggctgatggacgctttactgaacttctgtacctgttgccggacaacccgacagagggcgacgtaatcacgtttaaagattgcggtggtttagtaggtgtgaacagtatccttgttaagtctaacacccgtcagatccgtttacgtactgtacaatcagcacagtatagactgactcacccgtacatgatcgcaacgtttatctataacggtaacgtatggcgtgttgctgaaactctggataaccgcgattctgagatcgtgaacgcaaccggaacaggttcattccagttacaatctggcatgacagttttccgtaacagtgctacaggtaaaatcactctccagttgccgaaatatgcaaatgatggtgatgtgatcacaacctatgacgctgataaaatgaactctatcaacgtagccgttttgcagatttatccaggtagtggacacactattactgatggtgcaagtactggtgttacttcggtaagtagccagaaatccggctttggtatgttcatctttgatgcacagaatagccaatggaaagtatatgatgctgataaccgtgttcgtctgcgtcgtatctacagtgatttaaacgcggttcctaatgattacgtttttgttactgcaaacccttctgggactataccaaacgttactgttacccttccaactgatgttgctgatggtgatcgcgtttacgtatccctttatatgatgggtaaaaaccagaactgtacaatcaaagttaaagatggtacaacggacaagatccgcaccaacaaaaatatgatgcagttcccgcagcgcaaagattatccgcctaatgattggtttagtgtaacttcattagcttttaatgctggcagtgattacctcccgtatatcgagttttcttatctgaaagctacgaaagaatgggttgttgctaattatcgtccaatcgttgaacgtgttgatgcaactaacagatcgcgtactggtgttattgctctggctgcacaggcagaagtaaacaaaaacttggaagataaccctaacgacgaaaccgctattactccgatgacgttagcaaataaaactgctactgaaacccgtcgtggtattgcgcgtttagcgacaactgctgaggttaacaaactttcaaccgatacctatctggatgatgtgattgttactcctaagaagctgaacgaaagaacagcaactgaaacccgtcgtgggctggcagaaatcgcaactcaggcagaaaccaacggaagcaccgatgatattactattgtaacccctaaaaagttgcataaccgtattgcatcgccgaccttgactggtatccttgcccttgttgctactggtggtgctcctaacaccaacacggatcgttctcaggctggtactggggtttatgaccattcagattatcagaaagcggtaacgcctaaaactcttcgtgagtataaagcgactcagttacaatctggtgttgtatggctggcttctgaaaccgaagttattaacggtactgttgcaagttcaaacgttccgaccgttgttactccggaaatgctgcacaagaaaacctctactgatggtcgtattggtttgatcgagattgcaactcagacagaaacaaacgctggtactgattacacgcgagcggtaacgcctaaaacgcttaatgatcgtgctgcaacggaaacgctgacaggtatcattgcaattgcaaccactgccgaagtatcagcaggtactgtaacgaataaagcgatcgtaccgtctaaactgaaaggttatctggacgatacaagccatattactgttgctactgctgatgggttaactcaatctggtactatctggactacggttaacatcggtattcaatcagcaactgaaactcaacgtggtactttacgcgttgctacgcagtctgagacgaacgcagggacattagatacagtatttgtcacccctaagaagttacacgctaagaaagcgactgagagcgcagaaggtatcattcaggtggctacggctgctgaaactaccgctggcaccgttgcaaacaaggctgtttctcctaagaacttgaaaaatacaattcaggttgatacttcatggcaagctaccgatctggtacgtggtactgtgaagctgtctaaggggcttggtacttggtcgggtaatgatgtggctggttctactcttcctgatgatggttacgcctctgtaggtgttgctgtttctccttatgaattgaacctgacgctgaaacattatctgccgatcggtgctaaagcggttgatgctgataaactggataacctggattcttcccagttcattcgtcgtgatgttaatcagacggttaacggggcattgactctaacgaaagcaaccactgtacaggctgacattaactcaacagccgacgcaagtttccgggtaatgaatgttagtggagatctgaacgttggtgatggttcatcgatgggtaaacttcgtttgaatggtggttcatctaacgactggtcaattcaagcaagttcagcctctgggcgtattgcaatgatctcaacgggtaatactggcacagttcatctttctgtgtataatgatactcgcggcgttgtagctaacgttaaattccaggctcctgaaattcaggcgattagcaaagtgactctgggtaatgatacagtgatcactgctgctggttctgttctctctatgggtactaaaaataagacaactaagatcctgacttctgatgctggcaacatcgtagcggaagaatctgcgaactcttataaagtctttactgagaagaacgcgcaaaccttgctgaatcctacgtatgtacgtaaagcaggtgatacgatgtctgggcgcttgacggtaagcaacagttcaattatcattgcaggtcaagcggcttggtcaacgctggatgcagtaacagaagcatccaggggcaactggacggctgagatcacagcatcggcacaatacaacttgcttcctggttatgcggttccggttcttgaaccagatccgattaatccagaaatcatgattgtgacccgttatacctatgttaaagcaccgggtactttaacgcagtttggtaacggaactgcattcacttatcagatttgggcacctcgtccgacctctggtactggtgttaatgcgctggcgcaatccttctggatccgtcaaatgaacccgatcacgggtaaatttgatgagtggggccgcatgtataccagcaacaacccgcctactgctggtgagattggtgcaacgtctgctgttggtactacggttaaaaacatgactgttaccgattggatcaaagttggtaatgttaagatttacccagatccggttactcagacagttaaatttgagtgggtggcataatgtcaaacttaatggcggggttcggccccgattttgtagaaacgcaaattctatcggaaacaaacagcgtaacttacagaataaccgcaaaggcaacacatcccaatgcggttcctaatcagtatgagtttacactaaatcaaaaggcggtagggacaccgcctagtgttgggatcaacgtatggagaattaacaatgctgtagttgatccaattaaaaccttcacattatcgaatgataattcagcaactgcaaacaaagcgtttgttgaatatatggatgctcaaccttctgggctgtatttgataatgactaacggtgaatacaaaacaagccaaatcgttgatgattggtttgctaaaaacagatccgttatgtggcaaggcgctgatttcgctcagagattcccaaattctgcatatgttgcattgtatggggcttcaaaatctcgtatactgattgaatcgttttacgcgaacgatggagttttaaaagaagattcacgcgcatcaatcgatcttgtctatgataacgttggtgatgttgggcgaactggtgtacctttccgatctgttgaagatacggaagaatacaattcaaccaatggatctgaatataaagtatatcctgttgcaaacccagtgatctctaaactggctgattatggtatggctcctggattagctatgatgattgctggtgatttttacgccagcaaagcattattggatgctggatcaacaacaagggttactgttcgatggtttacgggtactgctcaaacttcatcatcggtgattgaagttcctgcaaataaacctgatgagtggttacgatttgaacaattctatacgatccctagtggttgtgatggatttaacgttgctgtatctcgttatcctaaacccgctacggatagtttatctgcgatccgtaactttgtgatggttcaggtatctgctgccgaagctgatcaaaactttgctgcacagtttggggttaacggtatcagaatgaacaacatgatcgatggtggaacaccgtatatatttgaattgcctaatactaaggtttatccaggtggtgattattctgcttccgaattccgtgaagttgatgcataaacaaaggcccagaacatcgggccttataaatatgtaaaaaggggttattatggcagatttaaaagctggttctacagtcgggggtttacctatttggcactccggcacatttccgctggttccggttggtaatactctaacctatcgcggatataaggtttatactgaaaacgataaaccacaagcatcaaataacgacttcgtttctaaagcaagcggcggtcaatatttgggtgtagttgcctttaaacaggggctacaaattaacgctactttcacaggcggaagtgaccagaacggtttatattctggtgatggtgatggtgcgacattatcaaaagccaacatagatcttgtatcatggtatggtattggtattcgttcatcttccggtactaatggtcgcgtattagtcatcaacgctcgaaatggtgatttaaacactcagggtaatatcacggttgaaaaacaaatcagtattacaacctctaaccctactgacgcaagtcatgcaacacgaaaaagttatgttgatggtcagataaatactgtcacaacaaatgctaatagcagggtattacgcgctggcgatactatgacagggctattaactgccccgcaattcgcgagcacaggcgcggcttcccgtcccgaacacgtaccacggctcgaccaggtaattactaaagggactatcatagattttggatcttattaaggtgaaacatggctgatttagcaaaaattcaattcctacgtagcacagttgcggggaaaacacctactacaagtcagcttgcagatggtgaactggcgatcaatatggctgattatgccatttacacgaaaaatggttcttcgatcgttcagttagcgggtaaaggtatcccagaaacaaataccaaaaaattaacagtaaatgggcctagtgctcttaatgataccgttaccgtagcggaaggtaaaactattactttcaccaacgcggatttgagcgggggtatggttcgtcatatcactggtaaaaacgcgcttaatgatggttggtacatcggttctggtggtgagagcaataaagggtttttagaaatcggtacaattgatgacggtgatgaagagatccgtttcgtttcccgtggttctggtgatactgttcgtcgtactctgaaacttattgattccggtggtaacactcgcgtaccaggtaacatctatattgatgaagctatgggcggtggtggttctgcttttatttcaaaaaacaaagcatatttcggtgctggcggtgctgatatctatatgcgtaacactgctggcggtgcaacaaatcagttaacgatcactgatggcggtgaattgctgtttcaagcaaaacctgtatactgggacggtcgtaaaccgactttaaccgaattggggatcggtcgggttgaaaacgcgcgtcaacttgagcaagataatttccctgtaactacaggcaacgaaactcgttggattaaagttgctctgttaaaagatcctggcttaggtcagagtcgcttgcaactgatggtgactaacggtggtaactatggcagtacgcgcagttctattgactttatcgattgtagcgctcgaagcattccatcgacattaacaagcggtaacgttcgttcttacctgcaagttcgacgtttaggagatactgcaattgattatactaaccagatgcgttatagcctggttcgtacctcagaagggttagaactgtggtttactcaacgcgcattcattggtggtgttaaagttgctctgctgtctatcgctggcggtgctgctactaaatattatctgcctactggttacacaatctcttcaactgctccggaagggttagttgagagtgtggttattcgtatctatgacgaaatgaacaagcctaaccttgacgatggtactgatggtattctgtctgttgctaaaggtggtacaggcgcaagtacagcctctgctgctcgcacaaacttaggtttgggtacggctgcaacccgtgatgttggcgaaggcgatggtaatgttctcgaaagaggtgcatttggtcttggtggtacggtaggcgctggaaatattgcaaagggttctttagcagagaccgttaagtatcttaatacatacggaacatgcttcttcagggtagaagataacattgctacaataccacagtattctcctagcatttatgttaaaaccggaagcaaccagttaattctttcagctaaccacagaaacggtgttattagtgtcatcactacggataaagttgatggtactaatttaacagtatctcaagtatatactacgttgaataagccatcaccggctgatgttaatgctgttgctcgtactggtgatacaatgtctggtgatttgcttatcagtaaagagtcacctgggttatttttgaatgccactaatgataccggaaactctgtaatttggtttagaaacaaaggagttgagacaggtgctgtatgggcaatacctaacaccgagtcttcgggtgaggttcgaattcgtgctagaacgactgctggggtcacaggcggcgagttcaaatttaaatctgacggtacatttacatcacctggtaatatcaatattactagcggcgctttcaacggtaaaagtgtcaatactcagtatgcgaactttaataacacaagttcaaccacaaccgaacaaaccgtttctattagtggttcgcagcacactccgctgttactgaatagaccgactaactcgaacttgtctatcgggttcaaactttccggaatgaacatgaaacgtttgggtattgatgtaaacggtgatattcgttacggtgaagcagaaaaccagacacaaaacgcatggctgttgtcttcggatacgataaacagatggactgttaacttcggtcgtgatattaacgttgctggtgtggttaattcaactggtggatttactggccctgttactgcatatgatttgactggggtaactcaggatcttgacgctttaacgttgaattataccgaaccaggtcatgttaaagtttattcgtgccgtagcatgggtggcggtgataacatcaccaataaaccttctggcgtcggtggtaactttattgttatcgttgaatgtctccgtaaagtgagcggtactgattacactaaccgtcaagtattacgcgcatcggacaatagccgcagttgggaacgttggttaactgttagcggtactactaaagcatggacaccgtggagaatgaacgttgttagcggaaacgatgatgatgtatcatttaaatctgttaccacgactacaggaaacctgaacagcggaaatgatctgattgttgctaacaacgctcgcgtaggtggtaacttagggttaggtggtgcttcttccacgaaatacgctgataaaggtgttgtgattggcaaaggtagtgctctgttagaaactactgatggtcgtgtgattattggtagttctggtggtggtaatgctgttgaattgcgtcctggtggcccaactcaaaccaacaacaggatcaaagtaactgctacctctggaagtggtggtgatactgcgatcgagtatgaacaaggggcgaaaattcgttctaataacggcggcgcgttgattatttctgctaaagcaggtcaatcaatctatctacgaccgcaaggtgatgcatccagcacaaacgaaacccgtattgatgcaaacggtagtatcacgattaacggcaatattaacgccaacggtacattaacttgtactggtggtgctgttaacggagacttgactgtatcaggaaaagtagatatcactggaaaccagttaaaaactacatcgctttgggctactggagatgctgctgttaatggcgctttaactgttggtggtaatgttgttagtaataccggtattggtagctttgttggtgctgtcgatgttaaggcccctgccgcagataatggtacaacgcacctttggttccgtcattccaacggcggtgagcgcggtgtgatttatatgccgcgtgacaataataccatgatgggattaagagctggcggtagtgagtggcaattggatggtccgacaggtcaaatgctaggaccaggagcacggtggagaattcattctgatggtaacctacagggtgatgtttacggtggttatatcactaactatatcaacgataggtttaaccaatgtgctcaatgggttcgtactggtgctcaacaagactttggtccaattggtcgtccagcacctggtaaaactgttcctggtggttgggtgcttgttggtcttaacggtaacagcaacgaagctaaccagaacatgcaacttatcggcggacggttacaagtatggaaaccgggcgttcaatgggttgattctgctacttgataataaggggcttcggcccctttaaacttaaaggtaaaataatgattgttaaacaaatgaaaggtattaaatggcatcacaattttgaaggtggtgcttactatcgagattgtaatgataagtgttggtattcttttagaaactctcttgataaaaattcccatattattatcgttgatgctaaaacaaataagataattaattactacaacggtgaagatcctactatgataggtttgtttgctgataaagaaatgattttagatgtatatcagatcgacgattttcctgttgattcgtgggatgaattctcaaaaaggaagttcgaatttatcgatggcaagaccataatgactaaagatgttgaagttgaaaaagaaagaaccaaagaagacatactggcggatctaatcaagctacaaaaagaattagaatctatgtaattttaaaggctaccatacaggtagccttttttgttgtatcctaaatatacgtatagtaacctaagaagagtcttataaaatggctgagagaaatcccgtagataaactagccttatttgatcgggtaatctcgtttgtgatgggtgtgaaaacatggaaacaattgctgataaaaataattctaataatggttatgtttcttatggtagtaacttggtacaaatggactgatatattcccgatgataaaaggtgcccttgtagtcgatacaagggctatcgaaatggaaagaacagaaaagtttaatcaatccgcgttggaacagttgagcatagttcatcttacttccaacgcggatttttcggcggtactggcattcagaccaaagaatataaactattttgttgacattgtagaatatcagggaaaattaccatcccagatcgatcctaaaaacctcggtggttatccgatcgataaaacatccgaagaatacacgaatcatataaatggcttgtattattcatccactaaagcaagttcctacctaccgacacgtgattttgtgccagtagcttatacttttagttgcccttattttaatcttgataactactattctggatcggttttgatggaatggtacgcaaagcggcctgatataccagatatgaagctaaacatcatatgtggtcaggccgcgcgtattttaggtcgagcgaggtgattaacgtaatgctggtgttaaattgtgtgatcttccaatagcccgtttgattgctttaaagaagttcatcaccgggctatttttctcgtaaatatcccaaactttcaatttgtcccacggatccggaacataatcttcattccttgccgaaacccccaacgtaacccgcctgtatccagcgctgtcgtgataatacacgaagaatggcctacctattggcgcaaccttacaacctctcttagcggctctcatcgcctcatcgaacgtcattgatacccccaaaaatttctatgcatgaatggtcgaattccgatagtttcactcaaaatgaatatcggatgatctagctcatcgtggttttcttcgtcaatgacgatatcccaatcagtagccttttgttcttctaccgtggcaatgaacacctggtttacttcacacttgcggtgtgtacgtctgatgattgtatccccttcacgaaacacaatcatatcagggttggtagtgcggtacgcggttttacccgcgcacacttcattaagcatatcttcgtatgtcattataaaacctttacacgttgaacgatggtttgtttaacgtctttgtattctccgtgctctttaacggttgctttgaaagtgatttcatcaccttcgtttgcaatgttattaccgaagtaaacaacaacattaccatcaacattaattttggtcatgaatctttctacagaagtgtagtaagaaacttgagtatatcccagtgaaatcactttctcaacggttccggtcatttccagacgttgtttgatttcaccgatgtggttagctttagaaatgcgttcctggcgctcttgttcccactgttcgcggatttcttcgcgtttggcgatataatccttctccagtgcaacacccatgcagtaagcgcacacggcgtcaaatacaggactgtttttgttgtcttctttagactggtcagcccaccaaagaacagtaaacattggcatttctgcaattacttcgcctttacgcttgccaatcggcatgatccctttttccagcagttccagtttttcagtatcgaacactgacagtttaccgcgacgttcgaacagatcgaaatctgcaaagccctggaataccattttgaaagtatcagtttcagttaaacgggctgaaacacggtcgaaatactcacgcgctttcgcttccgctttctccggatcggtagataagttgcagatatagttatcagaagtataaccgccacctctacgctcaacacgcaaggtatacattgcatttttacgaccagaagaaatgaagtaagtggtagtaactacggttgcgttagtcatggtatttctccttaaagggtatctcgtttcgatatggctaatatagcaaaagcccctgaccgaagtcaagggctttttaatcattcattcgaatctttcattgttttatgaagatgaatatcaaaaattttccagtacgcctttccgcgaggataaatttttgctttgtcaatatcgttgttgcttccccatgtgttgtttgggccacgacatcgattttttatataatctgtatgccagaataagcgctgaaccgatgattccgtacctaatggatcttctttactgaacagaatttgtatactcataagaagaacccagtgcgaacaatcagatcgattttcttttctggttcaaacggtgatttgctatcgatgttacactgatagaacataccaacatacttttcaggaatgttggattcacgcgcccatttcaggttgtcatcggtattcggccccagcatgaggttaacaacatcaacagcataatcctgttctttggtgttgccggaaccgtttacataatgcccgtgggcggttttgaggatctcaattacttcgctatcgtcggtttcgactttgtaaagcgttgtattttcaggaatttcttcaagaatgatcaaagcggttttcatcacacttacctttgtgtttctgtttacgttttgcttctttaaatgctcgcttgcgatcgcggtgagtagaagcgcggttgaaatcatgtttcgctaccaaattattcatataagccccttaaagaaaaatatttaggggctttcgcccctgtattaatccagcaatttgcggatcttgtctgcgatacgtccggcgcgggttgcacttgcagtatgatcgctttcttttgaagccagttccgccagcttacgctgatgttcttcttcttctgcttgacgatctgctgcaacctgtgcaacctgctcattatcgtgagcaatacgcgcttccagttcagacagggttttgtcgaaagttgctacgatttcatctacagaacgaattttattaaacagtttcataatttatctcaattggttagttttaatcagtatacatcaatatggttgaaattcaaaatcataaatgtcattcagtgcgcggttccactcggtgtagttttcaccagcaccataacgcatttgaatagcactttcgaacgttgatccgttgaggttcgggaaaccgaacaggtttttgattttgtcatgtgctacatagtacaaagaagcactttccagcatcgcaaccatcgcagacggttcgtgttcgcggcgcttgatacgtaacagagtacgactagcaccagttttacggcgttgatttggtgctacgtagaaacggaatactacgcgccctgttttatcatcaactaccaggtaaaacccgttttctttcagatccacgccttcgaatttcttgaaggttccgcgtttcatgtcaccaattttaattgcatatttgtgaatgtcaagtcttgtcagaattcttttcatattttttagataccagtttgcctaattttgtaatttcgcctgtttttacgttaacaaacaaggcgatgctcagaaatgggatgctaatcactacgctgatcaatgtaaacagaaaacgtatcacaaaaagaacagcacgttcaagatatcgttgcatccacgcgattcctaaacaactataccctactataaaggtggttgcaacataaaatgcaccaaatcctttacgaaatacgtaacctttcccggattctatccggtcgtcggcccacatttcacgggcggttttgagaatagattcaccactagcgcgggtttcgttagccgaaggcatgtttttaaatttcatgatagtctcctatgcgcccagaactctccgggcgcggttgtttagttagtaatggctaaaaccatatgtaacatcaatcatgactttataacggcatacacgcatttttgcgttattgtaatccactgggatcgctaccacgtcagcaggatccacctttacctgaatgactctaccaacaccgcccccgtagtgtggaaggtatgatttagccgcaacgtgtaggccagtagaacaggtgcgcgttttatcttcgtctaccatgtttcgaggcatggagacagtcacaccaggactattatcaaatttgccagtagcgagatctttatagttatcgcgtacacgtttccaggcaagaaaacaaccatcatcggtcagttcaatgtcattatgtacaaggaacccgtaaagctggtataccgcatcgcgtgaagggtttcgcatcaaccgttcaaagaagtttaccaggtgttcatacggacgatcgttatacatttcgcgaatgattcgttgagtgatatcagaatcaaacactacatctttatatagaagctgatgaccaatgattttaatgttacctttgctataggttcggatcgcttcctgggtatccaaacaagttacagcacctttgacatcaccagctttcagcatttcatgcgctttcttaaagttcggatgtgtttcacccgccatgaaaacgcgtccttcgtatacaaccgtaatgaacgattcagatccgatcatacgcggtacagtgtctgatactttaggcttttgttttacatcccttttcttagggaattccgctaacttgcggttgataacgcgcccaatggttcgggcgcttacgttgaactgttgggccagtgctgttttacttgcccccgtcaaccatccattatagatagctttctgttgtacttcgtcgagaattttgaccattatttccaccgtattaatttcttaaactcactgagattcttttcgttgttgtaaatcggacgaattgaataagaatcgctatgttcaacaagtgaagccagtaacgggtttagtgatttaaagatttcccatgcctgatcaacacgttttttcatattgctgcgtttaacgcgcattgatgctacggattcacgcagaatcggacaacgcaccctggaaagatttttaccatctttctcatacccttccagacacactatacgttcgagggtatcaacaaccttatacagtttttcattgtatcggtttttcacaatccgatcaagagatacaccgaaacggctatgcaatgcgtctgtttctgttgagtgatccttcccaatccatccaggcaagcagttatctttcaatgccttttcggatttaacatactgcttgcacagcatatcatcaaagcataccagatttgaatccgggatccacttccagaggctgttacggatagcaaacacaacagggatcccagtatggcgcatgatacgcgataaagtagattctttcattgctgaatccatagacaacctggaattttcaccatctaagcggctatattcatcaataccatacaaccgaacacctggggctttatccagtgataaaaactctgattttgtcataaacagagaagtttttgccagattgccgttactatccaactcataacgatatacggtcggggtttttgggcgcggttctgaatttttcggtgcatatagcgcttttgatttttcgcgatctgcatcatagatctctttttcttttgtcatttcactggtacggagatacacaatttccgattcatcaaaatgacctttccgaacgatatcattaacaatctcacgctttgaatcactatcgtaatatgcaacaaagctaacacggcttaggttatgcattttagcatacccgacgatatacggtttaaccgtgttggtatccacttttaacagaatgagtttcttctgtttccacggataataaatgcgtgtgatgtcctggcgtttggttgtttctggcttatacttgctccagcggcctccgctacccgttacctgataccatgcatctttaccgtcgtattcgttcgcccaatacccagcaatataatcatcattatatttgttgggtttgactagttcgctatggatccagccaatagaatcaccgttgatgcgaaaattagcatctttaccaacaaagttttgtaccattgaaggcagagaatggaaccacgtcagtttatcacgaacggtttgtaacttatcgaattctgatttaactcgattgaaatacacccggctgatttgtttcagacgttctttaataatccctactgtcattttatccatactcaactcttcgcgagaaggcatgaaatcaagttcaccgatcgggaagtcaataatatacgtatactggctttctgtatagcaatagaacatcgaggtatcatacaaatctttatccagaggataaatgatgttacccatgcgagcatatacaccgctagtgtatgctgatttatgacggatcaccccgctatcgttggttgcttctttcggctgatagttgattttgagaatagaagcaccaacaaagttaggacgaatatcagtaaatgattcgtatacccttgctgcttcgttttcccattctttgatatcttcaactttaaccggaacagtgatagtaaccccgttaggttcatcactttcaatctcatacagaggatcgcagaacggttccccatcatccatatagattgtgtaaccgcatttgataccgtcttttacagattcaactgtgaacgcatcggcatagcaaagcggagatttgcaacccagacccatagaaccgatcaggtcgtttgaatcatttttagttgattcgaagtaaacggtaaacgcatcactaacgaaatccggagacataccgatcccgtagtcacgaataacaaaacgaggatcaacagcagttggcaactggacatcaaacgggttctgatttcccgcttctttgtgtccatcgatcgcattacaagacagttcgcgaatgattgcacggatcttgtatttgtatacggttgaagaaaggatcttatacgctttcttgtttgcgcgtagagatagtttgtttcgtcccttgctggtatctgtaccaactcggtagattgtttgcggtgtatcttcgcgtaatttcattgtttatttctcacttaacattaaaaataacttggtcacaagagtacttcgttggttttttgttcaggccatattctactacttcgcaataagtgtcaaggaattttaccaatttttcttcctcgacctgctgtttcttcatatcaaggataccccacacgatagccccgataatgatagaaaagaacgcacaaaatccgaatatggtcagatattttcccaatctaggcgcattataacgtgtcataccttacccctctttgcgaatgtatgcaagttcttcatgggttactggacggatatacagacggccttttgtatatgccttgcgcccactgatccaaatgtttttcatatccttaacaccgttcatcacatcgttgtaaaacttcttatcagctttagcctgatagacttcacggccttgataatctttcatgaacaaacaataaaggatctcattcttatcaactagattagcatcctttgtagttgttttacttggtgaaggtttagcacccaggcgcaaggccatagcttgccacactttaccatgttcataaccgcgcccgacaagagcatgagcgatttcgtgtaaaagagtgtctaaaatatcctcgtagatatcttccgcaacatgacgaccagatagttcgatcagttttttggtataactgcaacggcccagagtttttgtaatgcgtccattgatccggaatgtccaaccattactgatcaaaccgtgtttttccatcatggtacgcgcccagtgggttacttccattgcactacgagttttcaacattttagaatctcctttgcttggtacaaaaccaatatagcaaaaagccccctgcattgcaagaggctttgtaattatttcaacttcttagaaagttcttttaaatcattgagatactcaattttaggggttgtttcttcccagtatttcaactgtttacgcaattcttcggcttcgtcttccagctttttgctttcgtccgtggttagatggtagatgttcatagccactaacatttcggcatgattctcgcaacctatccacgtagacacaaatttaaccgcttcgctgcgactaaggccacgcagagaatcaggagattctaccatttgagcaataaacgcaacctttgccagtgctttatctaacgcttccttagtttcctggatacgcttattgatacgctgttgatatacattcatacgaatatcaacgaaatcctttagaagcgtttcagggcgttcatatgagtataatttaccctcaaagataacgttaatgtttgggtttgagttttcaatcaacccgaaatctttcaggatcttttcgcgggttaacccgttggcatactctcgcttgagcgttacttcataacgaaaatcttctttcgatagatccttgtagctaacgataacgcctttttcttccagcttgtcaaggattgcaatgtatttcacacggtcatatttcactgggatctcggtgatcaccaatttggttttaccttgcaattcatacgtgccgtaaattgtaccgtctgtgatttcacctttaaagtaagggtatttcagatccagtgtgaaatctttatcattcagatatgcaatgcacccgttaacaaccgatttaggatcatgaggcggaatgtttgttgcatatgcttttgcaatcccgctaaacccgttaaccagtaccatcggaatgatcgggagatagtaagctggcggcacatgttccggatcttcatgaactggcgttaaatcaccatccatataaattgctttgaatattggcgatagtttgcacttgatgtaacgaggtgcgccaggtttcttaaccaaacgggaaccaaagaacccatcacggtcgaataacggaatgttattgcaccagtgcgccgccataagggataacgcttcttctacagaggtttccccgtggtgatacccatacatagcaacaccgccagcgatagaagctactttctgaaatcccgttccgccctgcatagcagagtgaataaagaaacggtgaacgggtttaaacccgtctaccaggtgcgggatcgcacgtgaataaatcgtgtaaagggcaaacgttagtccttccacctgtacaacatctttaatacttctttccattagtcaaccttagaaaatttgtgttttccattaacccaatctttacgcggatcagattcgtcgccgaagcatagttctaacacttctttgtattcgtcgtcaagtacaatgacatcatacttcaactgatcacccagaacacggtcgtaatcttctttgcgtaaagaacccagccccttgatatatcgtacatcttttgctttatcgcggaacggtgcaaactcatcaagagaatagaaccatttttcctcgcgcccaactttagcgataacgatcggggttcgaatatatcggatccgtttctcagtgaacaaagaaggccaacggctaaagaatgcaagcaacagagttaaaatgtcaccaccgtcaacgtcagcatcgaccatgatgccgatattatcataagtcattccggaagtatcaccaggatgaatattgaggatagccattagctcaaacagttctttgtttttgataatgtctgtaaaactcataccccatgtattcagaggcttaccacgtagcgggaaagcgccttgtgtttcttcattacggcattcgatgaactgaccaacagcggaatcgccttctgtcagaaacaatgttgtttctaccccaggggtatcaataccggaagccggaacgtgtttagcaatttttgcctttttcgctttctttttcgctttggtgatcgcggcggcttctgctgcttgtttacgaatcaatgcggattcaatgatcggagtaatgatttctggggtatccataatcatttttgcgatctttttgtagttcaaattcgcatgattgttaaactcacctgctgtatttgctaatcgctcttttgtttggctatcgaatgcaggtgcattaaagttatgcaggaataccacaagagttaagcattcttttacacgtgctttcgggatctcgatactatgctttttcttgatcatcggttcaagttcagaatagataccatcaatcatacactcaacatgaacaccgccgtttttcgtatccagaccgttaacaaaggatttctgtttaaacccgtcctcagtgctcgccagaatgaagctgaggcgattatttgtctggacaatggttttatccccatacatggaagcgtacagcgggaagcgattagagagcgtttcgccgttatatgtgaatttcacagacgggaaagcaacagcaagggccattaagcgatccttaatcacttctttggtttcttcatcgataccagttacaccaaacatagagaagtctggagtaaacttaacagtagtaccctgttctttactggggctggttctgtaatcgatgttctgtgcgccgtccgtacagttaatggttactttgcgtttcccgtttgcagtctcgccaataaaaatcgagctataacagtttgtcaggaaagaaccaacaccattcatacccatcgttacgcggtttttatcatcgaagttagaacccgattttgccatagtccatgccgcaactggtttaggaactattttcccatctggggtttttacatcatcctggggaataccgcgcccgttatcagagattttaaccagattatgatcaatggttacatcaatcttattagcatgtttgaattcagttcggatcgcttcatcaatcgagttatcaaggatttcgttgattattttaaccaacccttccacgtactcaaccttgcgatattggcccattatgaaacgttcatgcgcttctttgttaaccgacccgacgtacatatttggacgcaaccgaatatgatcgcgatcgctcatacaaaatgattcgtcaacctttgcgccctttttggctggttgtggtttctgttctggttcatcatctgccagaagaaaatctaaactcatattcacctctttgtttaatcaccgacattatatagggttctatgaaaaagaaaacccctttcggggtttacttgttgtaagggaaaccatcccgaaccatttgcggtttgtccaccgttcgttttgcttcgcccccgcaatcacactctttcggttcgtcgcggcttgtgatgcttgccatttttggaaattctttattacacttggtgcatttataggtataggtaggcattaataaatctcttttaaacttaacatcttaactaaacgggctttgtctatgtcaaaaacacattgacgtgcgcccggatacaacttttcaacttcgtataccatgcagacgaaaccaacattgtgcatgtactcgcgttcatatgcattgaaccaacgagaaaggcgctgtattgactgaaaaccaaagtataacccagccgcttgaaagtctatgttatctttttcaaggttgcgcatcaatcgattatcgtcatccggcgctggatgtcggttatcatccatatcaatatagatatcaggattcatacagaattgatccaaccattcagcagtatccattgacacataacgattgacatatgggccgctttttgtttgccatttttctgtacaatcattccagaaagaacaagaaaattccacacgatatacgaacatgatataatcctcacaagtaaactcaaggtttacaagtacgataccacttatctaatttttctgcaagcatttcgttgataatttttgcaatttcgtaccgtccgtgagtagtacccagttccaggtaaatcacatcaagtgcgcacacaatcgcatcaatactttcttcaacgatattaccgccgcgttgaggctgaatgagacattcgctgatctcgccaacttccgctgataggtgatgaaccacatcactcttcgtgcgtttcttcactttatgagcgatttcaaaaaacttatcaagtacgatcgccgtttcttctcgcgttgcagtattctcggatgtcgtctccgtttgttgaacaacgtattttgtaaaatagttttcaaacacgttgaaagggatcacatgaggaacaccattcaaaaacaccccttctttacaaacataatggattttgcgcggaatagacaaaccgccgctgcattccaaatgtcgtttaatgcttgctacaaaatcgaaatctttcccgtatccagccaacatactgtgatacgtgagtaggccaaatgcagaaacatagagatcattttctttatacagattcatttacaatacctttatggtagccaaaaatataacaatcaattgaaggacgttcaccagggaagtgaatgcattgcatgatgcgttcagccattagatcttctcccatgtataccgaagtagtttcttcgttgtaatgggtatcatacgacgttttaagcgtcatgcccggaagccctgcaatgtgcatgaatttagaattggtgcaaggttttcctacttcaccgttaatcatcaacactgcattagttttacgtgcttttctcatttgaatttcaccccgatttgcgatacgttccattcttttacttcatcaacaatatcataatggttgatgtatggtaaagcaatttttaaattactcgcgtcttgaatgttgcgtaagaaacgagtaggagaaagaagacacaaccgctcggatccgttgtttcctttagcggcaaatgatagggtttctcccccgtcaatcttcatatcaacagaaatcgttttgaattctggtgcgtatgacgtgattttgccgttgtctctcggcgtactatagaaacatacactttgtgggacattataacgatctgtttcaatgtacatgtaatcgccgtcagtcattccccacgcggtataaagggatccggtatagtcaccaaaggaatttttaaaatcttccttcgtggtatatcccagcgagcgcaattgcataagctggttatgctgttcgattgcgtcggctttttgttgttcctgtacttgcgcatcaatcgtttcttgccaggaattatacgcatagtaacccacaacagcgattacagccataacccctacagctttccagattttagcgtcttcgtttttgttactcatgctatattccttttaagaaaaagggccgaagcccctttgttaacgaagataaaccacataaccgctttggtcaatcgcgcggtctgcgtcattgaagatattaccacgaatgccttttgctggtgctttccagcttgcaggtttcaggatattaccatcattatcgatgaaagcggcaacagaacgctgattgaacatttcaccagtttctttgttgcgagtatcctgaacaacgcgatgatatttgcggcctttctccagaaagaaaacagtttcgaaaggagaatcttggaaacgagcgttacgcgctttgtacattgcttccatgaaaggggctgctttttctgcgaggatttcgaaagtgttcatggtatatctcctaaagtgtgtttcgtttcgatgtaagtactatatcaaagatggttattctatgcaaggcttttttcgttatccatcaaatattttaagtgttcttttaatgcagggagttcgttcaaatggcgttgcttaactttctcgtactctttgcgttcccagttttcaagattgcttgccagcgcttcatcacaataagcgatcccgcgttctgcatcctgaactttctgtttccactgtgcaactgcttgttgataaagagaaccgttaaccatcataataatttcctcccttgtttcgatggggtaactataccaaagctaccccagaatgttttaacaaaaagtgctattagtaggtatccagtttatacattttgcaccagttcatgaattcttcgaaagtctgagtattaacacgtttttccttcttcactttcttagtgattacaggacggttagtaaaacgtttttgcattttcacagtgattgctactttatcgcccaagtcttctaccttttcaaccagcgcccactgagaaccaatttcagcaccgaaagttaaaccaacaatctcacctgctttaacgtgtgctgcatattttactttaaccattttcgtattcctttctctgtttcgtttcgatgaatacaagataccaaaaagcctcccgcattgcaagaggcttctttaacaaaaagtgctattttatttctttgagcaatttacggatcccgccgccctgtgtcttatcaaagattttctttgcatcaataacagaagtgattatgtggtagttgttcccttttccgtcaaactcaaactcgaccttgtagtcactacgaaatttcacaaaaacaaattcacctgcaaagtgcttacggaactgtttttcgttaatgtccaaccattcctgtgtatcatctaactgatacatgcgacaaaacaggatcgaacccattacagcaatcacgacaaggatagctaacgcgaattctgacatcatttacccctgtttactgattgacggtgcaatgatttaggcacaaccggatttcggtatggtttgactttatggatcgttggttcttccccaaccaaattaggaaattggctgttccattccatcgaaaatggatagggtgatgactttaactcttcgatcatacagtttactaaacggtcgccgattacacccaaagccgccccaataatcgctatacgcataaatcaccccttaattgtgtcaagtacagtaaaccagtcatgaagccatatcgttgttcttacagcgatatacgttaacaaactaatcaatgataccgctccgcaaatagccagcgtaatcaacacccggatttcaaatttagtaaaattcatatcaatctcctttctgagaacccaatataacaaaagccctcaaccgaagtcaagggctttgttttaaatttttactagttttggcaatcgaagaactataccaggatggatcagacgtgcatccggaatagaatcacggttgattttagcgatatcaggccaaagttcaccaacaccatacagtttctttgctatagaatataggctatcgcctggttgcacgacatagcgatcagattcaatcttaaccagatcctggttaatgatatcatcaaaggcttttgctttcgcttcgttaatcgtgttcccgtagtaatggcgatccataatagttaatgtgatcatcgtttctttcctatgctgttttcgtctgtctcttctaaggatggaggttcttccagccccagggcataacgtttagcatagattagcatcaatgcatctttagcgcaatcatgaatcgaatcatgctgaatgaatccatctaacatgcctttacgcagtggacacgtggtcactccgcgagttagtaaacggttttcaatagctgtacgcacatcacggctattccagaacacggtcggcatatcttcgaacgtgtcaagtttccctgtcatagttcgtacaacatcggttagcatagaacgatcgaattcagggccgcgcgtataatcgtatgactgccaacgactcacaccgtcagccgctaaatcagcaaagaattgtcgatgaccttcgtacaaatccatgtcgatatcggaagggaacaaaaccctttgcgcttctttagattgctgtttccaccattcgatcgttttttcatctttgatgcgttctggttgtttccggatgtcaaatttgtactttcttcctttagcaatcagttcctgaaaggtaggcggatcataaggatcatcaacaaacggaacatagctaagttcagctagttttccttttggaaacgggccaatactttcataatcaaatacgaaatctacgggtaaatgactcattcgcgaccccgcttatacgattccatgaaataggccaatgatagcgcgacttccggagtaacatcaacggattcgatcatgcctggagttactgccatcatcccgaactgacgaagcccacaacgagcaatcgatttttccagtcggatcatgttttctacagcctctgtaaaattgtccagatgttcccaatcgtggtaatcttccattgtagaacgatcacttttcaaaatcagatcggcaaccaattcagcataaaggcgcggaaggtgaatattcatttaaaatccctcaagcatgtttttgttttcacgaatgttacgacccattttcaaagtatcaatgatcactgcatactcttcaaaagtgaattcgatatcttgtgaaatgtttccccacgtgtaggtcggcccgttaggacagtataacccaacttctttgtttgcgttgacaacgcagcgcaattttgcaaacaacaaattgatatcgatagaattgaacccttcgagataatcaagcccctctctaccaatacggtcaacttctcgcaaaatcttttctacatctttgactttaacaataattttcataataacctcaaagggccgaagcccttagacataatcaacagtgaatcgtgcgcgggtagttcctacataaagcaactgcttacacaattcataatcggcgtatgcgtatgcatcgcgcgtatacatgtatgaatgatcatacgtgcttccctgacctttgtgatacgtacaaaccggaagcgccttaaccgtctggaacttgtttttgatttgccagaacgaataccagggggctttgtatccggtttcctgtttcatcttcttatactgaaacgcgacgtagttcaaataatcgcctaaacgttcctgcataaccggatccgcgataacctgaatatccgctttcgtatcctcgaacatcgattctgttttcatcaagaaataatcgatttgcaccggatcgcatcggtcagctttgatagtatcagagcgcggtatgatttcaagaattttaatttgctcgttgttgttatagataacttcaacaaacgaaaccccattcacacggccttctgtcactaacggttcttgcatcacaaccacttcaccaacaatgaacggctgatcagttttgtacaagtgtttacggatcactgcgtttaacttgtctacgtttgcgttagtgtaagcaaacatacggttattgttcaggtcatccggagtcttaacacggctaaaataacgtctcaggaagtcaccagcgttttcgtgcttcattacccctagttcaccattcatgaggggcattaacggcttaccgtcgcgtatagcgcgtgatacctggatgattgggtttccttctgcctgacgcataatcttatccatgcgaatgacatcaaaaatttcctcatcaaagaacggtgaaagctcggtgatcccttcggtattaacaggacggatctgatccttatcacccaatcccaggatcaccgcacaactcggaatagtacgcttgatgatacggaatagttctttgtcaaccatcgatacttcttcaaccacaaacacacgacattcagacagatcagcggcttttttgcctttttgctgttcaaatactcgtaactcttcgttggttacggggctgattttcagtgctgagtgaatggtcgttgcatccatacccaccgcctcagagagaacgtttttagcctggtgcgtcggtgctgtcaaccagatcccactaatacccagttttttcaatgtttcaaacacaaattttaccagagtagttttaccaacacccggcccacctgtgatagtagtatggattttgtttctgatatttttaatcactcgatcatgcgcatttttctggtcttcgctcagatcgtcaaaagttaattcgctcatactttaatcaataccccttgaatacttgcgtgttcaataaaccaacgcatatctttctttttcttttcggttacggtttcaacttcttcctttcgaaagaatcggctaagaccactttgtttaactggattcatcttatcatgatattctttgataatcgaatttttatactcgttagcatcgtccggagatagaaacaacaaaggtgttaactctccttccttaatgaagggaattttaaacccgtctttatccttactaacgacgatataatattttgtaatcattctcgcccctcataacaaacgtagaatattccaacaaaccaaaacactgatagtataatcagtaaaagttttctttcaacgccatttacgtgaaacacacaccaaccgaaaagatatgtgatcatcgcgcaaacaccataagaaagaaccccaacagctactagcgcgatgatcggatccattagtagttgttagcccaacggcggaggttttcggcttgtttcagtgcatacagtttgtagatggtttccgcatccatacccagcgccaggaatttgcacataaagaaatgccactgatcgataagttcaaacagaacttctaaacgatcctcttcactcagatccgcaaatttagtattgcgcaattcctggtgatttgctttccacggtttccaaacaccggaagcaggtttaacaccgcgagacattccacccagagcggtatacaattcgcgggtttcatcggcgatcgcgtcgtcttgcagtttcagccaatcaaggatttctccacaagtttccagattatccggacgcggaacccaatgcagggtatcagacaggctttgttgtgcatggttttgtaaatccagcatggattgtaaaggatcgccattacgggccagaaccttttgatattcggaatctacaaattccagatcttccgggttaaccaggtgcgcacatgaattaaatacaggagttttatcagtagtcatatcaatctcatttttttcggtgatttgtcccacgacttaaatcgaagttttgccgtgagtccagaaacagtattatctttcaaatactgcataatttcaagtttagttgcgccgtccgtttttatcatttcgttgatatctttggaaggccacgggcatttatcccacattacaaccttttctccagcctcaatcaatttaaagaggcggtgagtagtatccggatgacgtgcttcattgtcaagaacccagacacgcatatttttatacggaacctcagaaagtgcaagctgtccaccagtgatagcgccagcattatcaacaaacaggctatctaatggcccctcaagaagataaaccgtttttagcggatctatcgtatcctgtccgtaaatcttggttgattcttcacaggctttgattgtgatatatttcgactttgccccgtcgcgtaaagcacgaccctggaaagattcaattttccctttcttatcgaagatagggatcactaatctcggttctggttttgcgatcggataggtatccggattcaccgtattaaccagttgttgccattcgcgagtaaaccacaaccgatcccacttgtcacggggaatacaacgattctgcacatattttatgatcggatgttcatccggcaaggtatctaacctttcgcagaattgaagagtaggaataaatttcttctcttccttcggttgttctgtatgcgttggctttaacgaattgcgatccttaaacgattccatgagataatcacggtaatcgtctggataatattctttcaggaatacgctaaacggtacaccataaccacagttaaaacaaccacaattcatatgatcaccctttttagaagggtagatccaaaatcgttttttgtacttgtctttcattgagtcgccgcaaataggacaacgcgcattgatgcttaatgcccccgatttacgaacgatttcgctttgaggcagtgatcccatgattcgggttgcaaattctatatcaagatacatttcttacctcagttgactatctttagatcctcgtcgattataccccgcgctgatcatttcgtcatgttctttttggcattcaatacaataacggcaacccttcacgatagccctacgtttttcgggtatcggatccccacaatcaaaacaatgcgttaatgattctccgtttctgatttgagaacgtgcaaaatctatcgcattgtctattgttgcctgaatggtatcttgaacaccgtcagcagggccaaatccaaccgccattgtaaatcctcctaatcaaatgatttcaatatcatagactaagaggatttttctgtcaagaacttacttgcttttctgttccgtcaagcattaacttccaaccacgaaacgcctgtttaaacgaataatttattgcaatatcaattttatcagaaccttttcgacgattctgataaacggtcgcgttgtcactcatatacatgatacaaattggaaaccatgtataatcgttagcagtagcccagatagtgatattcagcggaggaattatcatttctttttccttttccctgcacgggtaacgcctaatactttcggcccgatgttggttactgctccagtagtcacaccagaagcaatcttttctgtatcgccgccagaatcacccgcgaccatatcctctaacatgcgccccttatcataatattctttgaggcgtggaacgttcaacatgatttcttcatgctcttgttctgtcagattgtagcgattgcgtagggtatcatatgaactggttaagttcataaacccactcatatacggaacagcattcattctacgcttgatatggcgtactgaacgatgaaaaggagaatacgcttctaactcttcttttgttttggggttgcgaattacttcgccttgtccatcaaggatccccagcttgtaagcagtccattcagtccagggctttttgagtagccggatcatccggacgctatatgttaaatccatatttttaactaattgatcactcatgattattactctattgtgaaagtgaataaatcagatttggtttcaggttcaaactccatacaaacaacctcgcatagtggtttaacccctttccaatcctccaggtaatacccagtatctataccgcatccaggattcataacgaggccagtttcatcaagaaactttttgcatttacttgatgtggtgctgtcatcttgtcggaaacagtgtgttttcgaataccggaaatttgcagacatttgagggattatgaaagttccctgacgtgcgatctgtgatgcacgttcgattactttatactcaaattccgcccctgtatacttacccttaaaatcagaggttttgattttaccaaaaggcgggttactgatcgccatatcaaacacctgattaaattcagttgttaaggcgtctccatgcacccaggaggcttctggtacgatacgcttacctaactcatagtatgtgtgatttaactcaacacagacgatttcacgcggcgtattgtacatcatgtaatgaaccatagcgaaagataacccaccgataccagcacacaggtcaataacacttccacctgtgcaagcatcgattgtgaaatcgcgagcaagtccaataggggtaaagaacgcccctaattcagaattgtttgtaaacgcgccttcatgaaagttttcaataatgaacaacttctcttcgtaagttagcgctttgtcagagtgaaccagatccattatctgattgtgtttcttggtttccgctttcgttaactttgccattttcccagctatacaataatgttgattcgttagggtagaattcccatccgtctacatatccggtttcccaatcagtagtttgttcaaaaccacagatccattcatatacaccaggaggcatttcgacggaatcaggaagcccgatatcttccgcgctgcgtccacattcaaagaatgcatcatgaatgaatggtcgagataataccgtaacataaccttcatcgtcaacagctacgatccagcgggaactatgaggactatcgaacttcggttcttcttcgtctgcgtcagcttttatttcagccttacaaaaatctaaattcatcatttcaaaccctctttaacaccctctttcatagctttccaggtagaacctgcttcaccattcagggcggcaaatacaaataataagatagcaaggacaagattcacgccagcaatcaccatgattttgctatacacgaaaatgtaaggcattgccaccacccaccaactaaaagaattaccagttacgatgttgagtgctgcaagtaagaaagtgataacgaatgcgattttcataatgtcctcctttgttatgattaaggtatcatcttttttgaaagaatgcaatacctatagatacaaaaaagccccgaaaggggcttaattttttatgcgttattgatgagataccgaagaacgtttttcgcttgttcctcattacaaccaactttgaaaccaggttcgatagggaggaagttccagaggaaatcaacacttccttcaacgtcatctttgcctttttccagcatcgctaacagcaaacctttgtttttgatgctgtttacgattgcgtcaaaataaccatcgctgaaatcaacattcgggttcagcatttcgttgtaagggttgttgaatacgttcattttgaatctcctttgtttaactcagtatcttgtctacgtgagttatattaccacaatggagattcaggtcaatacctttttacgattttttgaaaagtttttcgtatttggcttttacccagcgatacatatcttcggccttgtcactggcaagcagtgagaacagcagatagatcgcagcacccaccaacacaacgcctactacaatgtagacgggtaagagaactgggaagagaacccagaaccatgacatttgcgagaagccaaacactttagcggctgcaaaaatcagagttagtccagtcagcagtttgatagccggaataggaatcgttatagtcttagtcatttcattaccttacattctttatggggctattcgccccagtcaattaaaattgaatgtcagattttgcaatctgtgccattttttcacgtcgggtagattcagcctgtttaatcatcgggccttgtgtctgttctactgttttaggcatagtgttgccgtggtagtcagatttaaacccgtattcgctgttgtcggtatccatccagcgctgattaccctttcgaacttccaacttgaacttgttgaaagtgttcttatcgccataacgggatttgatttgcttgaacagttgcataccctgatcagctaactcttccgtctcgattacagctaacataaaatcagccgtagcaggtaaaccagcggattccgcaacatcacccatactcacatccgaactatcccatgcagaacgcccaacctgtgcgcctgtccacatcacggtattagtttcaacagcaagaccgcgtagttcttcggcaattgctttaaccagaatataggtattctcagcacctttaacacgggttgaagtacagatccccaggtaatcgacaatgatcacatccggaacaaactgtttcttcaatttaagctctttcacaagcgctctaaagtggtttgcacctgcacccgatgtagggtactgcttgaccaccaaacgcccaaccttacccgctttaaggcgctccattttgttcttatagtctgcgtatgtaatgttaccttcgtcgatgtcatccatagtcacatcaagaaggttagcatcgatacgcttagagcaaacatgctctgccatttccatagaaatgtaaagaacgtttttaccctgttgcagataatcagccgcaagagaacataaacccagtgatttaccaacgttaacaccagccatgatgatattcagtgtaccacgttccgcgccgcctttggtgattgcgttcaggatcgggataccaaacggaattttcatcgccttcgattggtaaagcatccaccgtttttcataatcttcgaaatagtcatgacctactgaactatcgaatgaaattgctaatgcttcctccatgatttcagggatagccccaacaccaggaagtttcttgttctgttctgccagtggtttttctgcgttagcctggatctcgattgcgcgagaaagagcacgatacattgctttgtctttgcaatatgtttccgtttccttcattagccaatctaaatcttctggcgcatttttcagcgactgaatcgcctttttcgtgtcttcgtagactacatcacttagatttcgtttgtcaagcgcaacctctaaagcagtttttgacggaataccgttgaattcctgtacatgtttatcaatgaggtcaaacaaaacttgtgcattgccttcaaaatattcctttttcagatgaggccatgcttggacaaaatacgtcccgttataaatcaggttagaaaatattgtatcaacgatcattgtattgccttataccaggttgctgaacatcatgaaaaagttgtaaaccttttgtttgaatacatcccataatgtcagcttaggctttgggacaactgaacccttttcaagctctttaatctgtgcataaattgcatcatgcaccagcgggatcaacgcttctttgtcttcgtctggggtactgaattctactttcagaccatgatcccaaaacaccttatgaatataaaccagatgcgcaacacctttttcatcgttaatcagaagttcctgaataacatctttcatcgcttcatcaatataattctttgctttgctctcgatatccatacattgcctcggttatggggccgaagccccatagtttttataaaatttcgttgtcttcttcgatatcatcaaatgattctgggatatcgtcatcatccagatcaggatctgggatgctatcagtgctgtataaatcttccagcgcggaaccatcactgatttcacgatccgggatcttatacttttcttcgatagctttcaagaatggttgatgagtaaacagaggacgccagaattcaacgctatttgtttctgactcacgccatttcttttcttcaacttcgagttcgccagtctcggtattcaggaaagcacggttgcgccagcctttggttacggtctgtacaaagttcatttccattgccagatccagaaggccagaatacatactaataccgccttcataggtaacatgcagcgggaattttgatttctctttcacgaatcgagatttttcgatgttcatgatgaaatcataacccactacctcagtaccttctttcacctgttgtttacccaggatgatcgcagtatcagcggaatacattaaaccagtaccaccggaaataactttcttgctgtacatttcttgtgtgtcataggtatgacagatacaaaccatcgggatatccaggtcagccagataaggcgtaaccatacggaacataccttttaatgcttttgctcgcgtcatatcctgtttatcgttatcagacagcgcgtcagcaagttcttttttacttgccgtgttgcctactgagtcaacgaatacaatcaccttatcaccgcgttcaagcgcgttaagctggcttacaacgtcattacgcaactgctcgaccgtcgtgatacgagtatacacaacacgatccggatcaacacccattgatttcagataggatttagtaacacctttttctgaatcgtagaacaggcacacagcatcttcatacgttttgagataagccgctacagtcagcaaacctaagttggatttgaagtgtttggacgggccagcgaaaagggtaagaccagaagttaggccaccgttaaacgcaccggacaacgccagattcagaatcggcacacgggttcgcgtgatggtaatattgttgaatacgtcgctttcagaaagtacagatgcagtttggctattcgagtttttgatcagtttttttagtagtgctttgtttgacatttaatttttccgatttattcattctcattctatatatctcactagttaatgaaaggggccgaagcccctagagtttaccagtcaccgaacagatcgtttaaactggcacgtttttcataatcaattttacatacttccgtgatattagtcaatggactaataacatgtttttcaaacatacccggataatctacccatgccagaatatcactttcgatctctgacggtagtttatttccggattgccacgcgatgcaatcggcttgccacgggtttttatcccttagtggtagaaccattaccttttcaccttccatgattggtgtaacaccatcaataccagcagtgaaacggttaaagaacagcacccctttaatatggtttggtgttcccttgattggatagccagccccatcacgatatttcgaaatgttgttggcagatgatacaccagcaatttccctgtagtcaagttccttatattcttcttcgaactttttataatgttcgtgtaaagataattcaccttcttgcaggatacggcggatcgcttctttcaggaatactttcacagaggtcggagtactcgaacgctgtgtttccatacccatgattttcaatttcggtttttcatagcgagttccttcggagtcccacacgttagccgcatatcgttttttagcagtccagaaacttcccaacccttcggaacccaacggaggcccagaaatgatttcacgatccataaacatcaggtgttccacgttgttcatgtattcgcaaagttcacgataccctttatcgatcattggttccattctttctttagcaaagcgatccaggaagtcaacccaatggttattatccttaaatttagcctcaccaccaacttttgcaatcacgttatccatacaaacataaatggagtcagtatcacagtatcgaacatatgcatgatccgtagtaccgcacaggtcgttaagatattcgtttaccttacgttcaatccactggatagccaactgcccgaacatggtgatcgcgctggcgtttcgtagatcgaagtatcggaagtgttcgttacccaacgcaccataaagggagttgatagaaatcttacggttaagctgtgctgtgttcgcttgtgcgatcttcttctcacatacgcgcttaactgctttaagcatttgttttgtaagagttttcagaactgctttcgattcatcactgaaatctgtatagaaatcaaagtcaggatcaatcatttggttatgcgcgtctgttaagtgttcgagttcgtgcttgatgagttcaagatttcgctcacccgccatcattcgttttttccacatcttacgctgatcaaatactttcttgatctctactgggatcacgcctttgatatcacggcggaacatccacccgttaggagaacagctaaattcatcgctagggcgcggcgcggtcttattaatatactcttcaagagcacgtaccgcaaaacttcccataatcgtttcagggcttatattcacctgtcggatgatggaagggtacaggcttgttaagtcaaacgataccatgtatttgtaaggcccaggaactggatccttcacaaatgccccagggtaaggggttttagtatggcgtctgttttccggaataacaaccttatcttcacgcagagagttataaatgatcgcgtcccacgttttcagcggagacataacccctgggaagttaatttttgcatagtacgctacagacagaaccagttcaataaagtttcgtttaccgtcgatatcaagtacgcggataacgtcaacaatgttgtacgtgatgtacagttggtgatcgcgctggcgtagttcagacagggaaccttcatactcaactttatttttaccagtttcgtattccgcgatcgcgtccaggcggtaagatggttgcggggtaaagctgaatttcttatacagcgacataccatccatttgagcaacgccggaaatatcatatcctaattgttcgttgccgtaagcgtcagtagtggttctggcggttactttaccaaatgggctaaaatgccttaccacgttttgaccaaaaatgttcaggtatcgcgtgatgatatatgcaatatcgaatttgtcagagttccatccggttacaataacaggggttcgctctttccaatctttgatatacgcagacaataacgacttctcggtctggaaagaccgataaacaattttgtttaaatcttcttcgctaatgtctttgcgatcaacgttttccgcgcaccattccgcaaggccaccctcaaccagatcgtatacatagaatttatcttcaatgctatcgtaatgggtaatcgcatcgattggatattttgcttcacgcggatccggaaattctggggcggttacctcgatatcgagagaagcaatgcgaatgtgttcgcggttgtattcgatttcattccggtacatgtcagaaatgtaagccagtcgataatcgtccatacctagcgcttccatcccaacatcgcgcatacgctgcatccagtttttagcttctttgatgctgtcaaactgttttttgaggcaaggcttgccataaatgtctttgtatggggtttctacgccattcatagcgtgttgatacattacgggcgcatatttcgtcttacgtacctgttcggtgccgttagagtcaacgaagcgctcgtaaatggtatctcccatttgttcaactgataggtaaaattcattcattggatcttgtcttctccattaatataatgttccattgtaacaccacctacagcaaattcaagtttactcgatgttctaaaaccaacaacccttctgctaacaagtcacggatctttctcagttgaacaagctggcgttcaagtttaaacccgtcgaataacatgctaaaaatactggaattgatactatgatattttgcttctgcaatgccctgattaaccatcatgatagctttgttaaccagtagtttcctttccgttactgtatgttcatccagttgacaggttgcaagggaaaccagatcatcataagcacgttgatcaataacgttatccatacgggccgcgaaaattttattcatgtaagtgcggatcattgcgcgacctccattcttttcataaagacttcttttgcttgttggatcaagtccagagattttttaatacgctcatagaaatgagtggtttcaacttgattgcataacaatgtgtactctgaaatgttacgatcgtaaaatccaggaaagtagtgttgtgcatagctgtaagtgcgggtatctgacagattgcaagttaacgataacaagatgtcatcttttacaatcgggatgatcaaagtttcgttggatttgattgaatccatgatttcgttaatagtcataatatatccctctcaatggtgtacacccaatataacaaagcccctgcacgaatgcaagggctttttgattagtgaccgatccggtacttgtacttgaggatccaatctgctttttgcgagtgggtcagtacgcggaagttgttttcttctgcaaacttcaacccaggggttacgatcttaaccatgccccactcttcgagaagtcgcgcaatgttgttccggcgtagttcgtcttcttccgtcatatcgacttgacgaccatcgagtttcaacagttctttaaaatgcacgataaaatacttaccttgctttttcagaatgtggcacgattgccagagcattttctttttgttgtttgcaataccaatacgggttagcgtttcacggatctttaaaaaagaatcgtcgctgattagttgaatttctaacatacatcaccattgtttaatcaatttttccaatttcttttgttcagctttgtttttcacaatacccaacaaagacagagcgaccttcgcgtgttttcttttccaatcctcgaacattccgaggtctttaagttcctgcaaatattccatcgctgtacgtgtatttacactgtatttttcgcgaaggatttcgataataattttctcttcaaaatcttccgatagtttagcccatgcaccgaagcgtttagccttcctaacagagttgagataatagttatagtgcatttggtcagagatactaccgcctaccagattcatcacataagcgttatatatcgtgtctatgtgctggctcattgcgttgtctacaaagtacttatcatacacttcatcgataaccaacggagttttaccgttgttgatttcgtctatgatgttaaacaaggtgttttctttatccttgccgtactctttgaccagttcttcaaccttatcccaatctttagaaagccaagcggattcatgcggggataactcttcttcatccagaaattccgccaggctcatgattatgcctcccagaccatagaaagcatcaggttcatcaacagatattgcagatgaatttctttattcatcgccagcccgtattgcgcgttgttttcgcctacaatctggatcagtgcgattttcgaatcctgattcacgatagggtaaatcgtatcagtcaattttccgataaaggtatcgtattctgacgcatatttaataacctcagagcgcaaccctttatagttcttttctttcaacagggtaatgatatgagacacatcagaaccaacgatctcatttaggatccctgcatcaatttcaccacgtttcgagtagaacccgatcgctttgataatagaacgcgcatccggataatgctctttaacaaacgctgcaatgactttaggatcatacttgatattctcgatttcaaggataccgaaacaacgcttgattaactgtttcatcagttcgatacgttcagcatcagacggaacaccgaatttaacaggaggacaacgagaaagcagagcactatgcacaccgttaatgttgttcgctgttacaataacagaaacgtttttactgtatgcttcgataaagctacgcaagtgtttctgtgcttccgccataccagaacgatcgaattcatcaatgatgataatctttccgcctggtttctgcgtcattgatgaagcaaaacgatccagttcattacgaatgaagtttacaccacagttcgaaccgttgacaaagaacacctcagcatcaacctcacgggccaacacaagcgcgagtgtcgttttaccagtgccaggggaatcagatacaagggtcatattctcaacgcgcccagatttgattatgccccgcatagcggctttgtcaccagaaggtaaaatacactcttcaatcgttgttgggcgatagcgctgatcccatgcaaattcatcaggagatcgggagattttaccgtatttggtttcgatgatttcaatattttcactaagttccataatataccttcaaaataaatggtgtaaaagaaaggggccgtagccccttaaaactatcttacttgaatgtgctacttgcttcaagtacgacgacgtaagcaacgccgttatcagaagagaattttgcggcccctttggaggaaatctctactttgtaatcgctgttgatgaactgcatgttatcaatcttcatatcgaaattgaaaacattgtcgccttcatactcacctacttcaacggagaaagttgattgactttctttgcttttcgcggtgatgaccagtttaccatcaatcggttcaacggacaggtcggtcagtttcatcatgcgagacgctttgatcagtttttcgaaatcgttagcggtaatctggaaaatcagatctgctactggcatcaccagacgttttttcggtttcgggatcgttgttgcgtctgctgaacgttcgatgatcttcatcttgtcgccgcgaatcacgatttcaccagtggaaatatcatgagtgatttccgcgtcagtgccgacgatgttcagcatgttcaggaatgagttgagatcgtagataccaacatcttcatcaatcacatcagcaatttcagcttctgcgtatacaacgctgttgattgatttcgtcatgatgaatgaacctttggtcaacatgatcgaagagttgatttgagaaaagtttttcaggatatcaatagtttgtttagagaatttcatattcagcctttagttttcaataagtgttacttaataagtgattttacaacggtttccgctgctgtgtcaagcatatcagccatttctttaacggttgtacgcttcggatcttcgcgtcgttcgctggtaagtttacgatgttccgcaaccactttttcatcaatgtcacgatagtgtttaaaacgttcctcttgaggcatagctttaaacagttcttttgtttcgtccgagagtttagcaacccaagatttacggacgcggttcatgtagtcaacaaaaacattactttcattcatatatttcttctctaacttagaattctttgagtgggggccgaagcccccgcttgtattacatgtctaacagtttatccaggtcatcatcaccggagctatcagaatcatccagatcgaacggtacgccgtcatcttcgcctaccggaaccgatgcaacaccaccagatgatttcacatcagatgtctgattgtcaaacttagccatttcgttatcgaagttgctcagttcgctatcaaggtcagcggaagcgctggaaccagcagaaccgatcgaactacccataactttattgaagcgagtggtcaggtcagccagcggtttaaattcgctttcagcggtaatcgggcggagatcgctcataccttcgaaaattgctttctgaacttcttcatcgtcgatgtttttgatcttagccggaacaccaaacgaactatcgtcatagttaggccaatcaccaacttttttcgctttcagggtgaagttagcaccatcaaacggacaggttacagcaatacccggttcatcaagttctggattaccgttaattgcggcggtgatcttgtccatgattttcttaccgaagcggtatttgaacaccttaccttcgttttctggagcgcctgggtctttaacgatcaggacgttagcccagaaactttgtttacgaccgatctggctcagtagcttatcttctggcccgtttttgttggctttagccttctcatacagatcgttttcggaaatgtacttacatgcaggacagccgtcataatcgccgtgggtagaggaacagttctcaatgtaccactggttgtttttcttgaaagagtggctcacgatacggacgaacgccagttcatcatcggaacgtgctgggaggaatcgaataacggcggaaccgtttttctgtgcgtccagggtcagtttccattctttctcatctttctggaagccggaaccacctttcagatttgctacctgtgcctggagtttagcgggatcttgacgtttaaaaatgctgctcatattctgttttctcgtttagtttagtttgattaacgtttgtttcattaagtttcgatattttatgatatctttttcagtaaggtcaaatatttttctgtatgcctttaacttaatgctaaagtcagaccaaataatatcatcagctacttgatcgtgtttatttatgatacctaaaaatgagtcaaaaatcaaaaacgattcgtaagatatcacatttgacaggacaagtttgcttatgtaggacgttgatgatttttcgctgtacttaaacaccagagacacgggaatctctttcattttggcgaattcgtacacgtttttaacgtcatccacaaacacgttatctagtctttgtaactttcctatgtattgcctgtaaaagacaatactatcttcatcaacatcgcctacccagaaatccggattggctacgaagttggagaggaatataaaatagatttctttgaatgtaaagcgttgagctaattttacaaagaaatatctatcctttcgcttgttaaaggcgttttcactaactttgatctgccagttgtattgaaggacatcaaaacgcccctggaaatgagttttcatcgccagatataacttgtatacagacaaaggcacaagccgtgaattcgcctcgctatcagcaaacggagctttaaatctcacatgaagccgtccagagtggttgatgaactatgttcaagcgcaaccgatgggcgaagcatgtttcctttgatcgcttcgtcgctaatcttatcaaggatcgcgcgaggaaccgttttattcagcatcgcataatcaatggaattttcatccatccattgcagcgttgcttccatgtaggttgccccctcagaggcaaccagattttcgatatacaaaccgacttcggtcttatttccgatcatgctttacgccttatcgatcatatcatacagttcgatcagttcgttgttttcttcttcgaaagcggtacgggcctgttcgtgatacagtttgaacagcttcccgaaggtttttccgtcgataccgaaatcagtttttgctttggatttgatatccttgaacgtaccgttgaagatctcaacttgagttttcacgttggatgcttctttgatcagttcttttacctgttttgctacatcagggtttgtttgtaaaaattctacactcattttgttacctcaaaaatcactcagtttttcgaacatacgggaaagtttgttatccatgaagtaacgttccattttggctttacttccggattttggagtattatacgcttcaataatcgaattttcaatatcttttggtataaattcgaaatcgcgtagttcctcgttttctttgtaacgtgcggcccattcaggggtcatcaacgttgtcgggtcgtctgcctccagccatgcctctaactcagaggattttaccgctggggcgcgttcgccttcaaccttcgtcacaatataatcatttctaattttaatgcaagcgatactatcttttttatcgcctttgatatttttgtatcgcagatcgttacgtggcgaaccgtacttaggcgttacccattttttctggggaggcgaccattgacgaacaccgttatatttctgtagttgtgtaaagtcgctatcagcagaaaccactaatactcgtctaccttcaccaacagcttttttcgtaacaacagcaattatatcatcagcttccgcgaattcaacctttaatccaagataaggcatattctgacggatttcttcgaacacaggattcaggaagttgtttagacgatcccaatcccattctgattcttcgtgttcgatctgacgacgttttttgtagtaccaggctttttgcctacgccagtaatttctgtcatcgaaggcaatcacgatttctggatactcacctttaaattttacaacgttaaaccgtaaagtgtcaagcaccagatgacgaatcatttcgatcgtgatggatgcttgttcctttggtttgaagttgttcatcagtgtagcgatggaaatgttagagatatcgatgaccatagtatcatcgggttccccttcatcttgcatcagcttgttcaagttaaacatgcttgcaaaactgctcatacatacctcaatttttcaaagaacggggttattgtagtaacttacgaaatgaagtcaatacaaaagaccataaaatttttgatcaataatacttgatctgatcaaatttatgatctataatttattaattaataattattttactacaatgatcattgtaggtcaagtactaaaatcaataaattttatataatttagatctgatctatagatcattagatctactttaaccttaaataatatagaatgaaatttgattttgtctacagttattatataatattcttaacttcaaagaggaaatatgaatactatgactaaagaaacaaccaatatctacgcagacaatgaaaaattataccctatcctctgtgcatggaaaaagcaaatcgccgaaacaggtgatcgcaaaatgcctaatgagttaggtgctgctattatggatattgcaaacgggctatcacgtcgttacaacttcaaccgttattccgaagattggaaaatggatatgattgatgacggaatttccgctgcaatctcaggactgcataacttcgatgaaactcgttataccaacgtttacggttacattaacaaagcatgttggcaagcattcgtaacacgtattctgtacgagaaaaaagagaacgcgaagaaatataaattcttccttgagcacgtttacgactgcgaagattcagatatggttagtattgcagacgaaggtttcattcaagatctacatgacaaactatctcagtacgaggcttccgccaccaaaaccaaagacaaggaagcggaagtattcccaacattggaagattttctatgaaagcaataattgacttaaacaaaatattaactgatatcgattacgaaattgacttgctaccctacttcgtaaaattagagttgcaaaacgtgggaatcccggttatcatcgatccaactgacgtaagaaaccccgatttcgaagtagaagaaggggttttgtcttatatgataaacgccgaaactatgatcatggagatcacttatgattgatgaagagaaagaagtactaaccagtgtggaagaagtggatccggaagaggaaattcgacaaaagatccaggcacgtgtagaagccgacgcattgaagcgagcacaaaaattcattaagaagaaccggactgagatcaaacgcctccgtagacacgcagaggaagccctattcaggggtaataaggttcagtatgtgtatgcggttaagaaacttcgtgatatgctcaaacagccatatacagaggatttcattgatacgatgtggaacacttcactagcatcaattcgaaatatcgtagcttcacaacagaagcactaacaaacaagtagcccctttcggggctatgagggtcttatgagaaagtacttaatgatcggggatactcacgctggcttgcgtcaggacaacccctggaatgaagaaaacctatacaatgtattcgtacaaatcgtagaacactgcaaagcaaacggcattaccgaggctttccatgctggtgatttctttgatgtgcgcaaggccaccacacaaaccacgatgaaatttattcgtgaacgtattgtgccattactggaagaagccggattacatatctatgttctggttgggaaccacgattgccagtttaaagacaagatccgccctaactcaccgcgagagattcttgatcagtatgattgcttcacggttgttgatgaaccgatgacagtcaatcttgatacttctccgctacaatcaatagatttgatcccgtggatttgtcaagaaaacacacagcagatttttgatttcatcaaaaagtcaaaatctcaatactgcttaggacactttgaactgtccggatactatttctataagaacagtaaagcggatcatgggcttgaacctgatttcttaaagaaatatgatatcgtgtattcaggccactatcatcacgctaacgaaggcgctaacgttttctatatcggtacacctcttaccatgagtgcgaacgatgaggacgaaaccaggggcttctatgagctatcttatggcgacggtaaacgtgaattaactttcattgctaacccagtatgccaccatcgccggatcacctatccggatcaaaaagatgttgatgttgcagattacaaaaattgctctgttcgcttgattgtacgcgaagttgataacgatttgcctaagtttcaaacaaaactggaagaaacagtttatgagttgaacattgtcgatcgtgtgatcacggattcagaagttgatactgattttgaaatcaaaagcgtatctggattgattagtgagtacatcaacaacatgcagatcactccagaagaaaagaccgaagtatctgcaataatgagtgcattgtatgcagaggttacgagcaatggaaatagttgattacgttaatattttaaacgaagaagggcgatataaaaccctttataaaatgtttggatttgatgtgattgttgcagtacagcaggattcctataacgagtatgtgtcattggggttcactctgattaaagacaactatcacgaaacaaaggtttggacatttactgtcctgaatagcatggatgaagattccgtgatatactgctttgatagcacgattacaaacatgattagtgatatatcccaaaggataattgatgaaactcaaatttaaaacattgacttatcaaaatatcttgtcggttggtaacgtaccgatcgtcattgattttgattcagcaaagaaaaccctcattacgggtaaaaacggtggtggtaaatccaccatgatcgaagcgcttacatatgctctctttggtaagtcatttcgcgatctgaaagtcggacaactggtgaacagtatcaacaagaaaaaatgtctggttgaactgttgatcgaatacggcaatgatgaatataaaatcatccgtggacaaaagccgaaagtatttgagatctggaagaatggcgaaaaactgccggaagattcagccgctggtgattatcagtcacagcttgaatcaatgttgaatattaacctggtgggctttaaacaggttatcgttctgggtactgctggttatgtacctttcatggaactgaaaacaccagatcgccgtaaattggttgaagatttgctttctctgtctattatcagtgaaatggacaaactaaacaaatcatacatccgtggtgttaaccgtgaactggatacgctttcaatgcagattggacacgtacaacagcagatcgcaacacatcaaaagttcattgacgaacaacgggcaaaagcaaatcagaatacggcgcgttaccaggatatctacgattcccacgtagaaacagcaaaacagattaaagcgcaattggttgaacttcaaacccagatcgcagaatgtgtgatcaatggtgaagaccaaacagcaaatattcaaaaactgcgtgatggctatacacgcctctcaatgaacgtagaacagttgcagcgtcttgaggtgatgtatcgcaagggtggtgaatgtccggcctgtaaacagccaattagccccactcctgaacgcatggaagagattgccgagaatattaaaaacggtactcagaaacttacgctgattaagaacaaacaagatcagctacagaaaatcatggatgatttactaacacaacaacgtacactaaatgggctgaaatccaaatacgaatcactacgcggtacacttcaaaatgaagttgcagcggctaaacgtgttcgggctgtcatggataaagcacaggaagacgtggtgatcgacgaatccccagttgaaaaactccgtgaagatgaaaaggaacttgattctaaacgttctggatttgtcaaggaaaaatattttagaggtattgttacggatctgctgaaagattccggcgttaaagcgagcatcgttaaacgttatattccttacttcaataaacagattgcgtactatctggatctgttgggtgctgattatcagttcactctggatgacgaatttaacgaatcgattaaatcgctgggtcgtaatgattttagttacgcatcgttcagtcaaggcgaaagagcacgtattaaccttgctttattgttcacctggcgcgatgtaaccagtaaaatttctggtgttgatttatcccttctgatcctggatgaagtgtacgatggtgcaattgatcgtgatggtagttttgctgtaaaagcgctattggatgggataaatggtaacgtaattgttatcagtcatcaggatttagatccggaagatttcgaccgacatattgttatgtcaaaagtcggtcgattctctaaaatggaagttaagaagtcttaaacttgcagttatcaaaatgccagcgattcatattgctggcatcaccagatttattgcaatatggacaaatcaactgtttcctttttgcttgggtctttctatctgggttatttctgcaatacggtatatgtgaacgcagataatgtaatgaagattctgttccgcaatatggacaattccccctttctttaggtacgtttccgttcttatgggaacacgggataccctcgaacttatgtttcaatccttcattacctggtttcagtttgcagttgtcgaagtgccaacgagtcatatttccaattatacctgattttccgcaatgaggacacacaaccctttcttgttgctttttggctttactcattcgctgtctggtttcttcggtgaactctctattcctatgtgcttctgacgcctttttctttaaccattcatagcggcggttagctgttctttcctttgatctattggaaccaactgttaacatatgtgctgcaaaaacgagtttgttgtttcctgggtacatcttgactaataacagatgcgcaatataatgttgacgtgctgtaagattaaccaaattatcatcggaatctgttccgcctatgcacttgggtatgatatggtgtgattctgtatatccatcatactgcgtttgtttagcatgttctatgatagagttataaattttgttatagttcataaacatatctcttgtttgatgggccgttagatatccctatttaagaggatgaaattatgctattagaaaaatcttttgaattagaaaccgctccggaaatagagcggttttatctccacaacaattttcttgaagaaaaacatatagttactatgaaagatgttgaggaagcattcaaagataaccctatagagttgacgcgaatcaagaacaacaaaagttctgtttggttcctcgaaaaaatctattgaccgaaatccataaatacagtaaagtagcccatgtaacgaaacgtgggctttgtttttatttgaggaacaataaatgatcactgaatccaaaatgacttatcaggaagcactgaaagttttgggcgcaactggtagcgaaaccagcgccgaaatgtccagactcttcaaacgcgcatccttacgcaatcaccccgaccgtggtggtagcaatgaattaatgcagaaaattaaccaggcttacgacgtagttacaaaaactgggcctagtggcgcacgttctgagactgctggtgatgttcgcgcacgttatgcacgtcaaaagaaagaatgggaagaaaaagttgatgcttactttgtagtggcgaaaaactatttcagcaccaaatttaacgcacaggaatttgcggaatacttcaccaaatacactggattgcctaccactttcaaacaggaagtaacaaaaggtagtcacggtgtttatgcttcgttccgtttcacttctggtgatgcttactttgatttcggtttcaactgcacccctccgaatggacaagggttagccgctccggattcatctgcactgggtaacgtttctgttagtacctttgtactggttggaactaaaaaacataaaatggcaagccgtgattatcaatggggcaaaaacccagataagatcactccggaaagcctgttcccgtctaaaaaactggaaagcattttcagccctgtacagaaaaatatcaaatacaaacgtgctgattaccttgcatcattccgtaagctgttaggcgctgacattagcggaaacgatatctttgttgaagttggtacactgaaagttcgtttctatcgtcacgtattcatgcgcaaaggtgcttatgtgtttagcgcggtgtatgatcctgctgtatcgaagtatcgtccggctgcacaacttcgcggaaccatgttcgaagacgaggacggcgcttgcctggatatgatcgttgatacgttcaaagagttgcagaaactgaaaccgagtgttcaaggcgttgtgaacgcgatcgataagatgaacgcagagtttgcggcggggcatcgttcagcatcttttgttaaacgtgtagctgctcaggaagccgcgccgaagccagaagagaagccaaaacgcactgttaatcgtatcggtaaagaggaatacttcgcagcactaaaagatattggtgctcgtgtaatgcctaccagcggttatgttgaatttgataacggcgctggtgttactatcaacttcaagcgtattgttgtaaaccgtaaagcatactactcattcagtagctttgatttcatgtactctggtcagaaacacattgagtggttgaaaggaatcgatatcgcagaagataccaaaggcgcaagcattagcctactcactgatactctgaaatctttacgtgggatctctgactggaacactgttaagagcgctttagatcaaatgaattctaacttcaaggcgggtaaattctccgcacctcatgtgaagaaggaagcagagcaaaaagcacctaaacagaaagacgaaatcggcgcacagcctaccaaaccacaggcggctaagaaagatacaccggaagtggaaaaatcacaggctgttcatgcagcacgtgagaaagcgaatatgaacaacactattcgtaaaatgatgactatgttagtcaaagcacagcgcaaagacactccggaagatatcaagaaggaagttgatgcagcaattcaattgtggcgcttgacttactaatcaaatgaactataatgggaactgttaacgcagttccctttttatttgaggaaaatattatgagttgtccaacatggttacgtttggaaaatctgaaagaaggtacacaaaaacggatttatattaatcttggttgggttcctcctaccgattttcaaatggctgagattttaatcaatgctgttaaagaagtaagcgacacttacgaatgggaaaggctctattttcctttgattggtttgtatatgacgcgaaataaatttgaagaaatgaaacttgctgttattcgcgctacgattattaattcccaacaaagatttactttgaaaaatgcatggagttctgaatgattattcaagtatctgtacagggtgacactctgactgtcaccgaatccatcaataccgctcttgctgtatgtcgtgaccatatctcacaaaatcctccagtgactgagatcctggaaattgatgtttgggatcagattgggatgatcgacgcatcatatggatttaccccgcgagatgaagaactatctcgtatcgaatcatggctgaatgaacaggaaacggaatgaaactccctaagaacacaacactactaacccgcgaaaaacttcactctgttgattggtgtcctctggatatcatgatttttgatattgaatctcgcgtgatcaatgcaaaatatcaggggtgtagtattttctctgttgaattcgagaagattcgcgggtatgatgagaagtacaaagaaaaactgaaagttatgattgaagcattgggctatattgtaactgttgaagacaataaaatgtggatcgcaatatgagcatagtaaaagcggtgtttgcattggggcacgatatctaccacgatgatttcgcttttggatatcagcaaggcttgccgtggggccactgtaaagaagatttacagaacttcaaagaagaaaccgccgatagcgttctgattatgggtgcaaatacgtttacctctcttccgggtaaattgcctggtagaattcattgcgttctgtctggttccggtagttttttgaaaaccaaaaaaggcgaggttgctgattacgtgatccacggtggcgggttgtctgctgctattggtacaatgcaagcaacacacccagataaaaatgtgtgtgtcattggtggtaaggggttgcttttagattcaatcaataataaaatggttgatgaagtagttttgacacacatttacggacatcatgtatataatgcccccgcatttaaacgcgatgtttcgtttactgcttctgaattgggtgatgcattgttaaaatatgaattttctgatttcgaaactcagtacatcaaagaacatgaacgcattgaaaaaatcatagtcgatcgatataaaaaggtataaaatgaaacaatatctggatattattaaacttgtacttgataacggtgttgaatcaactgatcgcactggtgtaggtactattcgtattttcggcgcacaagcccgatgggatctaaacagaggtttcccagcaactacctgtaaaaaactattcttcaaaccgtgcaagcatgaattgcaatggttcctgtccggttcaaccaacgttgaagaacttcgccggatgacctggggtgaaaatagcgataagcgcacaatctgggatgataactatgaaaaacaagctattgatttaggatatgattctggttatctggggccaatctacggtcatcaatggcgttcgtttggttctctttatggggatgatgatagttattatggcggttgtggtgttgatcagattgcaaaagtcatcgaacaactgaaatcaactccagacgatcgcgggatcatcgtttctgcctggaaccctgttgatcttgatgatatggctctgcgtccgtgtcactgtttcttccagttcgttgtaatcaacggtaaactgtctctacagtggtatcagcgttcagttgatgtcttcttagggttgccgttcaatatcgcctcctatgctctcctgacgcatattatcgctgatatttgcgggtacgaagtgggcgatcttgtttggactggtggtgatgtccatatctataaaaatgcggttgaacaggcaaaagaacttttacagcctaaccgttcaccaatgccattaccgattctaaaaatgccgaaggtaaatagcttacttgatttagatcaagaattctttgactcgataaccttagaagggtatcataatcacggctctctaaaagctgaaatggcagtatgaaaaatggggcttcggcccctttcttaacaaggtaagagaatgaatgacattaaagtagtagtaaaatcctctggtgtacgccagccgtttgacaaagaaaaaatatacaaagtgctcaagtgggcctgtgatggtcataatatcgatgttcgtgcattccttgaaaatgtattagaactgatccgcgatggtatgactaccaaacaaattcaacgtatcgctatcaagtatgcagcagatcatatttctgttaaagaaccggattggcaatacgtagcatcgaatcttgaaatgtttgcattgcgtaaagacgtttacggtcagttcgatcctatcccgttctacgatcacatcgttaaaatggttgaagcggggaaatacgataaagagatcctggaaaaatacagcaagcaagatattcaagttttcgaacgtgcaattgatcatgataaggattttgaattttcgtatgctggttcccaacagttaatcgggaaatatctggttcaggatcgcgatactggcgaaatctttgaaacccctcagtatgcgtttatgcttattgcgatgtgtctgcatcaggaagaaactgggttagcacaggttacgcatatcgttgatttttataacgcaatttccgatcgcaaactgtctctaccgactccaattatggcgggtgtacgtactcctacgcgccagttctccagttgtgtagtaattgaatcgggtgattctcttggttctcttaacgctgtaacctctgcgatcgtgaagtatatttcacaacgtgctggtattggggttaacgcgggacatattcgcgcaatgggttctaaaatccgtggtggtgaagctgttcatactggtgtgattcctttctggaaacatattcaaaccgctgttaaatcctgttcacagggtggcgttcgtggtggtgctgcaacactgtattatcctttctggcatctggaagttgaaaaccttctggtgttgaagaacaacaaaggcgtagaagaaaaccgcgttcgtcatcttgattatggtgtacagcttaaccagttgatgtataaacgcttaatgaatcgtgattacattacgctgtttagtccggatgttgctaacgatcgtctgtatgatctgttctatgaagctgatcagactgcatttgaagaactgtatgaaagcctggaaaaagatccaactgttcgtaagaaacgcatcaaagcggttgacctgttccaacttttagcacaggaacgcgcacagacaggacgcaaatacattttcaacactcatcacgtcaaccaacagggtagttttacggttcctgtccgtatgtctaacctgtgttgtgagattgcgatcccaacgtcgccgctggatgacgatgataaaatggctggtgaaatcggattgtgtacgctaatggctatcgttctggataacgctgatatcagcgaattcccgaaactcacgcgtattgcagtacgtgcgcttgataacctgttggattaccagaactaccctgtaaaagccgctctgaaagctaaacagcgccgttctctgggtgttggtatcaccaactatgcatcatggttagcgagcaactattgcgactactcagaagcgtatacagacaaagttcatgagctaatggaagcgtttcagtttaaccttctcgttgcttctatggaactggcgaaagaacgtggtgcatgtggattgtacaacgataccaaatacgctcgcgggttactgcctatcgattggtattgcaaaaccgttgatgaactggtagcacctgtttataattgcgattgggaatggttacgtagccagattaagaaatacggcttgcgcaactctactctttctgctttaatgccttgtgaaagtagttcacaggttagtaactctaccaacgggatcgaacctccgcgcggtttagtgagtatcaaatcttcgaaagaaggacactataaccaggttgtgcctaaccagaataaccagattgatttctatgatctgctctgggatatggctaaacgcggtaacaaagggtatctgtctcatgtagcagttatgcagaagtttgtcgatcagtctatttctgcaaacaccaactatgacccggcaaactatgaagacgggaaagttaaaacagaagacatcattgatgatctgctgtatgctaactactacggtgttaaaactctgtactatcataatacgcgtgatggtgctggtgatgaagaagaatccgccgaagattgcgcgggttgtaagatttgattaatgccccttcgggggctttttaaaggtaaagacatgttaacagtaatgaatacaaacccagatcataaccacttagaacaacctatgttttttggtgaagatactggtgttgcacgttatgaatcgcagaaacacaaagttttcgaaagcctgacgcaaaaacagctttctttcttctggcgtccggaagaagtcgatctgtctactgaccgtatgcagtatgcaaaacttcctgaacatgaaaaaatcattttcgattctaacctacagtatcaaaccctgttagataccattcagggacgtgggcctaacctcgcatttttgccaattgcatccgatgtgagcatggaaacctggatcgaaacgtgggcgtttagtgaaaccatccacagccgtagttacacgcatattcaacgtaacttgcacattgatccttctgtacagttcgaccaaatccttcgcaatgaagcgattatgaaacgttccgcatcaatgacacggtattatgatactctaattgatgaatgtcataagctgaaaaccatcatgatgctacaggaacaggttagcggctataaaccaaatgatccggctgtcgtgtattataacgagcaatacactaaacaggccactaagtgcaaagaagcgctgtacctttgtatgcacgctgtgaacgctctggaagcgatccgtttctatgtgtcgtttagtttcacctttaactttgccgaacaaggcaagatggaaggcaacgcgaaaattatgcgcttgattgcgcgtgatgaagcattgcatcagaaaggtactcagagtaaaatccgtttgtggcaaatgggtaaagatgatccagaaatggttgaaatctcccgtaggctgaaaaaagaagcaacggctatcttcctggaagtatatgaacaggaaaaagaatgggctgaacatttattctctgttggtgatgtagaaggtgtatcgctgaaaagcactatcgcttatattgaacaccttacagatcagcgtatgcgagcggtagggcttgattctccattcaccccgatccctaacccgtatccgtggatgaataaatggctcaaaagtgataacgtacaggttgccccgcaagaggttgaagtaagttcttacctcgtcggaaacttgaatactgaaatcagtgatgaagcgtatgcaaaatgggccagcaaatacgcgtgattgtcgggtagtaaacaagtacaaaactgattgggatgtcgatattcaaagaggtacgaagttcggcaacccttatcacacaggaaccaggggagaaaacattttagcgtttatcccctggttccagaatcaggttcgtactggggcgatcacgattgaagaattgaaagaacttgatggaaagaggcttggttgtacctgtgcgcctcttccctgtcacggtgattacatcgcgcatgtggttaatgttttgtgtggtaagaaaagatcacttgactttttggatatataatgtatgaaatctgaattcaacttaacccttgataaatgtggtcgcatcgatcgaagttttgttaagtgtggtgaacttaggcattgtgtttattttattgcaattaacgatgaaatagtatatgttggtaagtgtagggatatgtggaagcgtttagacacatatcgcaatgcaaagtattggagagaagccaaccccagtaacatcttaaaaacgtgtcgattggaaatggctatcaaaaaacgaaaaactgtgaaacttatcgtgactactcacgatgaaaatacatatcatgattatgaaatcaacatgatacgaaaatacaaccctgaatggaataaacagcactatgacaaaggcacaaactaaaattatcaataccctttacaaacaactcatgcagttgtgtggtgaatccgaaacatttttcttcgttgatcaagtaaccgtgatgggtacacctgttcgaatctttaactatcgcatggcctcatatacagactggctaaagcctggtgctctggaatgtcgcggtatcatgtttgaaatggatggagatacccccgtatcaatcatcagccgccctatggagaagttttttaactatgccgaggtaaaggcatgggaagcgcttaacgagtctcctattgaattaggcgaagttttagacgtgatgattaaagaagatggttccttgatctcaactttccttgacggtggatttctggcggtcaagtctaaaggttcggttaaatcagaacaagctatggatgcgcacagcgtgttaatggcaaatcgtgaattgctgacccgcttaactgagatcgctaaagaaaactatacggtgaacatggaatacgtttccccgaaaaaccgtattgtcgttggttatgattctcctgatctgcgtatcctgaacgttcgtcacaacatcacgggtgaatacatcccttatgatgaactctttgctgacgcgctgttacgtgcgtatctggttaagcgtgagaatatcgaagtactggatctggatgcattcgcaaaagaagcatatcagaatgaaggattcgaaggctatgttgttctgacaacgaaaggttttgtaaaaatcaaaacaaactggtatgtcaatctgcatcgcacaaaagatagcattaccaacaataaggatcttttcctaaatattgttgagaatacggtcgatgacctgaaacagctattcagttcggatctggtctctctgaaaaagattgacgatttcgaaaaacttttccttgatagtctcaatcgtttgagtgcaaaagcgttcaaagccattgaagataataaagggaaatcgcgtaaagattttgctatcagtctaagcgcggatttgtcaaacgacggtcggatcatcttcgggcctcttatgaagtacttcgaagaaaccgatccacaaaaactggtcgatcgcatcattgaaatgatggttaaaaattacgatcagttcattcctgaacaatataaatgaggttcataatgcctaagatatcatcttgggtatggcctgtaatcgtggggctatctttgatagcccttttttacattgcagtcgataccaaaatcgaaaacgcgtccttacgcaaggatatcaaatctttgcaagatgatgtgaagaaagtaaaagagacaaatacaagcaatactgttatctacgtggaacaaaaatccaaagatcagcagttagtcaaggatgcagggcgcaaacaccttttgtttgagaaacctggattgattgaaatcaaaatcaacaaatccttcgacgaatacatgcaggaatttgaaaaatgaaattagcaatgatagtattacttggtgtttttctcgttggttgtgctgaacagccacctgttaaggtacttcctacgttacccgcaaaggttaacccagtgaaggtaaaatggaaagtaattgcagacgttagagaaatcgacgggaaacaataccttgtaatgccatatgacggtaatccttatgttgcattgacatatccagattcattgattttacgtagctggatgaatgacgttaaaagacaaaaggatcaaaccgataatgttctgtgtacgttgggataccctgagaaatgcaaatcaaaataaccaaaacgttttttcgtgacataacagaaggaaaagtttatactgcgaaaaaggataaagaaggtctatggatagaaaacgattggaatcgtgatatgtggctcaatctgacgaatgagtataacaaagaactaattgaatatgagatagtgaaatgaatctgtttatgactattggcgttcctggtagtggaaaaactacctgggcgcatgagaaagcccgtgaattgggtaatactgttacgatatctcgcgatgatctgcgtagctctttgtataatgctggtaagggtgccggcggatacaaatacaccaaagctaaagaagaaatgattgcggaaatgcaggatcacgttgttatctccactctgaaagatggtaaaaacgtgatcatacacaacacgcatctgaaagaaagtgataaaaatcactggcgtgaaattgcattggaacacaaagcagattttcatatcgaatactttgatgtgtccattgttgaactgcttcgccgtaaccacaaacgcggctgtgatgcattacccgtttcgcgtgtttgggaaatgtttaaccagtatcgtaagatccgtgggttcgtaccagcaatggaaattgtcaatccccacaatcagaaatgcgtgatctttgatgttgacggtacgctaacaaaagtagggcaacgtagcccgtatgactttaccaaagtgatcaatgatccgccaaacatcccgatccagcaactgtttcacctgtacaaaaatgcagggtataagtgtgttgttgtgtctgggcgtgaaggtaatccgcaatgcgcacatgatacatgggttagcctgttgagttatggcgttgaaccggatgaaatttttatgcgtcaagaaggtgataccaggacagattttgaagtaaaagaagaaattttgtttgacaagattttagataagtattatcctgttattgcagtggacgatagagacactccggtcgggatgtggcgagcaaacgggattccgtgcttacaagtcgattatggtgatttctgattgacatataatgtgggtatgttaaagtacccacacaaaagaggattatattatgaacgttattcgtgaagataaacacatcatggttgaacttggcgatcgcattcgcgtagaaaatctgggcgattttaaccaaaaagttcgtttgttgtgccaaaaaattgctaacaaaattcaggaacagggtaaagctccgggcgggtttgaagttagcgccactccggtttctcagtactcctatattgtgtatattcatgacgtggatactaacagcacccaatctttcgggctggtgttaaatcctattactggctacgttacatgggcggctgtattatgaaagtaaaagtaattgatagagcgatgatcacggatgaatctgtatacccagatcctcgttattatggcggtgttttcggatacatcaaaggaactgatattgatgtagtaacaagtccgatcgccgaatacgatatcaacaaagatcagacagaagttcgcgttactacaatcaacggttcagaatatatcgttgaagcgactcctgattttatcaaacagttactaaaggtgatgaaagatgcttgatcatcctggctctatgagcatggtgcttctggaagcattaaaagcatatgatattccttgtcatttcggtgaagtaactgttaatactatcattgacgaaatcgacaacccaaatactttcattgcttgtcttgttcgaaaattcacaagttgttttcgaccgagtccagaaaaagtagtaatcagttctgtttctgcacatcatcgagtgttagatgatggaaagattcaactttactggaaagttctttatcacgtggtgtatcatgaagattgatgatattatgtttatgcttagagcaataagtgcttctaagttctctcaatgtgtctctgttaatgttggtgctgcattgagaaatggtaacgggcgtgtgtttgtaggcgcaaataatacggttgatcctagtcatcgttgtacagatcagtgcaatcacttattagatgataatgggaaactgagtgaagaaaagcgccctgaacattcacaatggtcagatcgcaacgaagtacacgcagaaatgcgcgttattatgctggcggcgtctcatgaacaaatcaaagacgcaactttgtatacaactcattccccttgctcacaatgtgcgaaaaatatcgaattttgtgttgcaacaggtatgattaagcgtgtagtatatctacataaatacgatcgtggtggcatcgagtggatatggcgtctacagcaatacggtgccgaagtagtacaacttgatcccgaagaattgaataaacatttccggattaaataaccaatgagtaaatgtatgtctgaactgagtgtaaaagcatcctttgaatatgttctgattgaaaccaacgctaaagcggctggaactgaaattgtatcaccttctggtattgtgactggtgttcgtcaacacggcgaggaaccgatctacggcacagtgttatcatgtgggccggatgtaccggaagaatataaaaccctgcttatgggtaagcgcgtaccgcttcctcatgcacaaatggcaaacgtgccggatcctgaactgattgcaggaaaggcaacaaaagaagaagctcgcaagtatccggttaaatatgtaaccgcacactataaagcgattcaagcaatttacgaataagagatccaacatggctaaacaaattcaagcaatcatcgccgataccgtcgcaaaatctaaaaaacttttcgacaaaggcgacatcctcgaagcaccgacccgcatcgatgtaatgacttcaatgatcattgatgctcaccagggaaaactgaattcccgtgcttcggaagtaatggaatacatcgtacagttcgaggatgtatgcaaatacgccaaagctgttgatccggctgttcgcgaaatctaccgcaaacagttctaaaaataacggccccttagctcaataggtagagctaatcactcataatggttaggttcccggttcaagtcacgggaggggccaccaaacaaggcaaggcacttagagaagcgggaggaacagaatctgattctgttggttgtaggtgcaaatcctacccttgccaccaaattagggtgcgtagcgcaatgccgttaaatggttcggaatatgcaacctttctcacggagaaggctctgttggtatccggtaataggttccccggaatgcggggtgaagtaaagaaacttccagcccactaatttaatgaggtttatatgaaatttcgtgaaactgtgaaataccataatgcggtcgaacatacgcagatttttgttgatatgtctcctgcaaaattcaaagaacgctatggtatgacatttaatgaatggaaaaatggattacccgatggggattatcgaaaaaacttcaaattcagtgaatgttatgtagatgacgatccttacgatctggatatttttggtaaaacaacgcctctcattgagaattcgccagaacagctttacgaatcttgtattgactctgcatacgaaatttaaagagataacatgaaaaatttacaaaaactgtttgaaatgtctccggcaattagaaaaatcatcggagaaaatagcaatccaacgaatcgcaataaaaaattgatggaactttttgtaaaagagttcgatgattttgattctgaacttcataaagcgcttgaggcatattccaaacaagggttctttgcatcgccgcaagtaaatagcaagaaagagtatagcgaacgattctttgattgggagattgtcaatctcgttcgtagaacaaatatatctccgagcaatcaccaattgatttctcttgatacttcggtattctttatccagtatcttatcagtggtggtttcaaaaatcctgaaattccgtttacaaatgaagcggttagcagtgaatttgatgaatcatttgtatacatcaacacaaacaaataatcaaatggctatcttcggatagccttatttttggggtgtctatgcgctttttaaagtatgcaagttggatcgtactcgtccctcttgacattattactggagtattagcaattctgtttgccccgtttgttgtaccgttctacaacgagaaaacagggcatcttcctaaaggcttccggtggatggaaaccttcgataaccctattgatggtgatggtggacatatccgccgttgggcgtccatacgctatcatctgggggattttggggtgtacatgcaacgtgttggctggttgtggagaaacaaggcttataacttcgcatatcacgttttaggacgtgaagcgacaagcaaattcaactggaaaggcaacccaaaaacagaaggtgggccgaaccctgtaaatcatgggtatctgctcatgtggaacgaatcagcatggggtttgtacgtttacaaaccgtggctacggatccacaaagtgcaattctgtttgcgcgtttatgctggatggaaactgaaacaagaagttagcgacccagttaacctggatcgtgcaatgctggcgtttcatttcaacccgttcaggtattatgtaatcaagtaaaggtaatacaatgaaagcatttcaaattttagaaggtttgcatactggtacaatctatctggaagaaggtaacgacgttcggatcgtagtatcaaaaacattaactatggattctgtgatcggcaaagctcgcgttactccgtttgcaaagcgagagatcgagatcgaatatcagccaactgttaaagtggaaggtggacaacatctaaacgttaacgtgttgcgccgcgaaactctcctggatgctgttgaacatcctgaaaaatatccgcagttgacgatccgtgtatctggttatgcagtgcgttttaactcactgactcctgaacagcaacgcgatgttattgcccgtacttttacagagagtctataatggcaatttctgatattacgggttataaaccccatactgataaaaaagtagaaacagtaaaccgtatcaaagatgctgaaaatgcattaggtgcaatcctggaagatatcgaacagcgcctatcaaattcagatattgattcgctgatagatgaagaattagatgaggtgcttgaacgtatccatcaaattcaactggcgaaagaccgactgaaagaagcctctatgtgggcgtgtcgtgcggtgtttcagcctgacgaaaagtattaaaaatcaagccgttgccgaaaggtagcggcttttttcgtttttacataaaaagttgttgactcccttcgcacattcccttatagttaatcccgtagacaagaaaacacttttatgaggatgacattatgaaacgctcttacaacatgaatgaactggttttcttcaaaactcgtcgtgaagcacgtgcttacgttctggcggctggtaaaaatacttctgctgctatcgatatgggtactgataaagctgttggtgctcgttgggccgctgttatcgttatcgctgctccggttactccggttaaaactctggtacttggtgcgcgtcacgccgaaactcttaacactgctgcaagcggtaggggccacgaagttaaagtgttcaagaagcgttcttatctttcatgtgcaaggggttaactatggcacgattcatatataaagtggaatacgaaaatactgagttatctgatacctttttgaagatgattcgtgatcacgggcaacgtctggaaagagtaacgattgatactgcgtttgattgtcctgttgggttggttctaacattatcttgcagccccgcaaaagaatcagcccgtgtcgaaatgttacataaactaaatgcattttatgaaggtggtagtgtatggcgagtattgtaaaatttttcaccgactcagtgaaagaaattaaaagcgctctggaacaatggaacactcgttgtgatgtatccattaaatcagagtacgaaacaacttatgatcgttatgatccggcccgtggtttgcacaataacccccatgaggtggaagtgtgaaatactacggattcaaaacgagtcattttggtaaagcgtatcgcacagaaaacatcgatcgcaaacgtccgtactatgagcgggacgtaaacgcgctcgccaggaagggaagaaagagggtgaagatcgtggataactggaaaacatggatatcaattatcgttggtgttatcatcggacgcggtttgtatgatttaatcttttcaataggggttaactatggacattggttcgggtagtcagtacccatcatgcgcgttaagcaacttcgctccgcatccgtttacgtttgacggggtagaatgtgcatcaatggagggctttttgcaaagcctgaaatttagcaacccagatatgcaagcccatgtatgtactctggtaggcaaggccgcaaagttcaaaggcaaaaagaaaaaatggtggactaaccagaccttatactggaaaggtatccctattcatcgttcctctgaggcgtatcaaatcctgattgaaaacgcatataatgcgttattccttaatgaagggtttcgccgtgcgctggcagcaaccggaaaaagtaccttgacacattcaatgggaaagaataagatgaatgaaacggtgctcactgaacgtgagtttgtccgaaatttaacccgattgagagatctgttatgagtgaaaaagaaagagtagaatgcgtgtttctgttcaaaggcgcgattaatccattagcgttactgtatgcgcaacatgcattacgttcaacgttgattcagagtgttatctataaagcaggtgtgtattatgttaccatcggcgcaaataacatggttgttattgaatcctatgttaaggaatgtgcatcaaacggcgttgtctttgataaagtcgattttgatgcaggggtagatgctgtttatatgtataagggttgatatgagttacgtagtttatttcgattgttcggatctcgatccgttcgtgcttcaacaggcaaagaaatatcatcaagatgtcgttggcattggtgtaacaaatgatgatatgttgtgcatcgaatttgaatattatcggacatttgagcgtgaacaattcctgggtgaattgaatgcattcaaaagtacccttttctttgatcgttatgaggttatatcttgaaacctgttattcttaccgatattgacgggatcgccgtaaaatggcaaagcggcctcccgttctttttgtctaagcacaacatgcctactgatattgcattagaaatggttacagatgaaaaatttcgtgatatgaccgaaatcttcggatgtgatcagcagttggctaaaatccttatggaagaatacaataacagttctttcattcgttatctgaatgcgtatgatgatgcattgattgtgatcaaccgtctgaaaacgcagtatgatttcgttgccgttaccgctctgggaacaacaccaacggcaagccttaaccgaattgctaacctgaatactctttttccttctgcgtttaaagaggtgatggtcgtgggtcacggtgaaacaaaaactcatcgttacctggaagcaaaagcaaagtatggtaatcgtctggtttgctttgtcgatgatctcgcgataaacttaaacgaatgtcataacgtcattagtcaattgccgttattccatatgttacgtggtgaacgtgaagaaacaaatgcacctcaccagttagtaaaatcgtggtttgaaattgaagagaaactaaatgatcttgtcaatccttaatgaacttgcttctactctgaaaactaaagagaaagaagcaattttaaaacgtaatgcagataatgaattgttgaaagaagttttccgcattacgtatacaaaacagattatgttttatgtgcgtcaatttcctctggtagaagggaaaccaggcacaacaccgctttccgatgcaatcaaagcattactggaagatttagcaagccggaaatatacaggcaatgcagcgcgtgatcgtttactggatattgtatcatcagtgaacattaacgatcgtgaagtgctacgccgtatcattaaccgcgatctggaatgtggtgctggcacaaccttaccaaacagggtatggaagaaactcattcctgaacagcctcaatgcctcgctacgccgtttagtgaaaaggctttacgtcgcatcattttccctgcttactcgcagcttaaagccgatggtgcgcgttgcatggctgatttgctggaagcattaaaccgtaaggtatcgagagcgggtaacgagtacgaagggttaactcagcttgatatcgatctgaaaaagattcgcgattatctgggatatgatgtagttctggatggagaattgatttatgttccttccggaaccgtaccaacattacctgaacctgaaacagacatgcctttttctttatctgctttcatggacgatgatgataacgacattgcgttatttgcggaagaagttcgcaaagtatcgaccccagaagaagaacaggccgaagcaaaacgcgaagaagggaacgggatcgtaaacaaatctctgaaagggacgatcaccgaagaagaacagcgaaacattgtttatgttgtttgggatattattccatatgaggtgtattacggcgaagctgaaagtgttcagacttatgatgagcggtttagcctgttgcgtgatatcctcctggatctttctctgccttctgttcgtttgattcagtctaagctggttaataacattgcagaagcgaagcaggactataacaattaccgcaatgacggtaaagaaggttctattctcaaaaacagaaacttcaaatggaaagattcgcgagtagccgatcaggttaagctgaaaaacaaaaccccgattgaactacggatcattgatatctacgcgcacactaaagaagaccataaggtcggcgggtttgtggtggaagatttatccggaatggctcgaacgaataccggatctgggttaactgataccgattatcgttacgatgatgatggtattacccgtgtatacattccattagatgaacgtggtgaactggatcgcgaatacatcatggcgcataaagatgaatacattggggccattgtagaaatggaagttgacggcctccagaagtcgaaaacgcgtaagaaaggggaaccggaatacagtttcttccttcctattatcaagaagataagacgcgataagaccgaacccgacgatattcatgttgtctttgcagatctattttaataaaaagcccttgactccggtcgggggctttgttatattgggcctatcgaaacgtaaatcactaagagaatatattatgactagtagttatcagaaacacaaaacccttatggcaaacctgtccggtaaacatatcgacgaagtaaaatctctgctgacagtgaccgaaggttcccgattcgaaacaaatcacattatcaaaccttctgtgaagaaagtactgaaagtgatttaccgacatccggtgtatcagtgcgttcatatcatgaacagcaacgcatttattttcgtatataacgaatccgatgataagtgtgttggtattttccgaaaacctaactttgaatgcatgagcgaagcggctgttgcaaccccgatcgttgaagaatatccggattatgttcaacgcaacatgcgttatgtgcaatcccgacttgattatgcatacgatttcaattctgacgcggtagaagcgctggcggatatcctttgcaaaaaccagaaagatcgtcaaatgacaaaatatctgactgatccaacaccgccaacaattcgaatttctgttgaagttccgtttgaaaatcatttcatggcagttgaagcgcttgctaaacttggtttagaagtgaaaacagaagccgtttaatagcactttttgttaaagaagcctcttgcaatgcagggggcttttttgtatagtgtgttcattgaaacgaaacacggagataaacaaaatggctcacatgatgaagaaagcagaattccttaacatggttaaagattgcggattcgctcacttgaaaacttttcgtggtagtgtttacctctatgaccgcgaaatccaggttgccgaagtctattgcgcttctaacatgcaagaatctggcattatctctgcaatgaaccaatcaatcaaataccgtaaatggatgggctgattatgaaagttaacgtttcttatgaatctcgcgttaatggcgcacagtggcggaagctggataacggacaagtggaaaggcgcttacctggttccgatgagtggacacttgcggcagtgttggaaaccgaaatcgatctggcaacaaaagacggtattttgtttgaggtgaagaaatgatcacactcagtgattatcttctgtttactgctctttgggcggcttcgatattcataactgctttgatttacaataaacgtgatgattttgggttgtgggtattcattcacgggtttcctctttctatgtggatcgtgatgactgctgaaattctccattaatagcactttttgctaaaactatcttgttcttgtttggtatagtgtgttcatcgaaacgaaacagacaaaaggaacatcacatgaacttcatcgatatcaacaaagatttggaaggtaaaaacatcaaactcgttaaccgtgaaatgttagagagtcttggtaacggtggcgaaaaattcagtgaagaattctataacaatttatcgttgatgacggtcaagcgcgttgatgttcagggtggttctggttgggtttctgcaattccggtttcccttgtagatcaagcaacatatgacccagttgctgattcatgggatctggaaatgccgttggtattcgaagaagtcatgaagtgttacgaaatcgcataagggtattattatgaatagcggaaaattacaaatggaagttagcgaagaagaagttaaagagcggttatcggtagcaagaagattccttgaatctatcgaccctgataaacttggaaaatgccctgatacgatttgccttaattgtgggcgttctgttcttgttggtaaatgctgcgataatccaaatatagttgtgatggaaaaggaacaagtatcccccgaaacatgggatcagatccaggaaatcattaaaaaccctccagcgccaactaaaaaattacgtgaattgatgacaaggaaaatgaaatatgagcaaatttaaattgagtgcaaccgttcgccttattcgttggaatggtgaagagatccgttatgatgacccagaattcgcccatgaaattctttcgcatcgtttgggattgaaaaacgcgtcattggttcaaactgttaaaacatcagcagagccggaaatttggcgttgtgttattctggatctcgataacaacattgattatgatgatcctaagaactatccgcttctggaagcacaagttgagaatgctccagaagacagacagtgttttttggttgagttgccacgcgaacattacgaaaacatcataaaggcccgtaaaaaggtcaataacaatgttttcgatctccacctcggattgtttgaggattaagtactgctagttgtgttcgtcgtagcggcgctggtaggttcccccacctgtatacattcaagtgtttgcaggtggaaatcttttgatacgtctcgaacacattcaacgatcagatattttcctgcgtactcttccccaaatacctcaatgattgcccctaccttaacatctaaacgaccctgctttatatcgaatcggatccggcgttcatagctggataacaattgcattttagacgcctggaaaggtttaccttctgaatctgggttctgaaagttggtatcatagattgcattacggtttgtgaagatccatgtattctctgtgtctgtatcagccagtatatcaccgtacatctttttatcagtcaatgacagactaaagaaactggcgtctttaaacagcgttgtgttatccttatgggtaatgtactgggcttctgtgaatatgacagtatcgccaacaaacacgttatcaacgttaaatttgtatgctgggatcggtgtctgggccagaatgtcagttgaacttttaaggaaaataccggaaccatcttcccacagataacagaaatcagaagaaactacactttgcccgttgtccctgatataatcgaatatatcctgatatgtaccatttagacatccaggagggatacgtatgttaccgccgtcaacttcgggggtaagtagtttcattttgctatacagtgccgtcatacactctgtaatcgtctgtacggcgttgttactaaatgaacgggcaaacttacgtctgaacgttttatgcagcggagagaggttcatacgcagcacagagcggtttttatcgtcagtatctacgttagagtaaagcaatccgtaataatgttgttcctgtgtaccgttatactggaaagatacctgtatgatcggctggataagttgctgatagattaactgtgcgtcgtatatctgcatcagcgtttccgatgagccgttaatcatcgtcttttcactaaacgagacaagagcgggtagcaattcagtatatgcgttatcaatgtatttttcgtatgatgtatataatttaatcgatgtgactcgattgacgattttttcagccataaaaatccctcctaatatatcctatttactaaatagtaaataatgacccaggttcaatttgaggcaataatgaaaaataaaactcttgataaatttatgactacacggcttgaaatcaagaagactaacgttaaaaccgttcatcttccggatggaacagccattgagatccctaagatgtcgtatcgtcattttgtaaagattaagactctgaaagatgacccagttgcgatcatgcgattcatcattgatgacatcaaaccgcgtgaactaacagcagcggaaattgaatttgtgttgatccatatgtatgcacacaataacgctgattatgccaatacgcttaaagaaattgggctaaatcttgatgacctcaaaatctccgaaccttgctatgattttacgtttgacaatgtgcggttagtctttgacaaacccagcctgttaaatgctcaccttccgttcctcatcaaagaggcatatgttgacggtaagccagtagaattaactgaggataaacgagacgaattaattaattgcctgtaccgattcgaatatgatcaggtatcgcgtggtgtcctccaggaagtatacattattcatgaggggaaaaccatcaaagggcttaacatcattggtgaatgataatggctaactcttatttcaacgaagaacaaaagaaaaagtttctgaacagaaacagcaacaaacaaccagcggtcaccaaagtaacagcctcccttgatgctgaaagcgcccgtgacctaaaggaaatcaacgataacacccttgaaagtgcaatcaatactcttgatatcaaagaagggttgaaatcgttcgaagaaaaattccgtgacaaattcgcggggttcaaagaacaatacgaagaggataaaaaggaatcattagccgaacaactacctgatttcgtcggcccgatccgtcctatatccttaaccgatgataactcaaaaactgttgacaatacagtaaacgttaaccaaaatggtcagttcggtaagctggaagaaaacaccgaatctatttttcatgctattaacaaacttgttgatttatatgaaaatactgataagcataaaccgcttcctgaaccagtggaagaacctgatccgtatgtagacactaagaaaaaacgcatcattgatgatgaagacaaaagaagcaaaactctggatagcattgctaaaagcctggtttctattaaagggtttacatcgcagatccttagccgtttcattggttactctctggaagcaatggcaaagtttgctaaatggacgctccttattggttcgttaatctttacattcgatgtgttgcgcgtcacaatacgcaaatggttcgaagatatcctgaaagaaggggaatcctcaaagaaactatttggtacatatctgggtaacgtaaaggctatcgtaacaaagatcgaagaaggtttgaacaacttcaatatgaataacttaggagaatcactccgtgatttgttcgttgagcctatgaagttgttgggacaaactgtacaaacggcaatcactgagggtatcggtcgtcttattcaatcattgggtgaatcaactggcatagacagcattaccaatgccggacgcggaatgcagatcaccgctttacgtgataaacagaaatttggtcttgagttgaccaaagacgatattatcatgattaagaaacaagaactggcagaacaacaggaagcattggaaaaagaagataaagccattgcagcacgtcaggcgttgacgatcactcctagccagatccccaacggttcgatctacaaagtagctcctactgattatcaggaaagaaatcagaagattgtcgatgctgacaaagaacgtctggatactatgaaaaaacacaccgacgaattaaaaagtcaggtgaaattgattgaaggcagtgcagaagaagcacagaagttagccgatgaggaaaacaaacgcaacagagagcgtgttcgtcaggcacaaatcgaagcggatcgcctgaaacaagcgcgtaaggaaggcaaacaaccgccagaaggatccgagaaaaaaggtgatgatctgttgggtaaagcaaccaactatgctaactctgaaaatctggatgcagccgatatcaaatacattaacgatgaactgttggatcagcttgaaaaacgtcgtaatgaaggcaatctggacgatgtacagaaggatagaatctctgaccttatcgagcaattgcaaaacaagattgcagcccgtacagaatccagcgccccgatcgacgcacagccaccgttagcagcaaataaaccggatgctgataaagcaagcaacattcaggttaacaacaaaactgttaacaacaacgtaactcattcagtacaacgcacagagcataaaccgctcgtagcgctggcataaggaacatataatgaagttttctattattgatgacagtataaacactctcaaaaatattaaaaatcgcggtatcccctctgggggtgccgctatcacagaatcagtattaaagcaaactatcgttaccgccgaatttccggcccaacgtgcagcaggtatcgataacgcttataatgcttcaagtctgtataataacggccttctgttcactgcatatgattttaatggtgttggtagtaaagacaactatcgttcattacgtcaggcagcacagaacccaaaacaaatactatcatctgcgacgggtaatattaagtacaaacaagtgttgaatagttctattggtactatggaacctgtttgccagatcctgctaccgcgaagcctgaacgataacgaagtaaacagccaccgctatcaagatgcaaacgatagtttcttaaccaaagggttgagccgtgttgtttcaaacatggtatggggcgctgtagaatccgtttcaggcggtattatggcagaccgaagagaagcccttgatgttggtactaaagccgctttccagggttctgacaagcgaacaaagatgtattacaatacattcgtgatcgaaagccgtaatgatttgctggaactgattaaaatctactatctgtttactgttctgggatatggtacaacttctggcggtactgctaaagaggttgctgcattggttaaacagtattacggtgttctgggtgctaaaaccgctaacgcaattagcccttccagtaacccagtaacagcgtcagattttgataatagtctgggtaatgacgtggttgatttcatttcaaacgtagaggttattaaatcgcctcctgtctggtttattcgtgatttccagtctggggattccttgcgtttacctcattcaacctttgggccagcaggtattaccagtgttcgctttggtcgttctattgataatattgtaaatacattaagagaatcaccaaataccccgatctcacttgaggtcgaaattcaatttatggaactgatcgatatgcgtcaggattctatttttgatacaaattactaaggagatatgatgttttacaacgtagatgaatttttatcaggtatggctaatcgcgattttcagcgtagcaacctgtttagcgttgtatttgcaaccagccctgcatcacgtatccttgacaacacgatcggtagtattcgagatactttgattgatggatctattagttctatcaacgcaaacaacccgaacgaattcattaatgctatcactggcggtgtgagtaaattgtttagttacaccgtcgataaggcgattatgtcgctgaacaaaacaggatttagcaaaatcatcggggcaattagcccccgtttgattacttccctgtttggtgatagcatgtatggacaactgctatctgaattccgcgatgaaatgatgtataatatgggtttaagcattatgggagttaacctccctggtaaatccattgggtacgaatacgtttataatggtggcgtacctcaaatcagattcactcgccctgagaatggggaattgtcattgacgttccgcaccgattcagaagcccgtaacctgaaaatctttaacgaatggatttccgctattcgcgatgatgtaacaggacaatacgccttcattgatgaagtgacaagtactattcaggttaacttacacgatcgtgatggttcaccgcatacaacatacgtatttcagaagtgcttgcccgtcaaaatcagtaacagtgaattgagctatgagaacaacaacgaaatctggacatttactgttgattttgcctataaaacatcatgggttgttgaggctgataaagaaggctgggaagggttcaaacaatccgtagaggaaggtttagccattgcagcacgtaccgcaattacaggacaataaaggggctacggccccttttgaggatcttatgtttgatattattcgagtaacattaccatcagggatcaaacgattccctatgtttacagttaaagatcagtttaaattaatgctgacccgtattgatatggaaggtcggccccttaaagagcaacaggaaatactggatgaagtgctggatctgctttatcctgggtattccaaaacagaacaggaatacattttcagccgggtgtattgtggttcgttcggtaaaaacgttatcaaggttgtgataggcggtaaaggtgggggccactccgaagccttcatggtgattaatgatattcaactggaaaacgaatacaagctgaatgatgaaatcacattagggtttaacttcccccgtacacgcaatacaagcgaagagttgtttcttgaatgtatcagttatgtaatatacaacgaacagcgctatgaatggacatcactaaccgaagaaacgaaagagaatattcttgatatagtcgaacttgatgatgtcgaaaaaatagttactatgctaacgaaatcggttgatgtgtctatgcgcggtaaatcatttagtggtatgttaaccctgttcaagatcctgtttagtcgcggggatctggatgaatttgtgaagaccaactatctgctaaataaaaacggcctgaacctggaacctatcatgaatagtagcccaatggaaaggcaaatttatactgcattgcttgcagaagacttgaaaaaacaaggtgctgttaaatgagaaagcatgaatataaacacgttgagaaatataatgttgattatcgtcctctgacacatacagagtttacccccaatgcagattttatcaaaggggatgtttacctgtatcaaagagaatatcttttcattctggcacttctggaaagtaaaaatattgatacccgtcaactgttcatcaactgtgaagaatgtcaggaaagaatagaattccagcttaaacgcaatcaaatcatggttgaagatttcgacgataagctatacggcaatgacggaatcgcgctatctgttcaccctcgtaagactggtgatgaagagatccccgatcttatcgattacgtaatgatagacggcgaacagatcatgtggagtgattgtagcgacaaagataaagaaatggtgttggatgcaatcgactatgcaacctataaatcgatttctaccgccctggataagccagcagtggtcgcaaacattccggtaaggtgttcgtgtggacatagccatatcgtctctctgagaggcttacagcaatttttaaaggtggtctaaatgggtgtaaatctgaggttgctatatagcgatatagaacctaacatgcaacgagattggaataatgacgtagcggcttcaaaaggggccgcagcagtaagaaatagtttgattggtatcgtaaccacgatcaagggtacacgtccatttgatagtaactttggttgtgctattagtgatatgctgtttgagaacatgaaccctctgacagcggaatcaattagaacttctatcgtatctgcgatccggacatatgagcctagagtatataatctttctgttgaagttattccacagtatgatgataactcagtaacagtaaccatctattacagcatcattgatgacccggatgacgtagagcaaatcaaactacagctttccgcatcataacaaaaagccccttcctttcggttggggctttctcttagaattcaatgaatcccattagtgtttgatatcgcaattcaaacggggagatataactttgcatctggttttgatcggatacgatgtaataatacacctcatcattatcatcgtatagtgcttctttgatgatgcaatatcgatcggtttccacgttcacataaagagtatccatgtactttgtaactttggaaccctgtgaactgatctcgtgaatagcgttatctatgaacagtgacaatgcttgcatgaagttatcaaactcaccatattcacagcccataatagaaattgcagtgtattggtgccagcctttgattgtatctccacggcggatccatccgatttgtctacccccgatagatacacaccacactttaccaatagggctatagaaccgcacaacttcttttaataacagggacatgaccccgcattttgtataaggattcattttaacctcatttcatatcaagtagccatgaagggctagtttcaagagaaatcgcagtatattcgtattttacagtataacctttgaaaccgaaaggaataattgcattttcattgagatattttactttatgctttgcttcttcttcattcagagcagcacagactgttgtttgttcaacgttaccagcaggagaagtaaatttttcaatgatgatatatacgcagttcatcctattgtcctctttccattttttcaagtttcatcgtatccacttgcagttgaagtttaagaatacaacctttcgatatgttatacaagtagtcactaacgatttttgactttacctgatcgtaatcagaagataacgtaatccaatcatacatcgtttggtatgatggaagatacgtacattgttcttcttttgataacgctttaaatgattggtaatcggttggaggttccgaagcaattgcggttgtggtcataagactaagtgcaagtagtagatatttcataatgtattcctcattgttttcgatagaaccaatatagcaaaaagccccgaccgaagtcaagggctttttcattaatgcaagaaagatttcacgtactgttcgatcttttcacgacatgtatcaactgaggtgctttccgcaattacggcatgacataacgcctcgcctccgacccagaaactcatcatgtactgaatatcacgaccttccatttctttttgatgcgctttgattcgatcgaaagcgttttcgattgtttcagtagcagtaagcatttcggattccccgtcaacctccgccagttccccatcgatcatttcgctttcgacttcttcccagtatactatcgttatcatgcattaccccagtggttaaccgtcgtaatccccgccacaattcacatcgccttcaatgaacagttcgcggttatcacgtaataaattatactttctttcgagttcaggcccgaacgcgtcggcgtcttcataccagctataattgtatcttccgcattcatcatcatattctggttcatcgccgcgttcattgaagtgaacaattttgatatcgtccatccccagttctttcaacttatcccagatatacgaaatctcaacgctatgggaaccgaacgcttccagtgagatcgtaccgttgctatcgacttgaggaataccccacttcgaacgagtatcatcggtgatcatatctattaatgactcaatattattctcaccgtagatatcagcaacttccttttctttaccagggcgaacaagtccgatcccgataataaagctactgcttgagctattgctcacaaacccagaacgaattttcatcgcatcaccatattaccaatcatgaatagagggattagcgcaaagacgataccccatagaatgaccttatcttcacgacggtcacacccatgatagataacacctccagcgaaaatcaatacaacaactgaaacgaacgcgaataaagaaatcatttgcgggtatccattctcatagaaacttctttcaggatcttattcagatcgtgaagcgcatcttttacgttaccttcattataggtaagcatatcctggtacagccctttcaagcaacgattgataacatatgctttttcggaaggtaacattgtcccagaacgattataatctctgaaaatgtccatcatcgtgccgttgttgccaggtaatgacgggttgaagttaaccataccggacatcaaactatcaacatacacaacggttgtgttatcagaacgatacgcgccaccaactttaaaccagttgctgaacacatacggagattcccgcacttcgctcaaatcggttccgatttcatcgatgtttacacgaatgttgttaaaatacaccgattcatcaatagaaccaggacgccatacgatagcaccgttgttatttttgaatccgactacatcaacctgccagccgttatctgttaaccggacatcatcaacgacgatgaaatcaggtagctgtgaatgaaagccgatgttttcaggacgggaattacgaaacccatcacgattggagaaataaaggatgtcaccttgattcagttcgcatatattcataagatttttaaagtccaattcaagtaattccacaagtcacctcaaagccccctttcgggggcgagatctcattagagtttaacttctttttcttccagaacgattgtgcaatcaaatttcacatctttccagaattccgctgcaacgatatctgttgcggtaacgcttacgctggtttcttcaaaatccagatccgcaaaccatgcgtgtccgacgacaataccgtacattacacgactcaggcgattattaagggcgcgaacctctttaatagtttcctttgtctgcttatcaagatactcgatcaggtcattcttgtcaagcgcttcgatctctttagatacagtatcataagcccacagaatgatcaggtcgccattgttgagtttcttcttaccttcggcgcgttttgcaacggtagcagcaacagccggaagtgatgaaacgcctttgattttcacgttcagttctttcgacatgtaaacatcagtcgattctgtgcgctcaaccttcggagaaaagccgtaatcacggatcccttgctcagacaaccattcaccagccgcctcaccaaagcgctgtttaagcccttctgcgttgcgtaaaccaatcgcgttatcacggaagaacttcattaccttctgacggcctttcaggatttccagacggacgttatcagcaacaaattccttaccagaaataccgcgagtcatcgaacggttaaccagaggcagagaggtaaagtcaaccagtacagacatacggtcttcaccaattttagccagcggtttgatagtcagaccagaagcacgtaagtttttcagagtcgggatatcggtttccagcggaagtaccttaacgttaacgataccatctttaacaatggtaaagttacgcacttgtttggtttctactttttccggcaatccaaactctttttgtttgctttccggaatggttacgtaaccttgtagatccgtattgatagaaatgttcggacgggaactgttaccaaccaggtgtttcactgcaactttcgttgtggtttgggtaaattccggtttccatacttcatgcgctaccagttgcgccgccagtgctttacgttcttccggagtagaagcgtttgcaatctgttctgacagtttatccagtgtatcatcatctttctggacagtctgacggcctgtacgattgtacgcccagtgttcagaagacaggtcgatcactgtgtcggtttctgccagcagttcgagagcatcaaccagagtaaacgcgttttcatcaggaaccatgttgtaatcaacaccatccatcagacgtttagccggatcaacaaccgcttcggagatcatatctttagcgttggaataatcctgtttggtaaagcagttatcgtatgctttaatcagacgcacatcacccagctttttcagaactttccatgccagatctggattcatggtatgaagcgcatgatacagaaccacatacagaacctgttcaccttctgctgttgccggatcgaagccgtcaacgtcattgatcgcgttttcacccagcgcccaaatgtttttgatatgttccggaaccagaacaacaccatttgcagcattcaggacatacacacggccttcatccaggtagatcgcatgagttgcatcgccaactttgacttcaacacgtgcggaggtttgcgcggtaatgatttcatcaaatgcaggtacatacgcatcaaacccttcaacgaatttgtgtaatgcgttggttgcttccgccattttttccagcagaggacggtttacataataaccatattccaggaaagcaatgttgttaaacgtcaacggcagagtagaacacgctttcaggatgtcatcagtacgccagcagttatcataaccatcagtcaggaagatcagactgttcagattgccattatccgcttgcagatcggtagcgagttcaaccgccagttgcagaggttcaacgaagccagtacatccggtcggacgcagataacgatcgatagcatcattgattttgctcaggtcggatacagagctaaccttttcgcccacgaatacagaaccgaactgaccacggctggagaaatacagaatagatacggtatcatcctgcttaaccagcgttgccaggttgtttttcaggtgctgacgaatgcgcgggagttcgttatacatcgatccggatacgtcacaaacaaaaacgtggttagtcggggttggtttggctacggcgtttttgaattcaatgttagtgatcataattttctcatttataggtaaattttattaaaatttcgtttacttttttgctaatagtatctaatgcatcatcgcatccaaacttactactcaacaatgaaacaaaatcatccatcgttgttgtttgagactcgccaacgtcaaaagacagagcgtaggcaacaggatttttaatccttacgatttgaatagtatactcattcagatcgaaccgttcaagatattttcgcaaagaaaataaatcaatcggtactggtagagtttgactaaacgttatttcttcccccagttgataggggggcatttttacacagatttcgtattccatcagtgatgactcttcatagtgtgttccagattacggaaaatttgcccgtgttcaagctgtgattggaattctccgcattcatcagacataaatgaatacaccgttctgattgccaaatttagcgttgtactcttcatacaaccacatcttgatcagagcgtctttctcttctttttccagatcataccagtcacgcccatcataagcaagcgcaatttgaggattagaccgatatcgagtttctgcgctatcttcggtttcccattcataacgcttatcatcatagtatgattcgaaaccatcacccatatgaccacccaggtcgcggtgtacttgctgtacaacttcttccgctgtcgggcaagtcatccagctataaccacagttaggaacacaatcacccatcatttcgcggagattgttgatatcagtcggatccttcgggaaccgtacaataaagctacttgatgaactattgctcacaaaaccagaacggattttcatttgatttcctcaaattcaaaagcggtgaaatgttttctttcgtcatacccaacagtacaacgatgcgtttgctttccggtaaacccgtcaaacacagttacacaatagtaatgcaacgacggaagcggtgtatgtttaatgtatttgatcgcgacgttcaggtcaacagtagaacatacacaatcagacgtttgctcaaaacggtcatcaaaaatcaactcaatgctatagatgttcatctttcacttccttcatgtttttcataacctcttcaaaagttacggggatttcgttgtactgtagtgattcatcatcccatacatcgcgatgcccgaatgttgaactttttgcaatgattttttcattttcccatacatcaatagtaacatgatcaccaagataagggaaattaggaactttgttcagcgcatcaacgcagttttgcaatgattcagaaacatgggcaatttcagtgaattcataatcagcactataagaagctacgtaaatcatcaccaccccctaacgatgctaaccagcagtaaacccaggatccagaacacagcaaccgcacaaatacgggccattactacatttccgcgactagtccactccgcactaagaaacaagaggacaaaagttaacgcgtataaaaccatttcaataacttcggtaatcatataaacctcactgaacataacgattgtagttgatgtgccacatgagactagacacaacatcggaaacaatcaaaaggaacaaaccagcaatcattatcaaaaggataactaaccaagtggttccgatattttgttttaacgacaatagcaaacacataatactgacaaaagcaaggaaagaaataacaagcatcacgattgaaggggccataatataaacctcacgaaaaagccccaaaaggggcttgattaatcaatgtccgaacacaccacgaatagactctgcgaatgcatacagttcaggatttttagcttttactgtttcgatttgctccagaatgtaatctggcttgtatttcgcaccgaaccagcagtaagagaaagagcgatcccacatgaacacgttatagtattcaccgttacgaacttcaaccatcacataaccaggattagaacccagcgggtaatctttcagaagattgaatttcgcgccagcaccagtacatccgttaaacaggtcattaaaagtcatggtatgttccttttgtcagtttcgtttcaacaaggtcactatactattcttcgttagcctatgcaagcgcttttttgatttgttttgcaattgcttcgatcaccggaacagatacagagttaccagcttgtttgtacgcctgtgttttgctcttatgcatcttgaatgaatccggaaatccttgcaaccggaaacactcgcgaggtgataacattcgagggttcttaccttcctgtaataccagacattgaacaccatccttatagtattgggctgttatcgtcccagtacacacagaatcaactgtaacggcctgatagccaaaccccttgccgtttgccttgtttcgctctttacgctctctaaagcccttccaggcacgatctgatatggtgtattgatcattatccggttcgagaatgtcaccgacccttgttggggtacgtggaggaactggaaaactaaagaacaccggatcgcgaaagcagacaataaaaacacgctctcttcgttgaggcaatccaaaatcttttgtattcattacctgataatgaatatcgtatccttcgtcctgtaacagcctgtagatggttttaaacgtgtttcccttgtcatgtgttaatagctggggaacattctcaaagaacagcacagagggctttttagcccgtataatgcggagtatttcaaagatgatagtaccgcgaggatctaacatgccctgttttaaccctgctttactgaacgcctgacaaggaaaccccgccaacaggatatcgtgatcaggtacgtcgttttcatcaatggcgaatatatcaccctgaatattttcatcaccccagttatcagcatatgtttgttgtgcatgtttatcgatttcagacgttaaaaggcattcgaccccgccgaatgccttatcgaaaccgagcctcacgccaccaacaccagcgcaaaggtcaattattttcatacgtcgaaatcaacctcatcgattttgtatgattcttcgccaatatcagcccatagctgaatattcacactttttgcatcacgataaagagattgaccacaaagcccacctgtataacaagtttctgtaatctcgttaacttccaggcggaggctattgcgcataattttaacaacagccttttccattgccgaatctagggttttagtatcaccaaatactacatctttaacgttcaaaataacatcactcattatcgccactccgtttcaattccgtgtttgtatgcgtcaacgcccagaggggtgatcactaaacacatatcagtatttttcgttggtgaactaaacgccatagatgcgtagcctttttgaatcagggcatcacgccctgatttactgggtacatcgttgaaatctaaatccaacattttcgacgagtatccgtaaagtttacacagaacatcaatttcagcgccggacaatttcggatatgtcatttgtagtacctcacaacatgttcagaatacacacgttcaatgaaatcattccagaaatcgcgatcaacttctttcggataaccagatacagccgccagcttttcaacttcacacatcgttgattctagcgcctcttgtacggttgcgaaaggaacaccgccagctttaaccattttcaaaaatgcactatccggaagaggatatacaatatcaccttctttgaaaatctggatcaattgcataccaccgcgcaacgcatgagaaagagctttccagtcgatcccgttgttggcttctgcttgccgtgctcgttccccgtattcatcccagagtttatacacggattttttcatttccgctacggtgatcgtagactggaatttacgccccagaacttcataaaattcctgacaacctgatttcagtgttttgtctgtaacgaatcgacaaaactcgttggtcgggaatcggttagaaatctcaccaactttgatgcgcttgccgtaattagattcatccacgttacccagcaatgatgtaccataccagtaatcgggaatcatttgtaacacatcaacaacttcacgcagtgccgccaggcgagaacctttaacaccatacttcgccgcttgcttacgaacataaccaaacaggccagttaattccgtagtgtagaagcgcgaacggttagcgcggagatattgccagatatcagagttagcgatcagcttgctatcatctgcatgaagcatatcaatcgctacggtatcaccatcacatgcgaggctaataaacttttgcagactgtaaatctgacgatctacgtcattaacatcgttctttgagtttttatcaccagttgatgtatcgatagacttcttcgcagtgcctaacaggatttcgcgaggatgagggagatagatccctttgtagtctttatcgcttgttggtgtttccagtccgtacaggtgagaaccgaatacggtttccataatcattttcatcagaattcaacctttaatgtttttgcgatcccgcgcaattcagcggtagtaatatccggaatgtttgttccgtagctattcccaaatacttttttaatcttatcacacaaatcgcggcgatacaccatttctttgtattcttcttcgctacgatacagttgataacccatccacccctcagcccatccggaattgcgcttgattttaatattagtacaacaatcagacccatcttccggtcggaaagatgcatacaggtactgacgcgcaactttttgtacgtaaagggttttggggttgcgattttgtcgctggtcactacggatcccagcatcatacaacgtatcaccaactttcacatcaattaaatcaatcatttacgtctccagcaattagttttttcacagtaatgaacgggaacagacactcccaatgtttctttactgcttctgttgtatgttatcacaatgaatcgattttcgccacccttaacacactccagatccaaaatctcgcgggttcccttcgtgttcatgtctgcaacatagtattcttcgttgttgacaatcactatatccgacataatcaagcgaggtttcatgctgcatacacctctgattcatcaatccattccagattctgattgagtgattcaatcagttttttatcgcgtcgggaaataacaacggtagaacctttttctgccttcacgatgatatcaccagaagaggtaatgtattcaaccacataatcacggcgagggcttccgagtttatcaccaactttaacagcacgtctaaccgattcatgagatttttcggtgaacactaattcatcacctacgtgggtaacaataccatcaacagcagaacgagaattaacataaattttgctaatctccgccatgaaaacactatctctcagatatcgagcagtcactttatctaaacactgagaagatactttatctccgccaggatatactgagataatcattacatgaccctgaacacgggcggttcctactttatgcagaatgtaaaccattgaaccatcagaatctttagatacaaggatcacgctgaaagattctttgtgttgcttctgagtttctccacaggtaaaactcacgtccagaaaatcaccaactttaacagcacggggttttgctacttgttcacgagcactaataacagggatcataatcatttcctcacagtttcaaattcttcatcagatttccaatatacgttaaaattacgacaatcgtgttcggatgtcaacgtgtatttttcatttgttttttcgtcagtgataaccatagtttcattctcgatcgagttaacaccgtaaacgaaaacattctcaccacgtttgtttaaaaacgcatcacccttttcaatcaactgccaacaggtaacaggcaaaccacccggactaaccgggcgggtaacaagacaatagggatgtttaatcatttaaattcttccattgcataggaagtaagatctttgaaataccttgcggtgttgccttctgggttgtttgtaatctccatcaggataacagcactatcaactcctgctttcttagccatgaatgaaagggcttcggtagcaataatcgttgctttcataacatcagctttagaaacgttgattgtattcatttttcttccttttcattaatcacttggtatgtgtgtataatacaaaagccctcacgagaacgcaagggcttttttattaaattttgtataaatctggattcacaataaccgcacataaaagatcatctatatgtgcggcttcttgttctaaggtttgcttagatgaatgtgctttcaagcaacccccgtaaaggcgtttactatctggaaatgatcatcgaagaattccccttgtcgttgtacgacctcatgcataggtagccagaacgcgtctgctgcatcatcagcaccgcccatgatacgaggcaatgaaccatcgttattaggttcgagcttgatatactgtgctacagtcggttttgagaagtacaccgaacgtttcggatgatcgaacagcatcgaattacggatagaaccacgaataaccttttcaggtactttaattcgtacttcttccagcaattcacggatcgcgcaatcaaggaacgtttcattaccgtttttgtgtccacccggaagcgccaacgcatctttaccaggcgcaaacttacgacgaattactaacacgttgttattacatacgaccactgaatcagccgtgcaacagttcagagaatccggatacggatattttttgaacttgtcaatctctcgttgccagtgtgcatcttcatgggacaaacgctggaattcttttgtttgtgtccattcatcgataaaggaaaccgtagtgctaggcgcatattttaacaaatcttcgtcccagccttcatgatgttcccagataattttgcgtaaattggtcgaggacagatcctgatctccaaccttcacaggttcaaccggaatatgattccatccgaatgctttaagccagtaagaatctttgtctttttcgtacccgacgatcgcaattcgatcatttcgagtttcatcgattgccatacgaacacgggatttccatttttcctcgttatagaggtaatccggaatgtacgcgaatttgattctggctgcatcttcaacatcaagtttgcagatagaccagcgagtgatcattgcttgacgctgtttagcggtcaatgggtttaatgtgttcggatatgcataagcagaaccgatcagaatgtaaaccgtatcagcaacagcaagggcttcccttaccattttctcatgaccatagtgaaaaggttgaaaacgtccaattactacagctttatcatatttgtgtttcataacgtgctccacgtttaaaggttaatcataaaacagacgcaattatcaacacaccaaacaatccaccaacgaaaccaaagaatagtgaaatgagtatagtcagtacgatctgttttatgttcattatagtattctcgttttagatgtcaagcccccaaagagggggctttaaaacattatttacgagaatcgaaaatcactttaccagcataatccgaacccattacagtttgaggtacgccacctttatagcgggtagagtagttcatctgtacatccagttctttccagcggatcatttccggtgtaatggtgcgttgcagggcggcgttggcttctgcttctttcttcgctgcatacagacgggcatcagcatcacgttcgttagcgattgcagcgttttcacgcgcctgacgatcggcttccgcttgttttactgcttgtaatgaagtctgttctactttttgtagttcagctttagcagcgttaacctgttcttcgcggatcttcgtgttagttacctgttccatgataacttccggtagggtgatatcctgcaagaatacctgtttcacagtgtaaccgtaaggccgtgcataatcttctacttcctgctgaatcgcaatttgcagttggttttggatcttcgcatcaaacaggtcttgcgcttttggtacggatttaccaaattcgcgaacagtggaaagcagtttttcggttacatacttatccagtgcctgatcctgattacccgcgttgatacggttgatcggtgctttgctaccgtcgaattgcagcattacggtcatatccacagtggatttaaatttatcctgggacggaacctgtaatttgtcgaacttcatcgcgatgtctttggtactgaacgtatcaaacgttgccagcgggtttacaatgtggaaaccgggcagtacgggtttcggtgatactttacccatgaaggtttcagttttaaccgtaccgtcttgcacaatggtatacatgttaggcactaaccacagtgctgcgactacgcccagagcgatcagagaggttttcttcgggttgttcacgatagtgtttaagttcatcataatttccataagttgttgttcaattcgatagttattctatcatcacatttcacgctgtcaaactatttttaagaaagttttgtcagcttgtagattgtttgatagcacaagcccttaatctcgtccaggatgttcttcaaagaactatctactgattcgtagatctcgtttgcttcgttggctattttacggagatacgccaccgtgtcaagcacattttcggtttttagcacaggtttgtatcttcccgtgattcctatgtggatttcggtgaatttatcaaccaaatcctgcatatcttcgtaaaaaccctcatatgctttatgttgtgagtatgaacctgttgcaaaatgtgcgctatgcatataggtaacggacataaggcacatgccaataaaggcatctatcttgcttgagttctcagattctgtaatttgtttaaatgattgcatgatgatccctttatgaacgatggatacttgcaaactcatacgcgaccctaatccctagctttgcgcattcggattcagatcggcattgtttttggtgccattttcgttccatgtagttgtagaatagttcgcttgtatttacgctgggagggatcgttgtgatgtatacttgaagggccgcattgatataatcgtcaaattctttctgaaccggacggtcggcggcgtgtgttgtgggtgtcatcatcaacaatccgaacagcacagccattgatatgcgtttaatgttcataacaattactcttttactcatagacccactataggtctactcctgtatatatttatagcaaaaacgaggccgaagcctcgttataatatttttgctgtaaagtcaatcaagtaatttcataccaacacaaacttctttcgaaagcgcgtattttgttcacgttttctacgttttcgtcccaaccaatcaccccagctttcatacgtttcagttcctgacgtaaacgggtacgtacttttgaatcaattttctttactgcaatagaaagcattgcattcagatcgccatgagctttgttaccgtcgcgacacagattattatcaaatcgaatgtatgcacatcctgatttgtgtttccagttggttgagtaccaacgcaacccatccggatcaatgccatgttgagcataataacgagaatactcttttacttcttcgatcttttcgttagatgaacggtcacgaagaggattgtatttcttacggtaagtgcgactcataatgatctccttttgttttatgcttccactgtatcagggttgttctttagttgcaagtaatgttttcgacaaagtgaaacatatttgtcttcggccccgatctcaatctggtcgccgttagcaacaaatttgccatttgcatcaatacgggcaacggtagttgctttctttccacaatgacaaaccccccgcaactccctgatctcatcagcaagcgccagcaacatataagaaccttcaaacaagttcaactgaaaatcggttcttaatccatatgtcattacgggtatatctaattcgtcaactacccgacacagatccatgacatttttcctggaaaggaattgcgcttcatccacaaacacgcaagaaaccagtttctcgctgtcgctataaaaatgattgttgtgaacatcataatataagtccatatcaggtgtgatcatggtacatgttgcttccaacccaatacgcgaagagatactctgtttaccttctcgcgtatcaattgctggtttgtacatcaggatccgcataccgcgttcctggtagttgtatgcatcggtgagtaaacgagcactcttgccagcattcattgatgcataatgaaaatatagtttagccatttatcctctcaacaaaatctggggtattttggaatttcccttccccttcatggtttttgcatgttttatttgaacagtagatccaccaatcccactcatcataagggggtttggtaatgttcattacacaaattaaagggaaatgacaatcccgacagcgaacattttctataatgtttgcgttagccatgtgtataaccgcccatttcgctatcttgtgcttgatggatatcaagataccacatattgattttgcttttcagttcgtccatttccttactcagacaattgtcaacgatacatagaacattaacagtttctttacgctgcataatgttgatgttattcgctttcatcgcttgcgccaatgcattacaggttttaaccagtgcggcgcgttgtcctttgattacggcgatccgtttgttcgctttcttaatctcccgacctgctttgataggatccatcatgattaattcgccttacgaggatcgaaatgaacgacaatgatcgggtaatcaccagtcacctcattaataatgcgcttaatgagttcccagtcgcccccagcgaggccagcaccgattaaaggtgtgatgataggctttccagtcttaacggcgtcagcaagccctacagcctgtttaaacgcattaccgattgcatcataatcgacacgcggcccaggtgtccagaaatcatattgggtgtatgcattgaaaacaatattgcctttttcgccaatgtaaacagaacaagttccgagcttatcacgggaaccttttaacgtattggcatcaacttgaaatgcaccaggaatacgatcgcggatttcgcgagcaataccagcgcccatattgcaatagcagttgcatccgtggatcaaatggccttcaccattcagatacatattgacagcattacctttcacttctttaatgatcatttttatttttccgatatagtagggccacaacaaggcccatcaaaatcacaaggatccacaatacagtgaattgaacccctacgctcattttctcgctttccgttcacggcggcgatcttcttgatgacacatatataaaacaccaccaaaaattataaaaccgataacaacgcctataaagtatccagcactaaacatagtcatcatccccgcaatagtaacaaggcccagtactctcatgtttaccagcattgtacgccaggaaaactacaaccgctgccataataataaaaatccagatagccattagtaaagccctataccagcattgaattcatcaaccaaataagtgcggaacttttcacaccgttccttatttggcgcttgtttgcatagattcatcattggttcggactgcaaaaactctttttgtttcagcaacttaccgcgtttatacaggtgagcgttttcctctccccacatataagcaacatctaactgttctgcgatcacttgcttacatactgcgacatctttgatatcgcgattgttgcataactcatccaggcgagcatcacccgcgtgagcaaatccagcaaccagagttaaaagcagtgctaactttttcatgatgattccttattcatcctcttcgataggggtataataatgcgcattgcagatatacgcaagaacttttttcagagacatatccgagaacgtcggatcctgatttcgtctcatcccactaccagtttcaacagcccaacgtttgttagctggattgtatgtcagccagtaacaatcccattcagacagagtatgttcgaacagatcgaaacgcttacgcccgtttgcttgcggcctgacaaaaggttcaaccatttctaaagcggttaaaactcgattgatgtttgaaccgtcttcatccatcgcgatccgcaaacagtattggttaatgtccggatccataccatcgatacccagaccgatagattcgaaaaattttgttgccgcgtgataagacacactggaagaacgatattccaacatcacggggatcttttccccgtccttgacgttgttaatgatatcctgatcgatgagttcaatcaggtctcttttctctttaatcaacgtggaaatttcttcttgcagtggggctatctgtgcatgaagttcttttatccgttgatcaattacggtcacttcgaacgctaagtttctcattgtacccattccccgtttttgtcaatgtacatgatccaatcagcaaccgcccaatgggaagtattgcctttcggagtcgccacgatgtaggaaccagctttaaacagtacgcgtttagtttcgttcaggatcaggtcgctcataatgtattcctcatttaaccaaagtgaatcgtgattcataagcatcgttcgggcgctcatacacagtatccgaacttgtaatgacagtgtacacggtttctttcacaagatccatgattttctgtgattctccccagacattgatactaaaatacatcccatttttaggaataggattgtattccatatcataatacatatccatgagttcacaaatgaacaggcggcgctgttcgttatcatatgtgaaataaatgttaaaacaatcgagagatttactcaaagtaatctctttgataacgatgttgtcttgtttgctaaaatgttcgcggattgcttgcacacaacgcaacaggttagggtaatcatatttttgtgaaacaatgacttgatgtgaaacgctcataatgtattcctctcaattagatgcactcataataaaaaagcccccgaccgaagtcaagggctttttgtcaaatgatttgtttttcttctaacagcttcgcggttgtattaaccatacgagcataatcacgggcttctttctttgtatacttgaaaccagcgttatagctcgccagcgcctttttcaagtcgcctttgtggtaatcaagccagtactccagttcatagatcgcatacttcgatccaccttgaagagtttcgagctttttgattactacgcgtttaggatatgacttatccattcgtgcgctggcgctacttgcggtaacttgccagcatccataagcgtgatggccttttttacctttaccgacattctcacatgcgcgagactcgatccaggcaatagccgctaaatgatagcctaaacgtttagccttatctttttctacaggttttgcagtcttcaaatcatagttgtgtccaactcgataagcatactccaaaacctctttctgcttcggtgtaatgttatccaaatccttgatgtaggatggagaatttttgtttgccggaggctttacagtagccttttgtaaaggcaattgatgagtaggcaaatccgcaatgaaatcccctagcggatccgtcgcagcgttgccagaaaaagagcacaagaaaatgctggcagcaataataattttcttcattttaatacctatgttgcaaaaagaggggcaataatacaccccactttatatttatgcaactattttagatagttttcgcgtcacgtagtttatcggcgataaactcagcaatgttataatttgaaatagccttgttaggatcgtatagtgcaatgatttcatctaacgatacaataacggcatgtttaaagtagacgctccagctagtagtaaggatttcgctgtgatcaaatccacaatcagggctgaacaaagcgcggtatttgtatccactgtatctcgtcagacgattcgtgctgtgcgcatcactggtgatcagaaaagtcccctggtgagtttcaacaacgaaaaagtatccgaggcgttctttgttgtccagcatcttttcaaacttgcgatcggtttcttcgcgaacaatacgagaagtcagcatttccaacactttatcgtattcgggccaatcattctcgatcacgattgcatcaaacggtttcttaccattaatcccgcgtccgatttcgattttcgtgcaaatttcgttgaacgttttcaaatcttctggtgtcagttctttaagatcgctcaattttgctacataataacgtttttctagtttcattttacaacaacctcatttttacaatatacacattcaataaaattgatctttctcatgttgaagaaatatgaaccctccgaagatttttccttgtgttttacatcttccgcgtcatatttcatggtagtatcgcaacagttgcaagtaacaatacgggattttgcatttatgatctcgatcatgatatacctcaactcaaaaatagtttcactgagttaccacatttaggacatatgataaattttttcacaacataatcagcagcagagaaaaatccattgtaaatcgcttctctcttttgctgtatatcagatagttcatattctaacccacttttacaacaactgcaaacagtaattagttttgggctatggatgacagtaatcatatacacctcacaaaaaagggggctttcgcccccatcattagaaattgtcttcgacaaacgccgcgagacgggaacgatacactgtatcaagaatgatatggcttgagtgttcgtattctttcagcttttcaacagcccatacaaacccgttgtttacggcagtgtttcgagggttgtcgatctgcttaatgttcccgcatagtatcagaagtgtgttctctccgcaacgagaaatgatagatttaatttcgtggttgctaaggttttgacattcatcaacaatcagcacagaacctttgcccggatccggatgtccgatactgcgaccacggaagtaatacaggctagggaattgcacaacccctttttcaatcaaaccttcaatgtatttttcagattccggattatccttaaacagaatgttcaggctagtaatacaaggttcgatagaaggccggagtttttcgcccaatgtaccaggaaggaagccgatttcacttgataacgggctatctgacttcacatacatcaagttagcgtaatgtccactattaaccaggtgcatagcaccggaaacagcaagcattgttttaccagaaccagcgcctcccataatggtagcaacatcgatttcattgctcataatggattcgacaaaagccgcttgcagagaatcacggggctggatagctttcatgagtttgcgtttcatagcctgttcgtgcttaacaggtaagacattcaagcaaatctcatcagcagtcaccacacgcccgactaactcaccatttgaggtaatgtactggttaggataaaaatcttcgtcaggaagcgaactgtaagtgatttgggctacattatccgtatatcccaacacttccacggtatcccagaaatcagggatctctacgtaaccggaatacaacacatcgctatcttttaacgtatcgtcgccagtatactgttctaccttacacccacgggacattgcgatcagcaacatcataatatcgcgagtaactaaggttgcatcctgctgcatacaagtttcaatgattcgttcgtcttgcttgtcaagagcaaacgttttgtttccgacataatcaaccactttaagggtgatagtgtcagacagtgctgggtttgtcaggtttaaaggaatacctgatttcgtaatcgcatcatatgactgaccgaaaataacttttgacagaagccggatcgccaatcgtgcttcgtgcgctgttcgttctttcgttttcaggtgatctaattcacccatagtagcagaggtaataatgatttctgtaccaggttgagtgaatgaatagattgaataggggttcgagactaaaacgttagtgtctaaaacatatttcatagaaaattcctgatttgattacggggtacgcggattcgcaccccgcgtactgcaatcacatacccagcgaaattacgtgaatatatgctaatggatgtttcttttgtacacaatgcatgagtgtattatacacaatgtccatgcgttcattgcgcgtaagatcacactcatcaaaaataaggtttattgcctggtgctctattcgacgtccacggaaatgattaagaattgcccctttactggtcaatacatcacatccggtagcaccatttagctgtttggcgtcttgtgctgcatttaacgtatgcgctacgtaaatgttaagggaactatgggaacgtttcataaaatcaaacgcgcctttagtcttttgcgtttctctgcccagatccagcctggtttcgaataccataaaatcgttagggccgtaattatgcgttggttcttccaactctcgcataagatgcatcttacgacattcttcaattgtctttacataaaattcactattcatgttttacctttaaggggccaaagcccctttgttacgctaattccacatgcggggcatcaatgaattttgtttcgatcggaaggttcggatcatttttccagttgataccaaaacgcagtttaacacccagttcatcacctgcttgtttaacagcattcaggacaggcaaccacactttagggtttgtttgccagccttgaggcaacacgctaggatacagatccacagcatcacccgtgatgtgttttgagttcattgtttgagatacacccttacggacgttctcgcgctgttgttctacagtacgcagaccttcacgtacaccaaaatcaacaggagacagttgcagagcgcgttctacaactttcaccagttgaggtttaacacctttaaggttgttaaggcttttttgactgaatttaaacataaatcacctcttgtaaaaataccctgtttgggtacacagggtatttatggtttaagaggttcgatacttaataatcgtaaagatcaccgaaacattcttcatattcgcgtttacgtttaatttgctcgtttctgcgctctttcatatcgggaggaagacggttttcattgacttcatcaatgtaagcctgtgcatcctcttttgttagaaagaatgcatggaaattgtacccgttgtacccgttcatactacgatcttcaagagagaattctgtgtgacaatcccagtctttgtacagggtaatacatttagcaaacagcccaataccgcgatgaatgtatgggaatccagtaacaatcatcttgctacccatttccgcattttctccgttcacacagaatacttcatacatgatcgcgcctggtttaacatctttcttaacagcacgtttttcaaaagcacttttcataatatattcctctcaattggtgtaactacagattactagtttagtttctgaatgtcaacaaggtttatcgttttttgacggaaaagttagagtgaacaaacgatcatgaaggttgtcgatccgttcacaagcctgtttcagtatggttttatcaccatcatttgttgtttcaatgcatccaagttcatcggcgtcaatgttcactacatcgctcatcaatgaagcaaacacgttagcatcaggatgtaacagttcttcgatttcggccttcatgccgtcgtgttcagaaaggatatcaataatatcgcgggttaaatctccctggtacgggaaccctgtttctaaatgattaatgatcctttgtgctttcgtaatcataattttacctacaaaaaagcccctttcggggctagttaattagagttcacagcaacggcacacaccgtattttgtaaatggagcatcaccgctaacgtaggcccagaaatcacatgcttcttcggcagtatcgaagattgcagcatcatagaacccgtgggcttcgttaccgttctcatcgatgaaaaccggagtccagatattaggattgaagcaatcgtcaacaacaacccaaccttctttagctttcattgcttctttgttggcttcgatgtgagctaagatttcgttcatgatgtccatttttctctcctaaagtgtgtttcgtttcgacatggctatagtctcataaccccgtatctacgtcaacacttatttgaagcgaattgtgctatttttgaaaaatagtccagagcacacagcaccttcaattttcacccctgtagggcttttagcaacgaaccctgttgcgtaggtgtctttctcatcacatgcgaaccagtcgtggcctgtgtacgtgatatcgctaaacccgttagcagtcagaatacgttcggcttctttctcatcggtgcatccggattgtgctaaaacgacaataacgactaacaccaaagcaataatatatttcatgttaaactctttttaagttggttttactggcttcaatccagtacacgggatcagaatagttaccgcacatacccagtaacacagttgtacatcctaaatgatcggaaggtctcaatccatcaggatgaaaaggcaattcgttaacaccgatactggtagcaaaaagagcacctccagtactgtaaaatgttttgatatgatcgtatgcatcatcaggccactgaaaacgataagttttattgtcaatggttactgtatacatatcatattccgtaaacaacggatcttttccttgtgttgccccatacagagcaccgcgccactcaaccagatttgcttcaatgtcgcttacacaaatttcgttacccatacgcaaatcatgaaggatcccttcaatggtacgaatagccccgctaagttcattagttaacatatagtttccttttaaagtctttccagcatatcaggcccgaatgccataacaaaagaacccctcaacgcttgccactttttatggaggcgcttaggtacgtttacttgcaaacgatccattttacgaataagttctaatgcattgttgcttgtgatttcattgtaacctggatttattgttgcgatcccatatctaaacgccattccagcttcggtatttccaacaaaaacagaggctttcatttcatcaaaagattgttcaaacatgagatcagttcctttaaattggtttaatggttttcaggtgtagtttagcataagaagaaccaaatgagttaccattatgatcaaacttatgttcttcactcttccagtatttccccgatttcatcaagggtatacgcttcttacctgctgttatcgtttcaaccattccggtatgagtgaatgtcatgatataccctcttctttcagcacttcccagatcagcttatcaaggtgcatcaggttccacataacagagtcatacgaacccagcgagcgggagtaaatcactccccatgaacgatagcttttctggaatccttctgcactatctgtatcatacggcatatcatcaccggacgcaatcaaaagtttaaggatcatcagactgttcagaagttttgaactagcgtcttgtgcttgtacttttgcacaataattttcaataatcgcttttgcctttggttcggtgatgcgtccatttttgcatcgctctttgtacacatacataagttcatcgattatttcttgcatacattatttccttctgttctgtgctcatgccatacaactgagagcgtatacggtcttgtatacgacgcgtttcgttttgcatcagttggtttgaaagaatcaaatcgaccaccgcgccgcgaactttccatagataatcaatcatcgccatatcttcatcagtatggaaacccttcgcatcacattcatagataatgctttgcctttccgccattgccatttctgctgtcgccggagtagccagagaatattcatacttctcgatcaatgattccagtgtacgtggttttacgggaatgtcaacagttattggattgatttttatcatttcaattccaccgcgtatacatccaattcaggggctttgtgtacgcgcatatctttaccacatacagcataagccggacagttacggcaaccgttatgatccttgttaccgatcaattcctgacggaatttcttagttttaggatgttcccagatatctttgataaagtcgctggcttccaggacgttaagcccttctgaccatccaccctcgacccaacgttcggtaaaggaacaggggaagaattcacccttttcattgatgtacgaactaaacatagtagcttcgcaatcttccgcatactgtttgtactgttcaaaattttcatgtccttccatagcctctacaaaggccggagcggaacaggaatcaaaaccgaaccctacaccagattcaaggcaatactctaccagagctttatactgctcgcgtgtaacggtatcccagttcttcccacgacctttttgtttcagacccaggaatacgatcgcgttaacttgtttcaagcgcggatcattctttacagcatcaaccacgttaaacgcgtcatcataggttttagagctaaccatgaaatgaaggttgatttgctgttgtccggcttctgcaagattagccactgaattaaacgctacatcgaatccagcatgtttgtatactgataccgcaacagccccagcaacagccgctaaacgcgctgcaacgtcttttgatacatcagcaatggtaaggtttggtacaatgcctttagaacgcgcataggccatcatatcaaacatatcagggtttgtttgtccctgtgcatcagcaccgagggcgcattgtgttaaccagggcattttatcaatgatagatttgaatgtatcaagatccatattgaagccgttagggttattagacttgtagcagaaaccgcaaagtttaccagcagggccattgcatttagttgtgatctcgatatcgagaatttcggggaatggggcataggtaggatcagtttcgaacgatgttccccagcgagcaaactcaccagttttaacgttgaaattgtagttataccacttagagcgagcgtaacggatatcaccatcttgatagatgaacagggtaggagctttcagaacagtttgtgcgttattcataatataattctcaaaatctaacatgggattggaagacagcgcgagcgagactttcattatcaaacggtattgattggtgttgtcctttgctatcaatgttaacgcgccaaaattcactagaacaattttcagtggagtagttcaacagcgttaccgttttattcttttccaaaaatacgcgtttgtcaatctctgttttgattacgtgttccatcattttacccaccgttgtttgcgttcgtcagccagttcttttttgtacaccttgatgtattcgccgttcaaggcacggagatttgaaaatacacgattgaaaagatttttcttttctttgtatgccggagacatacggatcgattcaatagtcatacccatttcatttttaggatacgctcgtaactctgcgccgatctcatcaatccatttttggtacaaatcacgcttttctttgtactgctcaaaagtcaacatataatttcctcacatttcgttgggttcaatataaccctataaagaaccaaacgcaagagttatttgtacttcataaagaatttaactgcttcttccggtgtcatatcgtcagagaacaacccgaagaaagtacgatgatgatctttgtacgaaatgttaagtgggttcaataaacatctaacctcttcaacccattgatagtattttttgctgaacggttgatctctcattattcatccccttgcgcgtagtattcacacactgcatcttctggggtgcaaccgtccgagtaaagagcatacatcagatcttcgtcataatcagaagaacccagcatatgttgaacagagcgtttccatttgttgtaatctttttcgccctgggtttcgctgttttctgatttaagcatttcgtacatgttcataggaatctcccgtaatcggttgcagcatcttccggatccgcatcaagttcatatagttcgcgagctagtgcgctgggtttaatatcgcgccctaagtgggcgctaacattacgtaaccatttcatatagggttcgaatttgttcattttatacgtaccgcgttaaaagcctggttccggagatcatacgctttttcaagctgttctgtagtgaacagaggactatcagagtttactgtgaaactgcaaatggttttgttgtcggcgtttacttcttcaacaacgatttcataaccccagatcccgctgtactcacatttcacgttccggtacttgatgtaaactgctgcaacatcttcttttttgtagttccggcttttgtagataatttccatgatatcctccttcgtttcgatgtgtgtataataacagatcggggttatcgattttagcaattcgtgctaattatgccattttcttagcgattttccaggcggctttgaatgccggaacatcttcaatatcaacccagaaaccagcaccaaaaccatcatcgtagcaagggcaaccgtcgcagtaattttcccaggtcatcacttcaccaccaacagaagcaccagtttccatagcgcgtaacgcatcttcaactttttccagtttttctgcgttgttgtcataaatgatgaagtaccattttccgttgtattcgttacccagtttgattgcttcgcgaacaagtttcatgatgatttcctttttgtctgtttcgtttcgatgtatgtaagataccacaaccagattttaatgcaacatttattttgcttcgagttcgatatttttccatgttttcatcggaacccctatcgcatcccaaaacttaacatcttctgctgcaatcagagtaaagaagactccagttttccagtatttcccgtttctgatttcgtttgcgatctcgttcaactggtcgcaaaaatgttcagtccaactaacatcaccatcccagcgagaacgtggattgtatagagaaaatatgaaactatcaatataagaagattttccggtagagactcccatcaaaacagccaggattgtgcgaaccgcatataaattctgaacctcaacacttctcgttttaatagtcatttcatgattcctctgttttgtttcgatgaatgcaatataacaaaacccctcaccattggcaaggggtttttgcaaaaattatcgtttgattggggtattatctataaccctttgaatttccgaacgcatcgtagaatactgacacaattcggtaagcgcccgatccaggtgcatcatagcataagaaaactcttttccgcatttgtcacatcgagcgtataaatgtaaatggatgcgcccgatcccatctacctgactatatttctggaatatgtaaggatctgcacctcgatagccagttgcttgatgcttacactctcgtttgaaccatgacattaataatatccttgtacgttgaagcgatcacataacaattttcttgtttggttagtatcgctttggatagaatgcaacatagcgctgatcatgtttaggttattttgcatcatttccgcgctcatgagaacttccatacgcgcacgtaagcgtttattttcttcttccaactcaaccatacggtcatatgctttgatgcgctctaagggcatatcaggacgctctttgagtacgcgagcacgttcaacctcacaagcatgatttgctttccagtggttcgattccgcttcaaatttattaaggcggcggatctcttcaaccagctttttgatcatgtgtggatccatcatgtcgatgaatttcatcaagcaattggattttgtttggttgtcagcaacagaccaagacgaattatacgtaaccgtaaacgtgcggcccatttcatcaacaaccccgatcttgttatcatcggtgattgtagccgcccatttctccctcatggctgtacaggttccgctggcgacactatgcaacttgtttaatgttgcgtcatcaaacacaatttcatcactcatgtatgcctcacatagatttcaaaatacgcagaagtgcgttagtaaagatatcaggaacacaaccaccaaacaacttatgattcatcagcgctaatttcatgctgtgattttcagtatatcgcccgttatggatcccccaggcaacgacattaccaggttcatgaataactaagttagtgagagtaacggtcatgcgctctttatcattgatagagaatgaatagcagtaaccggatccgatgtcgccgtaaaggttaaggtctttcaatttcccttgctcatgcaagcgtttcatatgaactgcacatgcatgattaatagtcatttcgtcatccctagcccagtcatcaataccagaggtataacgaatattgaagtagttagtcagttcatttgatacgctcattagaaacctcacttttataaaattctttaccagacccattacagctactgcatttgggggaacggttgttatcataccgccccgaaccgttacatgcaacacatttccttaatttccagccatacacgaacctcatgtaataatcggttcgtgcggccttgcgttcgtggaaattcatactttgtaaacctgaaccaaccacatttcgatgttaggcgcgtaagtaacgtttaccatcggcatagtgcggtatttgtaagcggctttgtacgcgtcgagttcagtcggaacacagaaagaaaaaccgttatcatagcgttctgcgttagaaacttcacaaccaactacagcggcaatgtttttattcatgttcatgatattttcctttctctgtttcgtttcgatgtgtgtaatataacaaagcccctgcactaatgcaagggctttttgattattttggtaatttttcgatggttgctttcaactcattgattttattaaagagttcatcgctatatttcatcaactcactacggcgtttttcggcccacttgatcaggaattcatgagaatctacaccatacgtgtaaccttctgcactcagttgaatacgagcacgggaaccataatcaacagaactttgttcaatgagaaacttaaccgcatcaagcagggctaaatcttcatgacttaccaatattccttctgcctttggaagatccacaacttcatcctggatgagttcacggcgggttgtttcttccagtgtttcatgattctggatcatcgtttcgaccggatcctttgccacgactggtttattttcacctacttcttccaaaaacatcaacatccatccaggaattttagtccggaaagaactttgtacttcactggtgcatgaatttcccagaatgtggatcgcgttaccatgcatatcaactttattgatatagataacgttctgctgttcctgtcggttgctaccataagaaaggaagcggcgtaacgatgtgttatgaccatacttccctaaatcgatttcagccaggcaatcaatgatcccacggttagaaaccttgtaacgcttaccctgtttgaaaaataacgattcttccaggtgagtaggggtaaactcttcataaagaacatagaattctttaggaattttgcgctgaaccagactcagtttacaattattagaaggaacaataacagcgtgaatgtttccttctgcgtcacacatagcttgcattacttgcggatagtaaagatggtctttcttgcaagtatagctatggatacgactctgccgttttttgaagtaccatttaccagtttcaaaaggcgctgttgtaaaattcattttgcattctcatacatagttaaaattgcttgcatatgttccggtgattgtggaacccctgcaaagttcactttcaaaaagaaattcaaccgatcttttatgttgcactcatcgagtccaagcgctggtaatgaaatgttttcaaaagcacgttgttcatgtctttccatttcaccccaaaacaaacgggaaccgttaggcatcggtattccaatttcattgttccagaatttcatgatagttgtcaagcgttgttttccgtcgatgacttctacccatcgagattcgttgaattcactatcaaccgcgatcgcaatgataccacaaggaaacccagtaatcaaagttttcatgaaagcatcttgctctttctgcttccacacgtagggccgctgataggacggattcagatccagatcgttgttcttgaaccagtgaatgtaactaccaaccatgatcgcatgatcgcgactttggaaagtttttaactcacgaatacggtttcttacaatttcatcagccattataaaatcaccatccagtatataatcgtaatcataaccgctacggtgaaactcattgcagcatacacccgcgcattatgaacctgtgttttcaattccgcgatctcttgatccttttcgctttcaaactcttcgcgagtaccataatacccaggatcgttggcagttgccaatctaaccgcatctttttcaaccagcgttgcgtaaccgctttttatctgtgtcgctccgtaccatccaccacgatcgttgttaatgatcaggtgatcgcctttttcgttatgttttgactcaccaattacaataacccgtttaccattcataatatgatcctaaaaggggccgaaacccctattttgcgttcttctgtagataatctaacagatttccgctttggtgtaaatctaaaactttagaaaacttctctgcgtttctttcgtttgtgagttcgtcgaaatgccatacaccatcatcagctattaacgcgccaggtgatgaacctgtttctacatcacgggaaagcgcaagccccagagggtgtaagatttcgcggttaatgcgccaaacaaggcccatttcagatagagtattaaaatcgacgtatttcatattatgcctttggtttcacaccgtaggccaacataccgaaacggtgatcgttgtctgcatctttaaacagaacttcgttaccatcaatgcagataacctttgcttccggatcgatgtatggaagcaaccacaaagggatcaggcgtaggccgctatgttcatcccagcgactgaaattaagttcttccagttcatcaagggaaagctcattaggatcgatataacggaaccatttggtatttttgaggcgttcggggaatgttacgatttcttcatagccgaattcagcactccatgaagagtaaacagtgacttcggatgctttggttaaaacagcatcgcgaattgatttgcagatatcgattaaattcagttgattttccatgatatatttctcatcttgctaaaattttaggcaacagttgccccattgttttacgtgcatgtgacggaatctgtgagatcgggacatatttaaaatcatccatttcacgtatagtccgtccgttcttaacgaaagttgatgcacaatagcattcttccgctactgggtaatcttgccctacatagaggaataaagcaaggttttttgttttcgtgtaatcgagaacacccagactaaccaattcctccgcgaacacttcaaatcctgtttcttcgaagcattcgcggatcgccgcgtcaatatgagtttcgcccttttcaacatgccccttcggaatatcccaatggggcgtttcagtggcatggcccatcaacacggcaccatctttaacaaagataatacccgctgatagttccatttattcacctgcaaaagcgttatcaaatgctttaagtgcgttgttagcgcgagcactggcttttgtctcaccagcatgaatgttttcgaagaaagtacgtttccacacttcgcgacgaatggattcatgttccagacggtttttgtgattactgcgaatctgttcttctgcgttataacggtacagatcgagttctgcgtttaatttctgctctaatgcctgtgcaaatacatgttcaatattcattttgtatagcctatttcagatttaaggttttcgagggtggagtgataaacaacattcccttcatgtcgagtataccatacttttccgttctggttacactcattcattacattttcatctaaaccagggatcggcttcatgctgggagaaaacgcgatagacatcatttgttctgcactatcagcaaacccacaagggaaaacagatccagttggtttatcaagatacatcaactctactttagccatagatttcttcgaaatcctcacaatcaggcaaatacgtttcacagaaggtgcaaagcgtaaagaatgcaggttgacgaataccaggattatccggtagatacatccagaaggtgttagcaaacacgatgaatgttttcaggttttcggtggtaatttcgctaacaccatcatacccggattgattgatcgcgcgttgcagtggcacctcgtactgttcgcaatagtcggcataatgatcgcttgttacaaggccattagccattttaatcaaatcgacgattttcatgattttacatattccactttaacaggttttgcaacaaatttatctttggtgcgcccatgaccattacacaggtcacattctttgttgaaatctttcatatcttcgacccatccagaatctggcaacccagacggatatgcgttataacgaatggtttcataaccttttccgttgcatttcgggcaaacatgaggacgttcttttttagcagactctgccagttcgcgaagggtggtagaactaccataagcccgacacatgttttcaaagtcttttaaagtcattctataaacatcaatgacgttatattttttgccggatggtttagccataatatatttctcacttaaagaattttttgatgaaagagatagcaaggccgataccaaagaaaattaagtaaccttttccgtcaccgtgcgccaaaacatagagtgagctgccgtatgcgatgagttctgcgatgttcattaagtttctcatgatatcctcctttttctatattaagtatcttaccataatataaaccaaagtcaacaacaaagttttatcaacccacttatcaccagtcattagtaatcccctacaggttgagacgccgcaacactcaggatcttgaaagtgcaattgttccattcacaataagtttttgcgcaatgaacacttcctttcataacaaacccgtttgagaaaattaaccagtaaagtttcatgatagcctcctttgtttcgacaaggccaatataacaaagcccctgcacgaatgcaagggcttttttcaatttttcaacatccaaagttgcggaggacaatctttagaagcgattagacgatccaggcgggacataacccgacgataaccgtcgtattcaaaattaatttttggtggaacgtagttgacctggattgtttttctgttagctaaagaaacatactcagggatcaccgttcgtaaccgtatagcgatcactggcttctcttcgccttcgttaaagaacatttgaacagttataggacaagcaaagattttaccatttacccgacgataaacaataacttcctgtgtcccttctgttttggccttcacagcgtaggttagaacataacacgaataatgatttgctagactcatcatgatatcgcgataagtttcaatatcttttttaatcgatactgaacggtctttaaagcgatctgaaatgtggtcagcagtagccgctaccttgattgtataccagtcacctaacgcgctagtaaacgcctcgctaacttcttttcgtacactgttaacaagatacattaaacgtgttctgttcatataatcctcacttatttttgaagtattcgatctgacgcaaacgcttttcagcggcggctttcgaatcgtattcaccaagttcttttgtgcgatcgtgattcaaaacaacccacttatcgccacgctgttcaatgtgttctgtaatatcttttaacgacttatccagatccagtgattcagcctcttcacatataatagtcaaatccacgggcagtgtcaacaaccttttcactccgctgatatcatcaagcatcgaatcgtatgcaagggttacgtgcggcttgtaatccggataatcgtatgttgcgccagcatcaatagaatctttgaaacggctatgcaggtattcagattccaggatccctacaatagtgctaccgtattttgtgtcccacttttcaacatcaaccagtttagcaggttctgtgatgtcctgttgcgggaacaaatcaaccgttttccggctgtatacgatcgttgtatgcatcttttcggctgaaacagcattctttgtgatacctaatgtcttttgaacatttttcaaagcctcacatgaagcctgatcgaatttagcacacatgtagataccaggatctacaacaggttttgtgatttcaagaaatgatttcataaaacaccccaataaaaaaggggccgaagcccctttgtaataaatttgtttttacgcttcttcgccaaaggcggcttcatcttccgcgactttttcgacttcaacggaagggatcagagcggataccgcgccaattaccgcttctggggttactggctggcttgcgtcaatacccagtaccgaacacaggtcggacagaagttgacgatgaacagagagttcactttctttttgcgcgataacttcgttcagatcgaatgcgcggcctttcagtaccagtacttcattttgcagtttttgaatatcagacattttattacccattgttaaaatttaaaagtatcgagcactttgctctttagttgtttcaaagtaccttcgttagtgatgatactatctccaggttgaggtgtcaaacctttttccgtggaatgttcatcaacaattccggtatcctttacaataaacacaaacttagcacctaagcgttttaggtatttgtattcgtgttcttgacgacagtcagtgaccagaagatggttgtattcgtcaccagtatatttattgacgaatctttccaacgtgtaacgaacccaaaccgtgttatcatacttgcatacgatatcagttccaaacacttgcatcaagcgtctgatactccagggagtatcgttactcataatcaggttatcaatatcatcaggactataaacaatattgtatccacgttctttgaggatttcaagcccgattttgaaaatatttagaacatcttcattagacatcacaagaggtttctctcgatcgcctttgtaaaaaatagcatccggatcagaatattgtccttcaatcatattgcgaatgtatggtttatcgtaaccatatcgctgcattgctattcttagcgttcttttgataccaaatgccagtgcttcacactgaacatcattgtacgcctcttgaataaatttagcaaccgtatctttaccagttcgcttttttccactaatcacataaatcattagctcattctcttttgagaagtgactacttttccgtcaatttcaacttccatatgaaggaagccaaaagttgccatacacgtaaccgcttcatcactatcgttagtataacccaattcaacctcacccaagtttgttgggaaggcaccataaaatctaaatgtggcgatcgttttcatctgggagttatccaggatatgcacagcgaatgattgcttaggatcatcccacgcaacagagttaaactcattgtaatcgtttgtgctcaacatccatatgtaaatcccaagatacgatctcatttcctcatcgactacaaagcggatcatcaaaggatcaaactcaaaagccgaaccaggtactttacctcgaaccatcatatttgcaggaatatcaactgatgggaggttcattgatggtagtgtaaccccttgaacttgtaaagtcaaacctttcatgtaactgttatcaggaatatcaacccgaaagtttgtaggtgagatttggtttaaaatcatttctgtagacataggatctcctttcctctatttagcggggaacgggatcaaagcggcctgacggggtaatataaaaatttgaagaaaatgcttgaccttttaaaatctttgatctataataattattaattaaaattttatcaaaaaaaatctaacaagatcaagtaaaatttaataaataatttatcaaaaatttttagatctgatcttgaattcataaattttatgatctataatatattaatattttattttatcataaatttttatgaagatcaatacttagatctaataaattttatgctttttctgaaaacttttcctttaccccgtcactaaatactggtactatgttcccatattggaaatcaggaaaaacaaaatgactcacttgaaaaaattcaaagaatttctgaccgaaggtaaaaccctcgctcgtaccgtagcacgtggtcaacgcgctaaaacttccgataaacattcaatcggttttcttcacttcaaacatggttctgatttcgaagttttagcaccggattctcacgatctggcatacttcggtaaaaacattgtacgtttgaaaggtatgactactggtaaagttcaagcggcttatgtcgattgggctaaaggtactgtttctttctacagtggcaatccggatgatgatctggatttcgacaaaccagaaaaattcaaagctgctactctgtatgaagaggcggaagaaaatctggatctgtataaccagttagcagaagatttcgaaattgagatccctatggatgaagctctggtgaaaggtaaagtttacaaactcccaagcaacgatatgcgtcttctgtacactgggcgttctaaaactaaagcaagcggtgaatatgcagtgtttaccgtagttgatgcttccggcaaacctcgcctagtatctggtaaaaaattcacccaggaatataaaggcgatatggtttctaaactggttctggctgaatccgaagatctgaatgaagcggctaaaggcattcgcgaaaaagttattgctgtgatggtgaaacgcgggtttaacgaaaaagatgcagaaaagatggttgacaaaaacctgaaagatgctatgaaagttagacctggtgcgacccctggcaaacttgcagaaatagttagcaccctgtaaaaataaagccccttcctttcggttggggctttttgattagtatttgctccagactttttttgcgccgtaaggtttccctttggacataaattgctgagtcggtagccaaacagctttcgcccaatctttcggggcaatctctgctaatggtgatttgaggtgtgatggtagatatgctttgatcatttctgttgcgcctcgcatacctttcacgttaccccagttaattttaagcacggtcttgttagagaggcgtttagtggatccgtaccctcgcttcaataactcttctaaaaactcctgtcgtgctctgggtggcgcatagtgcaagttcaaaccatagaacactaagttacccgctttcgatcttccggatcctaagaaaatgatcagtggaaatctatcccaatacggcagggtgtctttatattttgcatcatatgcaaacgtgtacaggcgacccgttgctggttttgccacacggtgtgttttgatactggttttgatgaaattaccaaaccattctgttgaatctttctgtcgctttgccgccgatacaccaacagtgatctttttcagactattacggaaatcgttgatgatctcgatcccgtgttttttacggtagtcattacgttttttacgggcttctgtctctgcggaacgtcgttcaatctcatcatcaatctgttttttgtaacgatgcattgactttgtgaacgttgcgtagtttaatccctcagaatcggcaaaacgtttagcagaaacacctttcgtttttgccttacggaatttgatccccagttcaacccaatcactcaatttgcgtttgggtggtgctttgggtttatcctcttccgcgatgatctcaaactcaaaaataaaactcatgtttccctccagggattactgacctcgccacccaaaaacttttttgagtgattcttctgttacgattttgaactgccagcctttttgacggcatagctcatttgcggctttccacttatcaatattaactgtataggtgtaaagagcatcaataaatttctttttattgtgtacgttgttgtttactggcttcggtggaggcatggtttctttaaggggcttaacctcccaaagatatgtagtaccattttccatttccacatagaaatccatgtaatagcgtcttctcttaccgtctgcattgcagaaatacgggatcactatacattcagaattccaacgttttacgtgtgggtttttatccagccacttcataacgtagcgctcccacgatgacctatacgtaatctttcgcggatcgcctttatacttctgtatgttttcgggtacaaacgaccctttatacgtctgtcttccagccattgcgtaaatcctaaatagaataatataacgtttagataggggaacttatcgtgctattttcatacttcccgcctgttgattacaaaggcacccagacaactgatattttccgagactatcgattttattttaatcgtgtgattggaaaatataaaacccgtagttaccagataacaggcacactacgacctgaacaacttgcagaatcattatatggaaaccagcaatactactggatcctgttgatgcttaactctgtttatgaccctttctatggttggatctccgatcaggaagccgcgtatcagtgcgctatacagcgttattctgaggttggcggtgaacaggttctgtatcatgtagatgaaaacaacaacaagtattataaccttgtcgaagaccccaataaccctggtcattggtatgacaaaggtgacaaaccaatgctgtatttacagtatcaaggtgtattagctcctgtagatatttatgaagatgcagtgttgcaaaatgaagcaaaacgaacaataaaaatcattagtccgtctgacatccaggcgtttctgaatgattttattaaagaaatggaaaaggctaactcatgaaattaggcggaaatttacactcccctttctttgatggggtggttgaaaacgttgatgatccgcgcgggttgggccgtgttcaagtccgtgtatttggacaacacccagcccaaaaacaaaaatccgatgcaatcggtgttcctgttgaagatttaccctggatgatgcctattcaggatattagaagcgctgcgatctctggtgtgggcttctctccaactggtatcactcgcggatcctttgttgttggttattggcgtgacaaatggcaccaagatggtatgataattggtactgtcgctggtgaatatgtcgaacaaccagacacacagaaaggtttttgcgatcctatgggtgaataccctcgctatgttggtaacgatgttaactcccttgcattaggtggtttgaaaggcaaaggatcatcaagtgtcatcattcgtgattcaaacacaagcatagcagtaaacccagacgatcgcccactggatgagataccagaagataaccgccctgatacgggtggatttacgatcgaaaagatgctcaagcaggatgaggggatccgtacacgatggtatacagacagtgaaggatatccgacaatcgggatcgggcatttgcttatccgcgaaaagactcgcgacactgcaaaaattaacgctgcgatcagtaaagcggtaggtcgagaagtaacaaacggaacaatcacggcagaagaggtatcaaccttatttgctcaagatttagccaaagtaagatctgatattcagagaaccgctaacgtccgtgaagtgtatgtgaacctcaaccgtcctcgtcaaatggcgatcgaaaacatgtcgtttcaaatgggcgtcggtggtgttgctaaattcaccaataccctgaaagcgatgaaaaatgaagattggcaagcggcttataatggtcttcgaaattcactgtgggctagtcaaactccaggccgttcttctcgcgtgtctaaaatcgtcctcacgggcaaccttgaatcatatggggtgcaagtaccagatccggaagggcgctctctgagtgctgcttacgctgcgtataacggtgctacattgtcggctactagtccggaagatccgtttactcctggtgatacccgtgtgatgtttgaagaaccagcatcatcttataatgcggaatatccgtataacatggtgtttgaatcgagatccggacacattcaggaattcgatgataccccaggatacgaacgatataaccgtgttcacccagcagggagttacgaagaaattcgcccggatggaacccgcgttgttaaaatcgtaggggatgactatcaaatcgtgatgcagggccggaaactcaacgttaaaggcaatttgcaggtcgttattgaaggtgatgcgttcatttacaacatgggtaacgttcaacaaacggttgatggtaacgtaactgaatttgttcgtggcaacgttcaacaaacggttgaaggtgagtacgttggcctgattaaaggcaatgctgaactaactgtaaacaaagatgcaacagttaacgttgatcagaatcttaccgcaaatgtgaaacagaatgcaaccgtagctgtaacagaagacgcaacagttactgcaaaaaatgcgaaaattgagattgaagaaacgatggatatcggcgctaaagatatcaatatcaaagcaacgaataacacgtttattgattctggcgcattaacaaaaatcactggcggcaccgtccaagtggggtaattaaatgattatggattatgaatcaataattgatggaattatgcaaaattatcagcatccttgtgatgctgagatccccgctggctattatcggcgggttatctggcaagggcatacagaaaattatccggctgttggggttgagtgggataccgagataatcaaaatcggtactcatctttatactcaagaacctttcggacatagaagcacggatctacctgttgtcaattcaccgggaacagatccaaataccggacaaccaacagggatccttgttccaaagattggttattatttcaacactcaggcagaaattgatgcttacattacatccattggtgcaactaaaatcaatggtggtaatgattggtatggtgcggatctgtcaaaatcaaacctatacaaaaaccctggcgaactggctatgtataaggttgaaaacagtggcgggtatctttccggaacaaaccctgtatgtgatgctcgcatacgtcaggcatataatcaggacactggcgcattcaccaatattgattattattggaatggtaatcgtatagcctatatgaagcatgacgaaacaggggcgcaccagtgcaaatatactggtatgcaggttaacaccaacgcagatacaagcattcctcctgttcctcctgcaatgccttccacttatggggcattaccgagtgaattaagccgtgctgatatttcgtgcattccggcaactgttggtttcgcatatacaaatatcagtgatgctatgttgcaggcatggaacgaaactcgtaatacgttcaagctacagtttaacatgttaacgggtgctgtacagaatggattcggtattgcgacgatgtttgatggtttatccgtatcgatggaagaagtaatggcgggggcgctcgcattgtcacagcaagcatggcaaactgctatgaaagttttcagacaagtgattagcgctgcgtttaacattatcggtggtgcatggggattgattaatcagttcttgcctcaagtaaccatcttaggtgttgcgatcaatatttacgatctggtgtttggtgataattctgttcagactttgaaagatgcatttaatgcaatcatcaaatccggacaacaaacatatgaaaccgtcataaacgcaatatacggggccataggaagcgcatacaattactctgtggaatatgtcaaagctggcgctcgcgaccttgtggatgcgtgtagcgcgttatttgattggtgtttaacgatgttccaaaacggttgtgttgcattaatcgacttatacggtcggatcatgcaaacatgggctatccctccggaagttccaaacccgttatggtctgcggtgctggctatccgtaacatcatgatgcaaatcaaaccacttgatataattctgggcggtaacttccccggattcactgcaatggatttgtatcaacaagcacaggaaaaagtcaaggcttttgttgatgagtcatacgaacagatccgagggctttatgaacaagggcaggaactttacaaaacgttaaaaaatcaaattttcgaacgtgatgcaattcagagaaaattcaaccagtacttaaactggatgtggggcgctgtaacagacgaagcaacagcggcttatcaatctgcattggatgctgcaaacgctgctgtagctgcaacacaggccgcgtatgacgctatacaggaacagattggatctctacaagatgcaatgaaagatacatacagcatggcgatggaagaattaaagaaattgcctttgatgagtacaataaacgagtttttaggattctgtggtgtcgcatttgacgatcttctcaagtcatatgaaaatgcgattactggtgctcagtctctgtacaaaaatttcattgatagttcgcgatcgtttaaagatcactgcaaagtaatctataaccaaatttgtacgctggcgttgagtaaagtcacacaatatgtgaataaattgctgtctctcataggattagcaatcaactttggttcgattagtgtatgtgttccagtactgaaatactaaatagtcgaatgatcaagaggaatttataataatggctactgctaagactaagactgtcaaaaaacagattaaccaaatccccgatatttttatcgggggtactttcgaagaaattaaaacagatctgattgattggctgggtggacaagaagagtttaaggattacgatttttccggctcgcgaatgaacgtactgatcgaccttctgtcgtatgctactctttatattcaacagatgggtaacacggctctatttgaatcgtttattcgcacggctgcattgcgtagttctgttgtacagtctgctcaagatctgggatatatgccagattctcgcacggctgcaagcacagcagtaatgattacggctgctaacccactgaccccaacatcgatccgtatcccgcgcggtacaaaattcatcggtactgtaaagaatacagacagttattcttttgttgtatcagatgacgttgttatcgttcgtgatagtaataacaactatacatcaatgctgaacctggtgcaaggccgtttagttcgtactgaactaatttatgacggttcgagtatcctgatccgagatccaaacattgaccgtagtcaggtacgtttaactgtaaacggcgcacaatgggaagactggacaaacgaaagcattgtaaacgcaacaggcgcaagcacgatttactatatgcgtgaaactgttgatggacataccgaagtttatttcggtgaaggtgaagcaagtcaacaagtggcgggtggcgcattaaccgctgaatatatcgggggcttgaaacctgctaatggatcgactatcgttattgaatacctgtcaaccgatggggaagcggctaacggtgcaaaagattttatctatgtcgatacattaaccaatattagcatcacggcgattaaagagaacccaaccaacacccctgattatgtcggtgctgatggtggtggtgatccggaagatatcgagcgtattcgagaactggcccctgttatgcgtgaaacacaacgccgttgtgtaactgcatcggattatgaatccttcctgtctcacagatttggttctatcatccaggcggtacagtgctttactgataacgaaaaaccaggttatgctttcatttctgttaaaccaaagtcaggtttgcgcctaacatcggtacagaaagaagatatgcaaacgtatctttcgaaatataacctcgcgacgatcaccccgtcgattatggatcctaactatctgtatattgtgcaatctgtaaaagtaacgtatgatatcagtaagttgacggaatcagaggaatggttacgcggtcaggttatttcgtcgatcgactcttactatactgacaacgttgaaattttcaacaaatctttcagtgtatctaagatgttgacttatgtcgatcagtctgatacttctattatcggttcggaagcagatattaaattgctccgtgaaattgacaactattacagcgcccctatgtctgggattcatttcttgaaccaggtggaatctaaatcaatcatttccagtacgttcaagttcaccaacgaacaagacgaaagttatgatgttcgttatgcttctacggaaatggatcaggatggtaacgcaaaaattgtaataggcccgttcaaggatggggatatttcgattgctgcttatacaggcgatgactttgaaaaattaacagatgcaggaacccgtaataaatattacgaagttggatcggtttctcattacaccgatttcattagctttgacctgggcgttctgaacgtatccgccgatagtttcagcgctgcttatatcgagctaaatgcaaaacctctcgaagaaaccatttttactcgcgatggttcgttgatcgtgtttgaaaatgacctgcgtcctcaatataccacattgactatgaatcctatcagtcaataatctttaacccctgtcttcggataggggtttttctttttataaatacgtgatatacataaccgcaaatttggagaaatataatgattaaagcgccttcgattacgagtttgcgcgttgataagctggctgctaacttcgtttaccttaaatgggatgatgttggcatggatttctattatgtggttgaattggcccgtagccgtgatatggacggaactattattccagacgaagagttaatctggacgcagttgggttatagctacgaaaacgaatggtttagcgatcaggttgccccaaatacacgttataaattccgtattcaaacaactcatgaagggtttgaaccttctgattgggtgatcagcgatgaattatggacgtttgatgagaacgcctacgcatatacaaccatgcgtgaattcacccctgctgattcgtttatcaatgaaaaattcgccaaaaacaatcgtgattacgtcgattttaacgatgatgttattatggcttctctgatggttgaggattttgtatactctcccctgtattctgatgtaagccagatcagcgataagatcctgaaacaagaaagctaccatgaaattcaagatcacatcgaacacgtttgtaatgatatagatcgcacgttcctggtatactcaaacggattgctttacctgtttgaacgttttcagaatatggctaaagtgtcaaatgacaaaggccaaacgtggtattactacaaagcattaaacgatcgtgtaggcaatccggtttcccgtaccgttgcttatcagagcgctaacactacgtatgtgttaggatacgatcgcatattttacgggcgcacgtcaacagatattcgttggtcttctgatgaagttcgtttttctgctgatgatgtaacgtttgcgaagctggggaaccagtcagggttagattttgatgttgattcatacaacacgtatgcgcgtctaccgggcggagtgtcgaagtatgccgaagctatagcttgttctagtgattggctctacgtggctgctaagaacgttatgcgccgtattgcgttacgtaacacaccaatcgatactgatcctggttcgccgacctttggtgaacgtatttttgatgaagtttcatataccatcgtaccaggaaatgataaaattgttgttaaaaaaatggacgtgctaaatgaccgtctgtacgttctggtaactggtgaagttaaaacggcgatgatggatccgactgtcaaagctaacgtgatcccatcaaacgatgctggcgtttatctgtgggatgagaatgcaaagacgtttacccgtgtttatggtaaaaccgaagatgaacgtttttatatcactcatgaatataccaatatgtcaaccaatggcgatgaagtttacatttctgttggtaactacaaatatccaggcactttgccagatccagatctggttgaaaagtatccggaagatgtgcattcagcggtgaaatacgatcttgttcctggttatactgcgagcatttctattaactttgctacagttcgtgcaaatcagaacgatcctacagtatggaactttgggccgcaagagtactacaatgaagcaaactttagctggcatttccgcgataaggttagcacatggatcaccaatgataaccgtcctctggtggtttatccggaaaccctgtatactctggttactgatagcgcgtctcctgcgtcaacgattcgtgtaaaccatgaagtttgggacaaaggaacagttactatctacttgaataatatcaagtttactggttttacaaagtacacaaacggtgttctgttgtatcgctcaggtggtaggataattggattctatgaactgtcataccgcgcaagggatgaactcactattttctggaaacccgataacactttaatggtggcaagtctggttaatcaggaacgtgaaaacccatatacgccggatattgaacctggattaatcgaccctgatctgagtcacatgatcactcgttttgctccgcaaagctatctggacaaccaacagttcgaaaaatttggtgaatactatctgcaatacatttcgttgggaagcaacagttactataacaaattgctgaacctcatccggaacaagtatccgagagagaaaaacaacgttgaatatttgtggtctgaaattaaccgccgtaacatttacctggataaaaccaaacgtgaggcagtggttagatttttcgaatcacgtgcaagtgatttctattcaacaaaagggatcgaagcaagttatacgttcctgtttaaattgctgtataacgaagatgtttccgttgagatcgaaagctccaacagtctcgaatatgatattttggttagttcaacaaatatcagtcaggatatcgtaggccggacgatctatacaccaactggacgcgctaacgttacatacatcgaacgtgaatatgaaaatggtcaattgcgttggtcaatgactctgcataatgctcaaggtaactttatcgaagggcaggttgtcaagtcagaaaaaaccaatttcaccggaatggtaattcgtggtgttcgtggtaaacaaatggctaacaactcgatcgactatataaaccgtggacgctcttactacgtgatgaaaattcgttcaaatctaccgacttcccgttataaggatgacgtattgaggtttgttcatccggtaggatttggcttcatgggtattacgatgttaacagtattcatcaactctggtttgtcaatgactcataacgagacaatcattgatattctgagaaactaccgtttcgatagtggttatcctaagttctggcctgatcgcattgcgagcatggacggtaacggaaaccaacaattcgacctggttactggtgaacctctgtacaccgcacacccgcgagcgggggaaccttttgatgtacctccggaatatgacgttgaagaaaaaccgcttaacggtgttcttccttctgcgcgacggttcgatcaaagtccgttgttcgattgctcaggcgttaaatattcacagttccgtaatttggtggatagacgactgaaagatgatgcaggaaacccacgtgatccaaatcctccatcacagattaaggtaggaaattaaatggcacaacaaaacttgtatcggtcggtaattactgcaaaattccgaaccgaaaacttgatgaacttcaaagatatgatcggcgatgccgccgatctaaacacgatttatatgtctattgggcgaactgaatcatgggcggataacgaatccgaccctaactttgccccgccatatccaaatgatagcaccgatggtgttagtgatatgtggacgcatatgatcggggctactaaagttcctggtgatatgatagatgcaattttaccacgtaaagactggggtgatactcgctatccaaacccgaaaatcttttactttaacgatattgttgttgtaaacaccgcgccttataaccgtactgatccgggtaaaggttggatggtttatcgtgtagttgatgttcctgatatcggttcttgctccatttcgagcattaccggaaaacttgaatgtatcaggatcggcggtatctggagtccgtctcatgaatcgagtgaacctccacgcggagaagctaacgggatcgacatgggcgacggctataaatgggaatacctctacacaatcccgccagatgtcgtgatcaaccgctgtacgaacgaacatatcgtagttcctttccctggcgaactggaagaggatccggtacgttggggttatgataacgtgattcaatggtatccaggacaatacgatctagtgtatcggttaaaggtgaattcaatgcgttttcgtgcatacatggattctcttttcttcccgcaatctacgcttcctggtaacaaagggttccgtcagataagtattattgtaaacccgttgattaaaaaggcaagcccgaccgaacctgaaaagaaagcaactggtgattactataatgctaacgcgcttgaacctgattccggacgtatgatttacatggaaaacagacaacctattattcgctcccttgatcagactgaggaagtgagtattgtattcgaattctaaggaaaaacaatggcttaccaaacagcaaaaaaactaattgatgtcggtgaaatcggcaacccatcaacaggcgacccgctttatgatggtggtgttaaactgaacgaaatgatcaccaacgtttataatgcgtttggtgatgtgcgtatgctgtctgcaaacgaaggtgtcggtaacatggtgatccatgctaccggatactatcagaaactaccacgcacttactattcaagtacaccgatcgaactgggttccctgcatgacatggatacttcaacaggttcgattaccgttgttcttccttctggtaaggttggcgaaggttgctacttcataaatagtacgggtagtgtctctgttgatcgtcctatcgcgtttcgtcctcaagttggcgatacaatcgcgggggttgcagaccagttgtacatcacgtcaccttacacctttgtaaaaatctggtgtaccaaaaaagaaggtgcggtaacaacatgggattattctgtagaatctatgttcggttctaaaacgatgcctgttgacactacggcgcttgtactgaaagcaaacccgactgctattcctatgttcggatatagcgaatttagcggggctaaggtgctcgtatacgcagaaaacgtagctggtacagttaccaaaatggcagaagttttaatgaccgtggatcgtgtaaacaaaacgatttattcaacggaatacgctattttgaaaaacagtgaagatgaaatgtttacattaaactttactgtcggtgctggtgatgtcgtatacgctaacgtgcaagcgatcaaagaagatcgaattaaattcacgattaaagcaatcgatacgattaaatcagggatcgcgtcatgaaacaagaaattttaataggtcaggttgtagacgatggtacaggcgattacctgcgtcgaggtggtcaaaagactaacagcaactttacagaattgtataacatgctgggggatggtgagatcccccatccagcaggtgcctggaaaacttttgcgggtacgacgctatcaccaaaatttggtgaatcatgggcgttgaataccagtgcaaacaaaatcaccgtaaacctcccgaaaggcggcgtaggcgattataacaaagttattcgtctgcgtgatgtgtggtcgcgttgggctaccaacaacgttagactgatccccgcaactggtgatactatcaaaggttccccaactcctaaagatctgtttaaagattttatggatgtggaattggtgtattgctctccgggccgttgggaatacgtcgaaaacaaacagattgacaaaatcacaacttcggatctggcaacagtagcaaaagaaacgtatattgctactcagggacaaactgacttccctaacgtattcggtgttggtaatgaatacaacctgcaatcgttcgaagtttactatcgcggtaacttgctgttcatcgatgagaaagacggattcaatgctgataactcagactatggatcgattggttctgctcctggtgaactggttgcacttgatggtaattcagtacgtcttaaaaacccgtgtaacgctggtgacacgcttcaatttgttacctatctagatgggttagcaacatggcgttcgagctatgaagcgtatgtgatgcgcatgtatcagactggtgatacttctctggaaaccgttcctggtgaacagtgggtaggtgatctggcaaccaaaaaagagtttacacctgctgaatttggtgttaaccctcgcgtgttgattaaccctaactcgtttgaactgcttctcaacggtaaacaactggttaaaggcggtgacgctgactatccggcgttttcctgtgaaggtgcggaaggtgttgatgaaagtacgtgtgttggtaactctggtgtatgggttccgtcaggacaggattatagtttagtattcactgattctgtagtgacttcaatcaagtttgctcaggaactggaatccggcgacgttgtaacgattcgttggtttaacaatgatattggtactctgatggattgggaaggaactggcggtattaaagaaaaagctgataaggtttatctcaataacgaagaagaagttatattgacgaaccgtatcgaatataccgattataataacccttctcagaaaacaatgcgtaatacaggggaaacctatcagggacgtattctggatattcaggctatgtttgatattatccacccgatcggaaccatctatgaaaacgcacacaacccggcaaaccctgctgattatatgggatttggtggttggaaacgttacgcagaaggttatttcctggctggctggacatcaaatgcagcggatcctgatttcgcattaaacaataatgatttagatagtggtggtcaaccgagtcatacggcaggtggtacaggcggtgatcgtggtacagaaatcaaaatcatcaacgttcctgaacttgtatcaaaagataaagttctgattgctgatgaaaatggtgctgtgatcattggtggttgtcagttagatcctgatgcttctggccctggatacactaaataccgtgaggatacattgaaagtgaatcatggtaacacattacctgataaaatcaaaactattccaccgtatatgactgcacatcgctggataagggttgcataatggcttacaacaatatttcaaaaacaagggagggcgctcgcgtcctctctaaagaagcagattacttacagtatgatacttatggtaagttgcctctgatcggcggtaaacgttcgatcggcgaaccaaacattgaccaaacaaaacgcggtgttctgtatggaaacgtacaatccgcaattgatgacctgtatacgcttatcgagcaaatcccgattaacggcgttgttaccatgactgaggatgcccctccaatcgctgtacagcaggttgagagcgtttcttttgatggtattgtacagaacatcgattcagaccaagaacaggctgtagttcacgtgtacggctttcctttcatctttgataatgggactaacgccgcaaccgtttgtgaaactgcatacaacaaatttactgaattcgttgcagcggaaaaatatttcgcagaagttaaccgcaaaggtgttgatggtacgatccttgaatgtcgatttattgatagtgttccgcacccggcaacaaatatctcagaaaacggtattcgtcaaatcggaactatcgacgtagccgcaaaaaatggctatggttcatgggttaagttgggttctggtttcttacctgatgttactccgcaagtaaccgtgtattacttcaaacgaattgcataaggataacacatgagtaacaatacaatcaaccacgtaagtgataaatccatttacgtgacatttgacccaacaggtactgattggcctgataccataaccaacgtacaagatgcgttggaaaaaataggtagttgggcgcgtactgatactgggcttcctatcgcaacaacttctgttcgtggtattgctcagatcgcaaccgaagctgatattaacgctggcacggataacactaagattgttactccgaaactgttagcataccgtatgcagaaccctaaagcatcacaaaccgtgtggggttatacgaagtattcgactgatgcggaatctacaaccgtaactaacgatgcatcgtctattactccgcgatcgctgaactatgtgttcaataaccgcaaaggtacagaatcggtttggggttcttctaaaatcgctaccactgcacaggcggttgctggtacagataacactgtaactatgactccgcttaaagtcaagcaagcgatcgcgtctctggttccggttcagtcaagtgcaaccgaaagctcgcaaggtctggtacaactggcaacagttgcacaggttcaggctggtacgatccgtgaagggtatgcaatttcaccttatacgtttattcgtttaactgcaactgaaagcaacctgggcgttattcgcatcgcatcacaggcagaagcaaacgcaggtactgatgacaccaaagcgattactgcgaaaaaattaatcaatacccgtgcaactggatcccagttcggtgttgtcaaattagcaacaactgttggttatgtggcaaacactgcactttcttctaatgctaatgtattgcctagcgatcgtagtgcggtaattaatggttctctttatgagaatagcgcaatacataacaacaaatatcagacgtggacagatcttgattggcatttcccagtaggtgctattgtcatgactggtttccagactgaccacggtagtttgtatatttgtgatggacgttcactgaataaaaataattacccgttactgtttgagcgtataggttatacatttggtggtggcggtgattggtttaacattccagactgtcgaggcgttgcagtacgtggtcatgaccgtgggcgtggactaaaccctaatcgtgggtatggtacatatgaaggagatatgttgggatggcacgaacacccattacaacttatctaccagaacggcggtaacattccgaaatggcaagcagtttacgaactgaaaagcgccgagaagaatgaccaaagcgctcgcgtatttgatgcttctataactaaagctactggtgtgggcggtgaagaaacccgcatgaaaaacatcgcattaaactacgtaattcgcgtattataacagaggttattaaatgatcatcgacaaattaaacccgttgccgaagatcccgtttgttgatggcgtcccagatgacgccacgactcaaacgaagattatttggatcaaaaacggtgaaactctggacggttcgccagataaagtgtcaaacactggcagtcttaaccgaactggtgtaaacatccagcagaacgcggttcagttagaacaaaatactatcacccataatgataaaatcaacgaagtaatcgatcaggttaacttgattactgaaaacattgatgctattggtgatgaaagcgtaatcaaaaaagttaaccagttggatcaggatgttcaggcattaactttatctaacacccaaacacagaacaaggtagcacagttaaccatttctgtaaatgctcaaaacgatgaaattggtgaatacaatccagaaaaggatcctaaacaccgcacaattcgtaatgatatcatttacattaagaaagaagttggttcatatcctggatttaacgttgatggtgatgttgacccctcttctactggtactggccttaaataccgcgtactgagtaaccaacgtgctatttctatgcaggaaactcgcataaccaaactggaagatgattgggcgctttccgaagtaggacaactgacagaagaggtaaaagaacttcgtgctgaaatgggtgattctggtcttgccacaacccgatcaatctatgcgcgaatcaagatccttgaggatggttctattttaatgcaaaatgaacttgatgcgattaatagttatatcggtcgcacgtcaggttcaaccagttccattaacgatcgtgtgaacagtctggaaacctccgttagttctctggctacacaaatcaatgatccggtaactggtatcactgcacaaattgcaaccattaacggtcaaatcggtacggcttctgctcagggtagtatccgttatgatattgcggaaactaaacgcagattgatggatatggaaatgattctgggtgaatccggcgatgatggattgcagggacaagttgcgatcttaactggtgacgttggtgaagattcagatcctaccagtatcaaaggccgtttgagtgttgttgagggtgaattacgcaccaacactagcgcactatgggaactgcaaggcgttgtaggtaactcttctagtggcctcgttgcaactagccagcaggttaacaaagaaatctatggtgatggtgttagtgccgatcctgttactcgcgctggtttgaaaacgacaacccgcaacctgttcactcaggtaggagataactccgaaggtaacgaaacgggcatttatgcactgattgccgaccttaataaacgcgttgaggatttagaagcgttgaacattgcacaggcacttgcagatcgcgtaactatcgaagatctgaatgctaaactggctctgtacatcaaagaagctgacgcagatctccgttatgagagcaaaaacccgcctctgtcattcggtactaacctaactggtgatactgaatacactactggcgatccattgtctctaagcgtaactatgaatggtggtgtttctccgctgtcttaccagtggacgaaaaacggtgtaaatgttggtactgatgctaacacatttaccatcgattcgctacagccttctgattccggaacttacaaagtaacggtaactgatgcaagccataaagtcatcgtttctgatgaactggcgatcactgttgcttaacgattaacaaggggcttcggccccttttgaggatctttatgattacgaacaacccagcacaattaaaagatgaaattctgcgccgtttaggtgctccgatcgtcaaaatcgaagtgacaaccgatcaggtttatgactgcattcaacgagcattagacctatatgcagaatatcattacaatggatctaacaaagggtatatcattcttaccctggggccggacaacccgaaaaatattttcgatctgagtaaagaacacattttcgcaattactaaagtgttgcgtactaacatgggttcccttgtatcgatggatggtactgcggtttatccgtggtttactgatttcctgatgggccttactggtggttctctgggcgggggtggttgtgcatcacgtacctacggaatgaacgcatacggcgcggatatgggctattttacccagatgatgagctatcagcggtcaatgcaagatctcctgtctccgcttcctgattactggtataacgacgacacaggacagtttgcagtatacggaaccgttaaagatggtgatattgttgttatcgaagcaatgatcagatcctttgttgatgtacccagtatggtcggtaacgtctctggatacgctacagcgggttctgatggtgaagataagccaactatagcagatatatacaataacccctacaaagccgtctcaggcggcgtgaaggctggtcaaggtacaagcgttcagagttcatcctctgcgtataacaaccgttgggtgaaagattacgcaactgctcttgttaaagaggtaaacggtcaggtgctggctaagtttcagggtatgcaattgcctggcggtgttgctccggatggaaccagactgatacaggaagctatgcaagaaaaagaaaacctccgtcaagaacttctgttactgtctgatgcacttccagtgttgatgatgtaaggaggaaaaatgcaaaattgggatgaaagtctgtttgcacagttagaagatggttccggcgtcgatcggaacctaagacaagaagtaacaaacccgtatgttaactggtacaagtataaccctactcaacagttacatgattcactaacagccgaagcaattcaaatgaaatctccggatatgtattacgtccgtcgagaatttgttaatattgataaaattttgggcgaagaccgtgaatcgaagtttacaaaatcgtggaaaattgcagcatatatcgattcgtatgcaaactacgaaggacagagagacttttacagcaaattcggtatgatgtcaaacgatgaaatgacacttgtgatcaatcctcgtttatttgcacatcaaactgatggcgggatccctgttctgggggatttgatttatttccctatggataacagcctgtttgaaattacatggattgagtttgacccgttcttccagttcggcgatcgtcctcaacgtaaaatcaacctcgttaaatttatctatactggtgaagaattggatcctaaactgcaacgaaatgaagggattaatcttgctcccgatgctgatctggatctcgaacctattcgaaatcttgatggattggctgataccaatattgaacagtacgaagaagatcaagcctttgaagatgaaggcgatgaattcattgaatcgtttgatgttgttaacgggcgcggatcaccgttcgcacagttcccataaatataaccaggggaaaccctatacatgtaagggtataggagaaatcttatacccgctttaacccatacaggaaaaagaaaatgtttggctactggtataatagttcgctgcgaaattatattgtcttgatgggttgtcttttcaatcacgtgcaagttaaacgcattcgcggcgaacaagaaaaatttatcaaggttccgattacctacgcatcaaaagaaaaattcctggcatccatgaacaagctgaactatgcatacagtcaggaaaatgttgctaaaacggaaacaattttaccacgtatgaatctatccctcgttgatttgcagtataacgcaattcgtaaaacggggatcgcggtaaaccaaaaaatgacgcagttacgcgcacctggaaaaacagtaacgcagtttaaccctgctccgtatcgtctcatgttcgaactgggagtgtatacccgttacgaagatgatgtgtttcagattatcgaacaaatactgccatacttccagccgcatttcaactgtcgtattacagaattacataaaaacgacattaaaatagaccgagatattaaaatatctctgcaatctgtttcccctgataccacgtttgaaggtgatacaacgacacggcgacacattgaatggtctttaatgtttgaattacagggctacctgtatccgcctgttaacgagattaaaggcgagatcagaacagtatacacggatttcttttccaatatgaacccgttggacaaagataattttgaatccgttgatgctcaggtggatccggttgatatgcctatacaggattacacgggagaagaatacattcaaacgtatgctaatgatatcccaattcctagcggtgatcaacctcctaaaccgaggggccaatgatggaagaatttagcgtaaaacaactacttgatcttgaaaatctccctggtgctgaaactggggaagaaatggttgtatatgaaaagctcgaactcgttgatgtcgagtcacacccagcagatcgaaaacctgatttagaggaagactatgcacttgcgcgtaaaactgcgcattacatgaatcagatgatcatggatatggcacaaattgccttgcataacgctaaaaactctgaatctccgagacatgttgaagtttttacaaccctgatgaatcagctaaacaattctaaccagggattgatgaaaattcataaagaaatgcgagaaattaccgaagaaacaacaaaaccaggatctgaaaaaggtaatggtggcggtagtgaaatgaacatagagaatgcaactgtatttgttggttcccctacggaattaatgcagaaatatggtagtgcatacgaacccaaagaaggcttcattaatggtgaagcggtagaggtaaaccctgatggaaatggaaccgacgatcgatccgagtaaggaatcagatcacccaatcggattaatgcatcccgattatctgaaaaagaaaattgatgaatttgggatggagtggacgcaaagcgaacatgataaaaaatggtatccgacaaagtttagcgattacctaaaaattaacggtatccataaagttgatattcaagcaaaagacagttcaaactttgcgacgtataaaaacaaaggaaacaagaaaactcgatataacggaaacccaaacctgaaacgcgcgtacatccaaacgaaatggacgcaacagatgttgatggagtgggttaaatgtcgtgatgatattgtttattttgctgaaacatattgcgcgatcacccacattgactatggtacaattaaggttcagttgcgtgactatcagcgcgaaatgctgatcgaaatgcataaaaaccgtatggttgcctgtaacctgtctcgccagttgggtaaaacaaccgttgttgctatcttccttgcacactttgtgtgtttcaacgaggataaatatgttggcgttttggctcataaagcctctatgtctgcggaagttctggatcgtacaaaacaggcgattgaacttctccccgatttcttgcaacctggtatcgttgaatggaacaaaggttctattgaacttgataacaaatgtaaaattggtgcgtttgcatcttctcccgatgcggtgcgtggtaactccttcgcaatgatctacattgacgaatgcgcgtttattccaaactttattgatgcgtggttagcgattcagccagtaatttcttctggtcgtaaatcgaaaatccttatcacaacgacacctaacgggcttaaccacttctatgatatatggaacgctgctatagaaggaaaatccggcttcgtaccatacacggcgatctggacatcggttaaagagcgtttgtatacagacggtgatgatggcgtatttgatgacggctattcatggtcttcgaagatgatcgccagttcaagtaaagaagcatttttacaggaacattgtgctgaattcatgggaaccaacggaaccctgatcgctggctggaaattgtcaaaactctcatgggttgatactgatgaaacggaaactaatttttatcagtataaagctcctgtagagggacataaatatattgcggtactcgacccagccgaagggcgcggtcaggactatcacgcgatgcatattatagatattacatctatgccgtttgaacaggttgctgtatatcattcaaacaaaacatcgcaccttattttgcctgatgtcctgttacgttatcttatgatgtacaacgaagcatgggtttatatcgagctaaatagcacaggccactcagtggctaaatctttgttttctgagttggattacgataacgttatttgtgatagctataacgatttggggatgaaacaaagtaaacgatcgaaagcgattggatgctcaaccctaaaagacttgatagagaaagataaactcatcataaataacaaaaagacaatacttgaatttcgtactttctcagaaaaaggtgtttcgtgggctgcggaagaaggtttccatgacgatctcgttatggcgctggtttgctttgcatggctaacaacacaaatgaaattcgcagaattttgcgagaaagacgatttgcggttggcaaatgaggtattcgcacgtgagcgcgaactgctttatgaagatatgttatgtcctgttatcgtaacgagtggcgacgaaacaatatctgtcggccaacacggtatttcgtttatataaatttagaggaaacttaataatggctttaatctctccaggcattgaaactaaagaaacatcggtacaatctaccgttgttcgaaattcaactggtcgtgctgctattgttggtaaattttcatgggggccagcttaccagatccgtcagatttctaacgaagtcgaactggtaaactattttggctccccagacaatgacaccgctgattatttcatgaacgctgtaaactttttacagttcggtcaggatctgcgtgttgttcgtgtcgtcgataaagaagccgcaaaaaacgcaaccgcgatctataatcagatcaaaaccacgatcaccgctgctggttctaactatgcagtagacgatcagatcaaagttaaacacaataacgttgttattgaagaagatggtgttgttaccagcgttgatgatcagggtaaaatcctgtctgtgttcattccgagcactaagatcatcgcacacgctaaacaggttggtgtatatccggatctgtctagtggctggactacagaaatcgtttccagttcttctggtgtttctgctacgattacaatcgacggcgtagaagttgatccgggtattactctgctcaaccttgacaccgcaaaagaaactattcaggcaactgctttccaggaactttgcaccaaataccagctaccgtctgttattgcaatttatcctggcgaaatgggtagcaccgtaacggttgaaattctgtctaaagctgcatacgattcttcggctgtcattaagtcttatccttctggtaagtctggtaaaaacagcggtcgcagttcgatgaactttggccctcagaatgataaccaatacgcgtttatcgttcgccgtggtggtattatccaagaaacgtttatcgtgtcaaccgctaagggtgataaagatatctacggttcaacgatctacatggatgatttctttgcaaacggtggttcgcagtatctgtatggtacgtccctaaactggcctgtcggattctccggcgttctggaactgggcggcggtacttccgcaaactccactgtaggcgctgatgaactcatggctggttgggatatgttcgcagatcgtgaatctctgcatgttcctctgctgattgctggtgcttgtgctggcgaaactgccgaaatttcgtctactgtacagaaacacgctgtgtctatcggtgaaacccgttcagattgcgtcgtattcgtttctccgccgcgttctgctctggttaatatcccactggctcaggccgttgataacctcgtagaatggcgtacaggctacaaaatcggtaatactaccccagttgataacaacatgaacgtaagttcaagttatgcgttcatcgacggtaactataagttccagtatgataaatacaacgatgttaaccgttggatcccgctcgcgggtgatatggctggcctctgtgtttataccgatcaggtatcgcaaccgtggatgtctccggctggctacaaccgtggtcaactgcgtaactgcatcaaactggctatcgaaccgactaacgcgcatcgcgattctatgtaccaggtacagattaacgcggttactggtttctctggtggtgctggatacattctgtacggtgataaaaccgcaacgactgttccaagcccgtttgaccgtatcaacgttcgtcgcttgttcaacatgatcaagaaagacatcggcgataacgcgaaatataaactgttcgagaataacgatgatttcactcgttcttccttccgtatggatgcaggacagtatatgtctaacgttcgcgccctgggcggtgtatacgattaccgtgtggtttgtgacactacgaacaacacgccggatgttattgatcgcaatgagtttattgcatcaatctacgtcaaaccagcacgttctatcaactacatcacactgaacttcgtagcaacctcaactggtgcggatttcgatgagttgattggttcaacgtcagtataacatgtaaggggctgaaaagcccctataaatacacatagaggttagaaaatgcttactgatattgtacgcgcctttgaatccggtgatttcgcacgtccgaacctgttcgaagtagagatcccgtacctgggcaaaaactttaaattaaaatgtaaagccgctactatgccagcgtctaccgttgaaaaagttccggtaggttacatgaaccgcaaaattaacgttgctggtgaccgtacctatgatgactggacaatcacggtatataacgacgatgcacacacaacccgtgatgcaatcgtagcatggtcaaacatgctgcatggtatgggtgaagacattacaggggatatccctgcaaactacaaaaaaaccgctacggttaaacagaaaaaccgtaacgacgaagtaaccgccgaacataccatttatggcctgttcccgaccaacgtgggagaggttactttagactgggatagcaacaacgaagtgagcacttttgagtgtactttcgcgctagactggtgggtttaaacgctataaatacaggggtagcaataccccttatcattatttttcggagttgtaaatgaacttttttggattagacaatgtgttagggtttttcaaaaatttcgccaaacaggatgaaatggaatttgaagcccaattaaaagatgatacaggttcgattgcgcctccgaaaaataacgatggggcgcacgaaatcgaaacggacttatcaaaccagcgttattcttctgtgttccaacagttctattccggacaggatccgcgaattcagaacaaaacacagctaataaatacataccgtggtatcatgacatacccggaagtggaaaacgctgtttctgaaatcattaacgaagcgattgttaatgaacaagggaaagatattgttacgatggatcttactaaaacgaattttagtaaaaatatccaagataagatcatggaagaactcgataccgtaatgaatattcacgatttcgataaccgaggctctcgtttattccgtgattggtatgttgattcgcgtatctatttccataaaatcatgcacaaaaatgaagctgacggcatcaaagaattgcgccagttagatccccgttgcatggaactgatccgagaatcggttacagaaaccctacccggtggggttaaaattttccgtggctatcgtgaatacttcgtatacaccgcaccgaaaaacggttatagctacaacggacagatttatagtcacaatgacaaggtaaaaattcctcgctctgcgattgtttacgctcatagcggccttgaagattgcgacaacaacattataggctacctgcaccgcgcggtcaagccagctaaccagttgcgtttgctggaagatgctatggtgatttaccgtattacccgtgcgcctgaacgtcgtgtgttctatatcgacgtaggtcagatgggtggccctaaagctacacagtacgtaaataacattgcacagggcttaaaaaaccgtgttgtatatgacgcgagcactggtaaagttaagaatcagcaaaataacctgtcaatgacagaggactattggctgatgcgtcgtgatggtaaagcagttaccgaagtttcaacgcttcctggtggcactgccttctctgatatcgacgatgttaaatggtttaaccgtaagctgtatgaagcgttacgtattccgttaagccgtatgcctcgcgatgatggcggtatccagttgggtaacgatggcggtattacccgcgacgaattgaactttagcaaatttattcgcgaattgcaaattcaattcaaccctgttcttgcggatccgttaaaaactaacttgatcgcgaagaaaatcattacagaagatgaatgggatgaaaacgtaagtaagattgcttttgtatatcagcaagattcttactattccgaaatcaaagatattgagattttggaacgccgtttaaacctgatgggacaacttgaaggggtggtcggcaaatatatctcccataaatacgtaatgaaagaagttctccggatgtctgatgaggaaattcaaagcgaagccaaacagatagaagaagaatcaaaagaagaacgttttaaaaatccagaagcggaagaggaaaacttttgatgaaagaatttatcgaagcaatcaaaagcggtaatctggtggaagctaaaaaaactttttactccatcatggaagaccgcacagaagcgcttcgtcacgaattacgcgttgaacttgccgaagctgtacgcatcgaaggcgaagaagacaaagaaaaagacgacgaaggcgctgataaagatgacgaaaagggcgataaaaagccagccgaggatgataaatccgataaagatgatgagtgaggtgtgtaatgcaacttgacatcgaaatcaccgccgaagatctccaggaacatttagacgaagcgaaagcccgtgtagatattctgggtatcgatgaaggcacggttaaaatcatcgaaaatttggcggtcaccgaaccaaatttagcccttgctatgatggcggttgttgaaggtttaacacttgatgaggtaattgtcaagcatgttgattcccgtggcaacgtagaacgcctcaaagacaggaaaacccgtgagcgtaatgcgtatcagacgaccggattaactaaatcccaacgtcgccagatcgcgcgtcgtgctctcaaaacaaaacgtgctaacccgtcaattgctactcgcgcacaacgtaagcgcaagaaagcattgcgtaaacgtgctgcactggggctataaatatgaatgaatcccaaatcaacgaaaacggcgatatgcttttaatcgaagaatggggtttaccttgcggtgacgtttcagaatctattttagaatctgttggggaatcaaaagacggtaaattgcggatcgaaggtattttccttcaagccgaaaaggttaaccgtaaccgtcgtttgtatcctaaaaacgtacttgaagaagcagttaacgattatattagaactcaagttaacacccgtcaagcattaggtgaaatgaatcaccctccgcgcccgaatgtggatccgcgaaatgcttgcatcctgattgaaaaattgtggtggaagggtaacgatgtttggggccgcgctgttgttgttgaaggcgacggtggtgatggtgacaaactggcggcgttgattcgtgctggttgggttcctggtgtttcttcccgtggattaggtaagctctccgattccggcaaaggctacggcgttgtacaaaagggctttaaattagctgtaggcgttgatgtcgtctgggggccaagcgcacctgatgcatatgttaagcctatagtggaaaatcagcaaagcaaaccgcttgttgagaataatagtgctgatgacgcttttctggcattgtccgagcgtttgaaaggtctataaatacattaaacaaaacaacaggaaaatcaaaaatgcttaaagaacaactgctggcggaagcccagaacctggatactccggtcgagttagacagcattttcgaatcagttgaactttctgatgacgtgaaagcgacattcaccactgtattcgaacaagctgtaaaagctggcgctgcaaaactcgctgaatcccacattacccagatcgcggaacgttccgacgaactggtcgaagctcaggtaactgaacgtgccgctgaaatcgaaactaagctgtacgaagatgctgataaatattttgcgcacatttccgaagaatggctgaaagaaaacaaagaagccgtttcccgtgacatcaaagccgacctgtttgaatccctgatcatgggcctcaaagaagttctggttgaacataacgttgtcattccggaagaacaggttgatgtagtcgccgaactggaagacgaactgactgagaatcagcaggaagttaaaaccctgtttgaagcgaatcaggaactgaccaaagaaatttcagaaatgaaacgcaatgcagtagtttcagagaaaactaaaggtttgaccgaatctcaggtcgaaaaagtagaatctctgattgaagggctggaatattccgcaaccttcgaaaataaactcagcgcaattgttgaaatggtagcaaccaaagctgaaaaacccgttgacgagtctgtaaatactccgcaaacgaaagatgactttgttccggtagttgaaagtgttccggcagagaaatccaagatcaataaatatgtacaagcggcaaaagccctttcttaatttcaaaaggtaagaaacaatgtctaagaaaaacgaattgatggaaaaatggaacgatcttctggagtctcaggaaggcttaccggatatcgctaccaaatccaaaaaacaactgattgctgccattatggaagcacaggaaaaagacgcagaagttgatccggtttaccgcgacgagaaaatcgttgaatccttcggtggtttcctggcggaagctgaaattgctggtgaccacggttacgacgcaaccaaaatcgcttctggtaactcaagcggtgctatcaccaacatcggccctgctgtaatcggtatggttcgccgtgcgattcctaacctgattgcgttcgatatctgcggtgttcagcctatgactggccctactggtcaggtgttcgctctccgcgcagtgtacggcaaagatccgctggcttccggtgctaaagaagcattccatccgatgttctctccggatagcatgtactccggtcagggcgcggctccgagcaacggctttaccgaactggcttccggtactgcgatcgctgacggcgctatcgtgttccacgatttctctgaaactggtcgtgtgttcctccagaacgtttctggctctccggttactgtaactggttctaccgccgatgctctggatgctgctgttatcgccgaacaggaaaaaggtactctggctgaaatttcttacggtatggctaccagtgtagcagaactgcaagaacagttcaacggttctactggcaacccgtggaacgaaatgggcttccgtatcgataagcaggttatcgaagcacgtagccgccaactgaaagcacagtactctgtagaactggctcaggatctccgcgctgttcacggtatggacgctgacgccgaactgtctgctattctggcaaccgaaatcatgctggaaatcaaccgcgaaatcgttgacatgatcaactataccgcacaggttggtaaaactggtttcactcagaccgttggctctaaagctggtgcgtttgacttccaggatccgattgatgttcgtggcgctcgttgggctggtgaaagctacaaagctctgctgattcagatcgacaaagaagcaaacgaaatcgcacgtcaaactggtcgtggtgctggtaacttcatcatcgcttcccgtaacgtggtttccgctctggctcgtatcgatagcggtatcactccggcaggtcaaggtctccagaagactctgaacgttgacaccactaaagcagtattcgctggtgttctgggtggcgtgtacaaagtatacatcgaccagtatgcacgtggtgattacttcaccgtgggttacaaaggcgataacgaaatggatgctggtatctactacgctccgtatgttgcgctgaccccgctgcgtggttctgatccgaagaacttccagccagtaatgggcttcaaaactcgttacggtgtaggtatcaacccgtttgcgaactctcgctctcaggctccgtccgaccgtatcacttctggtatgattaccaaagaaatgttcggtaaaaacgcatacttccgtaaagtatacgttaaagggctgtaatagccaacttttccaagagggaaccgcaaggttcccttttttattacataaataaagaaaagtttgtcaataacgcaggaacataaaatgagtgaaaaattttacacaattaacaagctggtgcgtcagtcacagctaccgcctggcctgtctaaaaaggttcttgatgaggcaaccggaacagaaacaattaacgtagctaatacccgtccagatctggtatctcttacccgtgcggtaaacaacctgatctacggtgaacttgtagcgattcaggaaactaatttgcctaccgcaaccctgttcggtgtgcgttatcgtaaccctaaaggcaatatgacgttttccagcgctgctacctattccggtaagtatgcaagccgtgatactattccagatggcgcggttggtactgcctacaccaaaggccaagtttttaaacacccgacaagcgatgtcgtatacgaagcaactgatagcgtaactctcgcaggtgctgatattgatgaagcgatcatggtcgcagtattcagcaataaattacgcctggcaagcgaagccgcgccaacaagtcagtatgaaaccagcgaagatattagcacaacttcttttgaaatggatcgttggaatatcaacgttcgttcccgtaaattcaaaactgaaatgaccgtggaacttatgcaggatctggaagcaaaccaattcaacgcagaaaatgtgattgaagatgttctgggtactgttgccagcgaagaagtaaacaaagatatcatccagactctgatcaacgtatcacatcgttacaacgttgatggtgtggtaacaaatggcattttcgatgctacaaccgcatacactgcaaaggatgctccggctttaggtcgtttcctgtatcaattagtgtgtgaaatggggcaggaaatgaatagaacgacttcatttgaagctacctatgtactggcctcttctcgcgttgtaagcgttctgtctgcgtctggttggatgcatgaaactgatgaaacccacccgttagcaacaggtcgacttaaaaacggttactatgtctatactgacaccaatacaccgtttgattacctgctgactggttgcaagtacgatctgggtgaaatggatcatgttggctctctgttctatacgccatacacagaagctgatcaggcaggttcgatcaagatttctgttgatcctcaatccttacagcctaaagttgctattctgatgcgctacggtttatcggttaacccatataccactgctgcaaacgaaagacttgtgaaaggtgatgactgggtaaacctctcaggtaaatctaagatgagtcagattgtgggtatcaaacttcctaaactgggttgatagtataacccaacggggataatattcaataggtggagtagggaaacttactccatcttttaataattattataattaatattaaattagat

SEQ ID NO: 4 - DNA, 48196 bp, unidentified
  source 1..48196: mol_type = genomic DNA
cgcgtgacccgtcaacaaagtcattcgagcggatctcgttgccgatcttcgcgttggtgatcgagccatcgcggatcagcgcttcctgcatgtacgccacgccgttctgcaccacgaacgggaacgttttgttgctgccgccagcgtacaccgcgaaggtgtcagcctgaaccaggaactgtgagctgccagttgcgtcgatgcccagctgaatgccagctatgcgcgggtttccgccgccggtgtcagtctgaactttgacgccccactgcgccgacagcttgccgttgatatccgcaacagccgttgaagtctgctgaacggtggaactcataccatccactgacgccttgattgtgccgatctgctgagccgttgaagactcaagatccaccattgcctggctcgtctgcgtgatggccgcctggttgtcgccgatctgcgcacgcagttgctggaagccgtttgccatcgccagaccgttagccgctgtcgtctcgttcaggccatcgatcgccgactctgcatcaccgacacgagaagtcaggctggtcagcgccgtggtgttggcggtgatcttgccctctgccgtcgtgacgcgggtggtcagggcgttaagcgcagaagcgctggccttcgtgtccaccacgcctgacaggtctgacaggtcgctattcagcttggtaatcgcctgcccctgagaggtcagggtgtttccctgctgggtgacagtcgattgcaggctggtgatcgcgttggagttcgccgtgatcttcccgttcgcggtgctcaggtctgcggtcagccgagtgatcgccgttccctgcgacgtgattttgccctctgccgtagtaactctggtggtcaagttgctgatggctgtagcattggccgcgttattgatctcgtcggtgacgtccacaaagaaaatgtcgtcaaagtagaagttaccggcagtcaaaagaacgttaatgctgaaagcgatgttttgatcgcttgctggcacccaatcgccagtaataagagtccagcttgtccctacgttactttgcgagtattcgacctgatgaatagggccagctccagtgtcggcattgccgatcctgaacttgttattgccttggtttccgatagtcgcgtttgaatcgcggcgcacgtatccgccgtaacggtaggtgcggcctttcttgattccgaggatgacctgagaaacggccacgctaccaccagaaagcccgcgcataatatatgcgcctgttcgtggcgattgagccgcgtagatatccgcgtaagcgttaaagccactccagttatcggttccacgctcaaagccagagtttgcgaccatgttgttagggtttgtcgccagcgctaccgcgtcattagtcaggctggatttcagctgcgtgagcgcgttcgactgcgcggtgatgtccttgccctgctgggtaacggtggtggtcaggctgttgatcgccgcgctgttggccttgatcgtcagctcttcggtgatgtcgtacaccttgaacgagtcgatccacacctcagcgtttgacgggtggcaatacaggccgaacgctgagccgtcaaatccgcttgccggggtaagatcggtttcccatgtcagggtctgccagtcagttgtcagcgtgttgttcttgtcggtataagagccttctacggcgccgttgtaattccagcgacgcataagaaggttcatagccccgcttacacccttcgcgcgcacaacataacggtagcggcgctgcccgttctgagggatcggattcttgttgttcgcgaagatgccaggcgagttgccgtctgtgcgcaccatacgcacgcccaccttgccatcgccatagtcgccgaaagtcaccttactggtgttctgcacgttgtaggcggtgtcgccttgcatgaagtcatagttctgaacgaggttttcaccggtgcggcgctgtgcttccagaccgttattcaggttggtgatggccgttccattgctcgcgatttggccttctgcggtggtcacgcgcgtttgcagtgcggtaactgcgctggcgtcagccttctggctcagcgttccgttgatggtgctaacgtcaccgttcagcttggtgatcgcgtctgcctgagatgtgatctgcccttctgcggtgcttacacggctggtcaggctgctgatcgcgcttgagttagcgtctgcggtggtctgcgccgcgtgcgcatcggtaacgtcggtgatcaccagatcgtcgatatagatgcgatatcccgggccgccggatgtgccacggcaggagatccacaggcgacctcgtgttttctttgcgccgtctaagccgagcttaccggagaacttgacccacttaccgcgaccaccaccagcagcaagccctgactctgtgatgacgaatgcgccaggccatgcgttctgattggctgaggtgcgaaccatcaagcccaaaacacagttccacccttccggcggcgtctcagtttcaggcatcatcgcccagcattcgaagcggtacacggcgctttctcgaatagccgtttcatagccgatagtcttatcagagttgccgttttcaccgttgccacggcgacacataagcgacttctgaccactgaatgagaagtcagtagtgaccagggcattagatccaccgatggcttgctggttgtcatacgactcgaacgatccatctacccacggattgctgttgctgtactgcacagttttcagcgagttgttcagctgggtgatcgcgctgccctgcgacgtgatgtcgttaccctgctgggtcactttcgtgttcagcgaggttatcgcgtcagtgttcgcctgaatcttggtgtcgttggtgatgtcgacaacgtagacgtcgtcgaaatacatcgccccagcactcagtgcggtagtcagctgaaacagcgcgttggtggtcttcgtggccgtccagtccatgaagacgtgttgccattcagacgtaaacgggccgtagttcgtaccgataagaagattgcctgatgcgtcagcgatacggaatttcgtgttacccggatcgttgatgacagtcccggcgtcctgtttggcaaacacgccgaagcggtagcgacgcccctgcgtgatctccacggcctgactgattccagcacttccgcctgccgccatcttgacaattttggtgccagaatgcggctgtgttgccgtgatgatggtggcaaggctgctccagccggtgaagttaaccgggccgcgctcaaacgatgagttagccagcaggttcccggggatcttgccctgcgcgtcgattgaggcgtcagttgcggacaggctattgctcagcttggtgatcgactggccctgtgaatcgatcttgccttcggcagtcgatacgcgggtagtgagcgcattcagcgccgaagcgtcagccttattgttcacgatgccggtcagcgtgctcagatcgctggtcagtttggtaatggcctgcccctgagacgtgatcgacccttccgcagaagtaacgcgggttgtcagctggctaatcgccgtagcgttagcgtcggccttgccttctgcgttcgcggctgcggtgacgtcccgcacctgccagtcagtggcgtaccatacagtgccgaagtccgggcctgcctggttgatttgcaggaacgggcggaaatagccttttgctgcgtgcgtggcgttcggcttgaatcgccatgtggttcgcgtccactgtgcgccggttgctgcggagatctggccgccgttcgcctgcggctggccgatgctgcccgatacctgcgttgacgtcccgatgtagtgttggaatggtgccgtcccggtgccgcacgctgccagtacggaaatctcgaacacctgcccttcgcggcaagggatgttgttcatcaccgggacgtgatcgcggtactgacacttgatcgcccacgcgtaagggcatccggcaggaacaccttccgacgtggtagaaaccacggtcatccccatttgcgggtatgccggatcaactgtcgggttagggatgaggttagcggcctgcgtcagaatccccttgatcgatgagttgatcgaggtgattgattcagcctgagagtcaatcttcccttctgccgcagtcacgcgagaggtcaggctgctaatcgcgccagtgttagccgtgatcttgccgttcgccgtcgacaggtcgttggtgagctgggtgatggcgttgccttgggatgtgatcttgccctcggcattgcttacgcgagtcgtcagtgactgcaatgcgcttgcgtcggccttattgtttaacgcggtgttgatatccttcaccgagttattgagggtcaggattgcgctgctgttcgcgtcgaccttcccggcggtctgttctacctgcgaggaaatgacctgcgcagcggatgccgcagccatctgaccggcaccactgaacagctgatcgacgttgtcggacagcttgagtccgaggttgataaagaactgaccggtgatattcgcaaccacgaattcaatcgtgctccagccctttttaagcgcgaacgagtattttgtagcacttgcgctaaaggacgcagtctcgacgccgttcacataaaggcggccggtgtcgtcaacaatgcgtgatcccggggcgatctcgatggtcttgtcagcgttgaggtaaaccagcgacttcgcgtaggcgattttgtagtcgccgtaagtcagaaaatccagcttcgcggcgtcggccatctcggatacggccagcggtggaacaccggacagatctgacagcttcgggatgtacccgctaccgctgaccttgatatcgaagatcttggtaagccagtatttggccttaccattctgagccgtgttctgcaattcagtgatggcgctaccctgcgacgccagcttgtcaccctgctggctgacagtggtttgcagttgctgcaacgcgcttgcatcggccttgttcgcgatctgtccctgcaagatgcttacgtcgcctttaagctgggtgatcgactggctattagtggagatcttcccttcggcggcagtaacgcgcgtagtcagtccagagatggcgctggcgttagcggcgttgttaatttcatctgttacgtcgatgaaaaaaacatcatcaaaatagatctcgcctgagttaagaatccaattgatgctgaatgccattgtcatgtcactaaacgggacatagtcctttgtgagcagcgtccagttggttccaacattgctttgggtgtagttaagttctgacaatgggcctgcgcctgtatccgcatttcccagtctaaatttgttattgcctaccgcaccggtggtcatgtctgaactgcgcttgacatatccgccgaagcggtaggtgcgccctttcttgacattagccactaactgagtgatgccagcaatgccgccagccttaccgcgcaggattttagaccctgaatgcgggacttgagccgcatagatatcagcgtaagcgttaaagccagtccaggctgccttgtcacgttcgaagccggtgttcgtaagcaggttgttcggattagcggccagcgcgatagcgtcgttgttaatcgtgctctcaaggccggtaatcagactgctgttagccgtcacgcgcccatcaatgtctgacacgtcggttttcagctgattgatcgcggtcgtgttcgcgccgatcttgccgttggcgtcagtcaggccggattgtagctgcgtgagagcctgggcctgcgattggttctcgctggtcagcgtgtcaaggcgctgggtgactgcggccttattggcgttgtagtcagtgcgcagcgtgttaacgtcgcttgagatggcctgttctgcggtgacgcgggtctggcgttcgttgtagataatgccagtcaccagcttggccgggtcggttccctcatagttcccgcgaagctgtacggccagcgtgttacgcgctgcggcttcggcagagtccgcagaggtcatggcggtgcgaagatcctgaacctgtgcctgtgacgcgcccggggtcggtcggccgactgccatccagtcgatcgcgtagtagttattggcgtcctgattgtttgagaagtcaaagcgcaggcggcgcacggtgccggatgtcgcccacaggagatcagggagcgacaggacagtgatcccggtggtcgggtcaaagtcaggtgccgggatagcaagcgagcgggtacttgtccagccagtctcatcaacaccgatccaatacagcttgccagcccatgacgggttcccgactcgcttcatgcgcaggcgcatgtacttatagctgcgcgcgtcgattgccagcgggtttggtgagcgcatggtggctgctgcgccagctgggtaaatccagccatcttggtctactgggagcagattggtgttggcgtcgtcagaagcccacccttccgggccgttgtcgaaataccagatagcgaggctgtcgaactgctcgccagtaccagcggaaatggatgccatctgctgagccagactgtcgaagccgtcctgcatcgtggtattggtggtgctgatctgcgcttcgacttcgttttttgtcgccagcaggttagccgcagcctgggctgccacttctgcgtcatccgtctcagccttcgcgatagcgtcggccacgtcctgagctgccttgttggcgttcgcgatgtcgccagccttgcggtcaaggatctcctgagcgattgcgctggcgtttgccgcccccgcgttagcggtgttggtgatggcctgcgcgttcttctggatctcggccagctggttgttcagctgctgctgctgctgctggttggttgtcactgctccgtcagcagtaacctgcgcggcctgcgcggcgtctttcgctgcctgtgcgctgtcgcttacgtctttgatgccgctggtaagttcgccgtaggtgtcggagcctttgatcgcgtcgtcgatgttctggtaatagtcgtccatgttgtcggacgtcatcgccatgaccggggcgctccactcgccagcatcgctatatgacgacacaaagcgggcgcgcacctgcacgcgttcggcaaatttcaggccggactgtgtgaacgtcccggtcgggtaggtcacgacgctgagatcgatccacccaccaaccggagcgccatttccgtcaatgcgctggaactgtagctctgtcgacttcatatcgatcagatcatctgtgccagtcacccaacgccatgtgatgccgttaacgatgcctacgccgttcaggccagctactgccgggatgctgccgcgcttgccgtcaacgaacacctgattcgactcgacccactgagacgacccgccgtcacgggatacggaacgaacgcggaactgataggtgccggtcagaacgttggtcaggtctacggacgtgctcgactggctggcaaggttagtccacccctgtgaccactgaccgtttgactgagaggttcggcgcacctgaatgtcgtagctgacggcctgatctacggtgaaccatgaacagtttacgttagctgagcgaatcccctggttaacgatactgtagccttcggccaccacgttagcgggtgcctgtacctgaccggtcgggatcagcgatgtcgggcggtcttcaattcgcgcgccggtgtcaacctgcaaatacttcgagtggctgtattgcagaccggtaacggtgaaattattgtcctgctcgttgtaggtgatcttggtgatgcggattagttccggtgccagcaccttagtatccagcaggaacacttcaccgctctgaatatcaaggttagcgccgtcgacggtgaaggacatccggtcagccgcgattgcattgatcacgcggttgtaggttccatccgatccagcttgacgaacgatcactctgtcgccgattgccacgtggtcggagatcatgcggtcggtggtgatggtggtgccggatacgccagcaacacgcccgccgaactgaccgccctgcacgtagcggttagcgatgccgacgacgtcgccgatcaggtacttgatgccgctcaggccgacgcggtagctgatctgcatgtcgttggtattcgacagcagagcccacaggccgcgacgttgcgcttcgtattcgtccgtgcagccgatgccggacacttccagcggctcaacgccatagcgctccacgaggtctttgatctgcgccacagtggtctgcgtcttatagtgcgccttcgggtcgtcaaaagtgaccatcgcgatcccgcgacggttagccatgctgccgtaggaatattcgaacgtcccgttcacgacgtcgtcgtttgtcacaacatggcggacttctgccggtgcatcctgcgcgaactgcaattgcatattgctgtagctgaccatcccgttaaagatcgacgccaggtcacggatgacgctccacgcatgcgcgcgtttctggatatacacgttacaggtgtaacggcggttctgcgtgccgtcggcgttcgtcaccagctcatcgcagcgctgtgcgatgctgtacatcgtccatttgttcaggaatgaggacgggatacggcggccaatgccgaagcgcttgtgcagaatgatgtcgtagacgatccatgccgggttatcagtccacgcctgcttaaatgtcccgttccacgacccgctataggtgtggttaaccgggtcatagttggacggaaccagcaccagacggccgcccatcttgatgctgattttcgggatgttctggaacgatttggcgtcgaagctgacgaacagtagggacgtccacgggtaacgaacgcgggcgtcgacgatctcggtgacagccacgatcccggagttgagcacggtggtatcagacttgctgtcgtcagttaggcgggtaacgcggatttgccagccagtgctgctcttcggcaggtcgatgcggtgatcgcgttcatagttgtctttctgcttgccgtcgacagcaccattgaaggccacggtgtaggcgctgtcgccgactttgcggtattcaatccggtactcaatgcgtccgcctacgcgatccccgtccttctgctggatgaccagccggaaattcattcggatgcggacggcgtcgatctcggtgttggtgatgttacgcacccatgcagaagactttttcagctcaacgttgatacgtgtttcactttccaccgccgggaagccgttgatcggctcctgctgcggggtgccgttgcgatattccagtgtaacgcccggaatgtttaccgacccatcatcgttctgaacgggcgtcccgtccagataaacgcgcttgggcaggtcttccgcgctaatcggcacggtttcaccctctgacaacgccaggagcatccttaccgttgcgttgctgatcagggagtctggatcttcaacgggggtatgcacgttgctactcccgcccttgtatcctttgatttccattaagaacgtacctcgttagcgataattccggcgctgatgatagcacccccgatctcacgctcgccatacaaaacgccaacgatgttaccttgtgctgtcgtgttgaccggctggccgaaggcatatgacggcgcgttggcgtcatcctcccggatcttcatgcctgtcgcctgtggggacagcatctgcataaccccgccagcagccgtggagataccagcagcaacgaggtaaggggagacagcctgcccgccgggaatgaacgacgccacgacgcccgcgacaatcatcgcagcgcccaggatggtctggaacaggccgcccttcttgttgccgatgatgatcggggcaatgcggaactcttcaccagcagggattggctgcgacatctcattgaagccgatgttccgctttccgatgaacggggcgaaggtcaggccgcgcgactggctgtcacgcatgtattgatcgaatccggggaggatggcggaaagggcgctgattgcttcggcgcaggagtcgaccgcgaggtgatggacgcgcccgaagcgcgcccccatttcgccgtacagtcggatggtgcttagctggtttcccatggtgtgatctccggtagtaactcatgtcggagaataccagtaatgcgcggctcaaggtaggtgccatacatcctatcaatggtcgatttgcggttcattaggtggtgcataatcatcccgtctccggtgtagatcccgcagtgattgcttacgctggacgcgatacggaacaccaccatgtcgcccggctctgcctcggccttcttgataaatcccgctgctgaaaagttctcatccgtgaaaagctcctcacccttctcccaccacgggtacggcttgcggaagtcagggagctggatgcctcgcgaacggtgccacgccatcaccaggccatagcagtcggtcgcacccagcacgaagtcacgacccagcagccccttcggctcctcaaagaacaccgccatctcatccttgtctggggcgtagatgaaccacggtaagcaagtttcctgcatgagctggcgatcgaggattgacggatacgccagaccgtcagcgccagggtgtgaatggatgacggcaacgatattgcctgcgtcctcagcctctgcgaagtcctgcggtgcaatgcgaaaactgttcattttgtcggctgctgagttgatgacaggccagtattcgaggcctccgcctgaattcaccagcagcccgcagccttcttgcggcgaacactctgtaaggtgttgtttaatataggttaattgctgttccgggatgtcgtttacgtcaatcatttttgcctccacttggcaccacctgaaattttaaaccattgatttacaatgcttaatttcaggtgctaggtggtatgggtatatatatttattaccataaatacatataagacatacccaagaccatataaataaaactcccttgggagggtttttattatatatggctatggggtgtattcttatcttcgtcagtcgaaaactgagggcctgaacggcacgctgtcgcgtttaacgccgtcaggccatacgttcggacgtcttacgcaagaaaacgccgcagaacgcgatacagtgcgtttaatcaatcaggcgcacagagataaaacctccgtagtccagaacggccgctttcgggtcactcaccagctgaccgaagcgtaggcggcaatcctgaatgcacccgccgcactcatccttcgtgatgtcgtccacctggttcccgtgcttgtcgtaccactttttagctgtgccacggttccagctgcacccgttttcttccccggcgtccaggcctttgccgtaaagaccgcgcgcctgccactgacagaacgtcgtgatgctgcgcgttggcacctgaaagttctgtaggtcgagcggcgatgacagcgcgaaccgaacatactcttcgccctcatagtctggccgatcgatgtagtaaagctgcgtccactgctgcattgagtcggcgaactcgttaccatctgtgaagttgcgcggatcgagaaacttcgcgtaggtctggatgatcttgacctttgccccgaccatctgctgataggcgcgcaggtaggcgctgacgacccccgactggttgccaatggacagggtaggtgtcccctgctgctcgctgctgaactcgatcccctcaaccataaacggccaatagccatattctacgttgtcgaaccagattgacttcggtgccagcttggacgcgtcaacctcgtgcgggttcttattcaggatgctgattcgcttgatctcgatctcgccgaccgcctgctgccacaggtcaatgcggatgccgataatctggctgtttacccagtctgaaccgccagcgctcagcttcgacatatcgaacgagaatttcagccatccatcaccaagatccttcgttactgacgccaacgccccgcccttggtgtagccgggagaaaaatcatgcgctgcggttttgtagtagatctgatactggttgtcagttgatggcggcggagttacccagcgaccaaccacctcgatcacctgatacttgccaccagtcaggccgccagagaactcaggcaaaactaggttcgagtcgacgcccagcgacttaaagttgatggtgttccggtcttcgttcttcgtgacggtgccgcgagtattggcgcttttgcagttgaaaagctgatcacgggtcagtgtgctgttcgcgctgtcgaggatctccttgctcgtgtgcgggagctggcaatagtggccccggatgatccccgcgccgaactcggttccgtcgatctccatgaggatgatcttgccagacgggtcgagctttgtggcttcgtcgaaaatggtgttgctcatcctttcacccctgtgtagatgcccacggcctgctcggctgtgaaggtaatgttcatggttgcacgtcccagcgcgacatatttgatcgtgcctgatttcacggtgtaaaggcccagttcgccatgcggcggaaccatctggaacgggttggtgatgtgcgctttcaggaaggacaggatctggttgccggtcttggcgttgccagtccacgagcagggcacctccataatgaacggattgatgccttctaaaacgttctgctgtgagccgtcgccgaagctgttcgatcggctgcggtctttcactgatacctgttgacctgccgccagcggccagatccacgcgtctaatgtagccataaaaaaagcctcctatgtgggaggctgtaggttatcacgcgtgaccgttaataagcatccagatctgtccacccggggagcttgcccgggcgatgccgtcctgaatggctgcggccattgcatcaccgtaggctctgcccagcttgccagactctgacacgttggccgtcgcctgcccgttctggtcgacattcacttccatcgacccgatggagacgccgccaccagcaccgccctgagcacgaacaccaagacgcccgctggaatccttcgccagtggcatgatggcttccggcccggcttcggcgaacaccccgcccttcgcaaacggcttcggcttgtcatacgtgaacagctgcggcgtggtgtagacgcggttgctgtaagcagacagcgacgggctgtcgtatacgccacccttcgcattgaatccgatgctggacatatcgaagcccatcgcgccgccgatccccttgatggctttgaacatgagccatttgttgatcatctgaaccatcatcccaaggatggattttgtaaagtcggcgaacgacgccttaccggtcatcacgaaggagttgatcgagtccagcccggcatccattgcgctagtgatggccttctgtacgttggctgaggtgttggtggcatccttaccccacgcttcgatcgctgagcgtgcgccgcctgcccagtcctgcgttttcgcgtcggtagcctgccgcagcgcttcacgctggcgtgcgtcctcgtcgatttgctcctgagtcgcgcctttgtccctgagggccgccgctcgctgcatattctccagcagccgcgcagcctcatcggctgatagaccccatgaggcgttaatggccgccacctgaacagacaggtcattgccgctgcgggtcagctcatcggtgatctgcgcctgccgctccagctgcttgacctgatcgcccagcaggccgacggtcttggccttcgcgagaatctcctctttgctcgccagaagtgactgttcgtccttggtgagtgcccggcctttggcgtcagcacggatgccctcaaggatggagatcttcgcgaccaacagctgatagttcttcatctgctcggaggcgttgacgtcgaaggcgttacggtctttcagcgtcttgatctgcgcccgtaatgccagctcctgcgcctgatactgctcaaggatgcgatcaccctgtgcaacggtgacagccttctccttgttgtgcttcgttgactcattcgccagcttgctgaccgcttccctgctcttctcatcggtagcgccgctgccggtagcgccgttggcgttgcgcgcccgcgcctcagcgtctgcctggctctcaaaggcccgcttgctgacctccgcgaactccttcgcgatctgcttgcccttctcgatggactcccggccatttttctcgacggtttcgacgtcgatccccatcgcccggagaacgccacggccatcaacgcccggcaccttgtccagcaggtcagcaacgcccagcgtaaatttgctgtccatctgcgcaagatagttcagcaggtcgtcgatcgatagcttgaccattttgaagatgtcgacggctcggtttccccacgagcgcagcacgatccccatatcgttaaaggcatccgacgcggcggttttcagcgtcttccatgcctgaccgacgttatcagtcttctccaccacatcatcggcccgcttattcatggccgttgtgtagatgtccagcgcttcggcggctgcggcctgctcacccttctccttctgcgtctggattaggtgcttcatctgcgcttcggtcatgaagccatactgctcattgagcgccgcgatagacttgatcgggttcttcaccagattatcgaagtctttcatgacgtcgccagcgtccagcccggcatctgacagcttcgacgttgagatcgccaccttctccatcatgtcggctgtcatcgtgcccttgttgttcagctcgatcagccggtcggtgatgctgctaatgctgtcgccagttgacttctggatcatgacggcggccctgttcagctcttcggctgacttaaagcctgccccacccatgagcgtcaccgatgcagcgagtcgatcggcctggtctgcgctggtgtaggctgcataacccattgcagcgatggctgctgtcgcgccagccagcccgaggaaggaaggggaaatgaattgtttaagcgcctggaatgtgttgcccagtccgccgaacgagtctttaatctgcccgccctgctggatcatgatcaggaatggattctgaccccctgccagctgggtgacgatatcggtcatctgcgccggtaacatacccatagcagcgcggtattggccggtagtgatggttaatccctgctgtagcgtcttctgcttctcagacgtcacattcagaccgcgcatagccgcgtcgttgcggtcgatgatcccggcacggttggcgaggatagcgttgtactcctccgcttccttcgcgcccagcagcccgttagcctgcgccttcgccagtgcctcctgctgctgcgccaggtcacgaagctgaacgcgcgttggcctgatgcggtcgagcaggttttgaagctcctgattctgccggtacagccccacggcagcgtcgccagcagcctcctgcgtctgcttcgcctcgttgttgaagttgtcgaccgctgcggctgctgagtcggctgacggcttcaccttgtcgaacttgtcgcccagcccgtccgctgccctgcctgcgtcctgcgccgcgtcaacaaggtctgcgagggatttggcccccgcgttgaccccgctggcgtcgacgtcgacgatcaagcgttctgtgttttcactcatgctgtatcactcctgctcatgagaactctgatcgcggccccctccatgattgccaggtcatccatgagcaggcgatcgaacttgacgccatacaggtcagccatgacggggatcacgttgtagtcgaggccgattaaaccgcccggccccgtgcgccattgggtatcaatacgctggtaaaaataaaagctatcaacaatctctgctgatagctccacttctggacggtagtcttccagctcccccccgaaattatcgaccagctgctgcggcggatcggggaaatacagaccctcaatcgcggcggttagtgcttttggcgcagcttccacagctcggactggtagccaacgctgatcgacataaacgccgtcgggtagttatcgaacagggtgatcaggttctctttcgtgaactcgtcagacagctcccagccggttgcgatgtccagcacaaaatctgccatcaaaggatattgcagcacgctatcttcgacaacggacagctttttgcccttgtattcctcatccatctcctgcacgcgcttcgccatcgcttcctgcttctctttcagctcggtcagtggcatgcgcttgaacgtgaatttcagctctgtaggctcatcctgccctacggtggtgatcaggatcggaagttcgaacgtgccagcgggtactaacttgaattttgcagccattgtctattatctccagatatgaaaaaggcggcctaagccgccctgatgatagcacgctttacgcggcaggatagatcaccatctcactgaccagactcagaacgaggctgttcgtctcgacgttgttcacttcggatgccgggatctcgttgaaggatacctggcagccataaacgcgcgtttctttcgcgcgcttgttgtagaacttgaacgccgtcacgtcctgagtgcgatccagctgcttcaacacttcacgcactggcgcgctggcgtcgtgcgccatggtgaaagtctgcgtcgctgccgacttataggtgttgatgttcaccgcgcgctcgtgctggatagcctggaacgtggtggtctgctgctcgttaccagcgttggatatggtcggggtcaacggcaggtcgatccacgcgttgatcttgaccagcgtacccgcgccaccgcctgccgggtaaatgtcggtgtcggaggtgtcgaccttctccagcgtcactttgccggaggtgattgccttcacgcgacacaccaggccattcatattgacccagctggtaaacagctggacgtagtcgccagcggcgatacctggatcagtagctgtaagggtggctactgcctctttcgcgttggagatacccgacacggcaaggcttgcgcccatcgtcttagcgatttgcagcgtggagccgttcgggatgttgtatgagagtttcgtagccatgttagcctcttacgttgttgatacggtagttcatcgtgacagccacatgcagcccggcgtcgtcttcatagtcagcgccgatttcagccggtgccgtaaggtatagctgctgatcgtcgtcgccgatgctaacataattaccgtcatagaacatcgcttcattgaacgcctccaccagcgcatcggctgcatcgtagatctgccgggtgccggacaggcgcggagcacgcagcatcacctgatagatcccgcgcttcgccaggtctgactgctggaagcccatggagatagacggggccgggatgtgctgcgggaagccgaccagctgactcaccgcctgctcgttcatgtcgttatcggcgctgttacgccacacaagggcgatattgttgttgttaccccactgcattgcgattaggtcgaattttgcctgaatctgtgaagtgctgatcataatttttgtgcctctgctgttgctgccgcgaatgcttcctcaaattggatacatgagatcctgaccatcccggcgggagcctgtcgtgagtgcccctcatattccagcgggtagccatacggcgaattgttaacgaaataaatatgctcagccatcccgacgcggaagcgctcgacggcgttcaccattttgttgatggtcggggtgcctgacttgtcccgttcatccagccactcaatagggacaaagtcgatccccacctgccagttagcccggaaccggccgccgacgtagcccttcccgaccgggttgacgccctgctcattcttgagaagtcggggtatgcgcgggccgactggcccgacaggggaagagaatttcgccggtgctgcaacgatgttcgcgcccggcttgaggcggcgggtgccgcgcttggtcgtgtagccgaatgtgtcgctttcgcgcatggccgttcgtaggtcgctcatgcggttgcgctccttgacggcctgctggttgcggttccacaggtcagggttgccgacgggtgagcgctggatgatcatcgcgaagaccttcatcgccgccagctgcacgatctcttcgtgacgctcaacgaccccggcagcccactgagagacattgttggcgaagattgtgccgttccgcttgcttgccattacagccccttgatcctcagcttgtacacgatgccgtagccaccgtctgggataaccggcttaatctcggtgatggagtacgtgcggccaccacctgagacggtcatattcatcttcggctcccactccttcccggtggtgtccgtccatgccatgacgatctgctgctccccgggcgggatggttgccagcccccaaaacttgaggtcgacgccggtgatcacgcccagcaccttgcataccgcgcccggtggcgtcaccacttcctcgccggtgactgggtcgcggctgatgccgcccggggtgctgatggtgatgactgcgccgtactctttgaacagcttgcgggcctctgcccgcagttcacgatatagcttgttcattatcagcgctccatcttgacgttacaaccgcgccagttgccttccagccagtgcccgatcatgcccatcatgtatggagcctcgaagcctgcgctgtataggctctgctcgctgtactcgacatcgatagcgccctcgatccgggtgcgtttcttatgcgcgccagccgatgcggtgttgaactccgttccagagtcgacggcgtcgcacacgatggtgtaagtaaagcggaggacttccggcggggtgtcatagtcgagacagttgtagtcgtcgcagatagtgcgcggccaaatgtccgcctggccgggttcagcctgctcgcccttccatgacagtgaccacagccacaggttagcctggcggagcgcggtgctcagctcttcgtcagtcattcccgtgtagccgttggccgccgcgaatgctttcaggtcgtccagattgccgatcatattttgctccaatgaaaagggggccgattggcccccatattattcacttcttcgcttacgcaccagctcctgctgccgggatggtagttggggtcagcttcataatgatccccagcgtctcgcgcacgttgcgagtcggcaccaccggatcggcgttattgccaaccggcttacggtcggtttcgcccttctcggcttcccagttctctttcttgaccaggtcggccatggtcggagtcttcttgccttcggtggcggtgcggaacgccatggtaggacgcatgcctttgagagcaatgctgtagttaaactcaccttgccaccagctttcaatgttctcgccgcccagcttggccgggtcagcagccattttgaggccggtggtcgttacctgaatggcgttggcggccagaccaacaatcgcatgatcaggtgcgtagatcgcggagccgccggaggtcgccgcagagatgccagcgcttgccgcgtcggataccacgaacgaacgaccgaagccatcggtgaagatcttcatgttgcccagctcaaataccagcttggcggacttgaccgcttcacgggcggagaacttcgcccactgggtgccggacatgaaccaggtgcgaatcaggtcggcctggtcgccgaagatggacgccgccagcgggaagtcttcgacggtcggatacagctcaccggccttgctggtcacgtgggcgccctgggtatagataccatgaccgaacgcttcgatcgcagccacgccagcacccatcgccactgtcacgtagcgtttcagcatggcttccgacgcgagggttgcgatctcggctgccgcgcggttcacgtcagtctcgatcagtcgcagctggccggaggtgatggctaccggcccaaggcggccagcggagttgatggaaccgcccaggatgcgggaaagcaccttcggctgaaccacagtgttaactggggcgtgttcgttgcgatcctgcaccaggccgtcaatgatcccaatggtcattttctccatggtttccttgataacctcgccgctgccgataagcatggtgccaccggaagccgcgttgaacacgttcaggttttcagtcagaagctgaacggtcgtaccgatcagttttcgttggaagatagtaaagctcatcgcgcgatgtcctttgagtgattaaacgtctggatgataaccggcaactactggacaagcaagaaaaagcccggcattgccgggcctgtgcttacttactctgcgtcgctgatgcttgccgcgatctgttctgcgcggctcagctgcttaccgcgcacatcttcaaaactcgggagcttgtcggaagcagaaggcgtcggggtcggtgcctgatggcggccggtgccagaggatgcaggcgctacgcacaccggtttgtaagtcgggtctgcccggaactcgccgatcaggtcgttcagtgacatcgccgacggcttgccgtctttcagcacgcgagggatgaagtcggagccatcttcaccaccctcgacagacaggcgctgctgcaacgccggtttgaacagcgcggcatactccttgccacccagctctgcggccagcttatcgatctgcgcgttcaggaagtcgtcgcggcgctgcttgccgaagccctcgatcttgctgttcaggtcggcgatctggcgcttatagtcctcttcgatggtcttaaagtcgccgttcttcttcgccaggtcaagcgctgcctgtcgggccttctctgcttcggcggccttctctgcgtcgatggtgcccaggcgggtttgaagatcagccatctgctgctgcatggcctgcacgtcaggcatgccttcgatgttcatcacatagttgccagaatcaccgactgccttgtatgcggcctgctgctcaggggtgagggcgtcaaacgcttctttgttaatcagatatttccacatgtgatagctcctgtattgtcaacggcacgatgttagtcttctgccgggatacggtcaaggtcgcgaagctgggcgagtgttaaatactcccccttgtcgttgaacaggtcaggaggcgagatcttgccgtcgcggatgagctgcgcccgctccacgccgaacacctgcgttaacgtgctcataggctggcgccccacccagctcgaatagtccatgtaaatcggcacctgtccgttcatgctggcgcgcgacgcgcccttgatcttgactcccgggacgcccaattcctcccagctcttgaacacgaaggtcgatgtactgcggcagttcatgtgcagacgccctgggccagcgccgtagggcacgctatggccgatcggcgtgtgcttcttgtcccgcatgtacagcagctgatcgcggatgatgcacagcttcgacgtcttattgtccagcgtcgatagccactgttctgacttgatgagcggtgcgttcgcctcgccgatcttgtcccgcgcctcagctgcgacgtgcgacactgcgctgcgggtgacggtggcaaggtggcgctcgttggtgccgatcaccccgtctttgtaggccgctgctgtgctgcccttgacccggcgaatgatctggtcatacgtctcgccctgtagaatgccctgctgcaccgcccgaccgatcgagtcggtcatggcctcgcccaacactgacgggatgtcacgaagaagcatgccctggaacgggcgactgttcgccgctgcccatacctgcgtttccgggatctccaccagtccgccaacgaagtccagcaccgggttagggatgagcgttcgccacgtgcggtactggtacgccagctcgccgttactcagcgcctcaaggtcggctttgagctggccgtaggtggttttgtagatgcggttgatcgtcgggttaatggctgctttgatggcctcaagacgcttcaccgtgtagttgtcggcggagatctttgagtcgtccagcgcgtacagcaggcggccgaccacgtccacggacattcggcgcagtagctgggtcatcttcttcgcctggccttcgctgtagcggtagaggtagaggcggtgccttaccgcctccgacgccatccgcgagttaacggatgtcatttagcccccttcttcggcgcgctggccttcttcttagagatcggcttgtcttcctccgggtctttatcttccggcgggttgtccagcccctgctgggtctggcgagcagccgcgttgaagatcagctgcgtttcttcggcaccgtctttcagctcctgttcaacgtcttccagatctgcgtcgttcgggatcaggccgatgcgctgctgccacgcgaggaagtcgatcatacgcatcatccctgactgcaccgccgccatgtaggctgtcagttcggtcgggttcagcacgatatcttcgtatcgcttgttgatgtggacgttcgctccttcggtgccggtgaagtccttcaccatctccattgcctgattgaacgccgcctcaacgttgccgacgcactgggacaggatcgagttgtcagttttctcatccgcgccagcctgggtggcggtcttcgttgccccgttgcgctcaaccagcttcgcgcccagcatggcaagctgcttctcacgcttctccagcagcgcggcggccggggtgttcggtggtgcaacgaccatactggcggtaggcgtgccggtgcccatggattgcagaatgatcgcctcgtcaccaccaaccttgatactcggattgtccttcacgaagttctgaggcacaccggcgatcacgaaggtcggctggccgcagataaacgagctgtcggtgttgtcggcgtcggcgttgtagtgggcgatgttggtgttcgcgatgtctgacagaggagccgggtcaatgtcgctgtcgttcttctcgctaccgaaccagcagaacggcagatagtcgagctgctttccgcgagccatgatcgggcgcagttccggctgctcctgattcatgttcccgttctgctgaatgaccgaggaaggcagcccggcggcaccctgtagttcgtccgtccacaggcgggaatatgccttgccatccaccagccgcagttcaaggtagcgaaccacctgatagtgctcaaagccgtcgtagtcgacgtcgtccaggtagcgcagcacgatgagcgaatatttgccgccgctcttgcgccagttgatgatctgccggtggtcgaacatgcggatagtcgcgcggccactattgaccagcgtagtcacctgcccgacgtcctccggggcgtcatagtcaaccagcagcccaccgcgcccgaaggtgatgttctgcgctacgcacattcgaacgagctgatccatgtccagcccctcgccgtcgatgtcggtcgacaggtagccgatggccgtcggcaaggtgtaggtggccggtttggcgaacgcgatgccgaccatacccatctgcgtgcgataggtggcgttgaggaagtgggcgcggcgcttgtacgcgttgtaacgcttcattgtccacgcttcgggcttcggcaggtacagaacaccggcacgcttgatgaccgtctgtcctgcaacgcagtcctcgatagtgcggtattcctggttaaaccgcttgtaaagcgggtgttcggtggataccgtccccgcctgcggcagtgtcgtgatcgtcatatcatcgtacccattcaatattatttgctgagatcgtgccattatgcacgacagggaacttatagaccaccgggtaggtgcctgcgtcgttcatgtgatccttcccggcctccttgtcaggcttgcccttgtcatcgtagatctgctgctccagacattcgacgaattgcgggcaccgcttgctgctcacgaatagccgacggcggccgctggcgttgcagaacatggtgttcgcgctgatcaccctgtccttcacggccgggttagcctgcccacagtagacgtcgaaccctgcgctcatgagcatcgacaggtctgacatgctggcgttcttgctgctggtgtttccgcctgacgcatccgggtagacctcgatcgggtggatgtagccatttcccgcattctggtacttctcgaccagccagcggatgacatccggtgtgtcgatgccgttgtgtcgctcatccactgcatgcagttcggcaaggccgtcctcgccatagcgctcgacgtagacgacggtcgccatcttgttaacgttgaagtcctggccgacgatcagcgtctcgccagggatgatctccacgtcggtgtcattcagctcgcgcttaaagttcttatagaccgtccccgatttcaggttgacgaactgccccttcgcgtaggcctcgaagcgctgcgggtcgtagctggcgcgcagggcgtccaggtagtcggcaggcaggaatgggttggatgaggtggcggcctggatcatgagataaccggcctttcggctgcgctccttgtccttcgcccagcggccatacaggaagttgaacccctctggcgtgcagtaggcgctaaccctgttcagcgggcggtctgacggaaggaagtcgaacggctcatactccttcggtgactgacggcagcgggcgattgctgcgcgccatacccctttggcggcctctttcttgagggtgtcgatctcatcgcagtggatgcggaacgcctcccagccgaccaggcgagccgggttgtccatggagcgaaagagaaagtcgccgatcccgccgtgggaggtgtagatctccttgttgccgacggtcttaaagcgaatgcccagctctgagaggatctgttcgatacgcggcacggctatcagcttgcacaggtcgaacgttggctcaaggatggcgatcgtggcatctgcgccaccctctgatgcgtcaagcacggacgacacggccatggtctgactcttgcctgtaccgaagcccgccacgaaggccgggtgtttgcacgacagttgcagaaagtcgttctgaggtggtgtgagtgtcaggtcaatgaattgactggcgtcagattggatagacataaaaaagccccgttgtgttaacggggccatgatagcagttgtcaggtcaggatagcacgcggaggaaagctgtgtacctggtagcgatgtgcgctacgccgaccaggaggaagaccgcgagcaccagcttggtgatctggctgacctggttggccttgagccgctccctgtccattgcggccatgtgaattgcgatcatcgcgatagctgtcaccagcgccaaccacacacccattacgatccccatcatttccacctcgctgcgagtctcattaaagcctatcagtcagtcacttcggtgatcaaccgggcaaatggtacaaagtgtaagcaatcagaacaatccgatggtgcgaaggaagcccgcgacgatgaacagccagcacgcccagcggaacacgtcgccagcgatgtcgaaggtgcgagccatcctgatcatgcgcttgtctttcccggctccgatatccagggccgtcgcccaccctttgcagcagagaaaacaaaacatgcacagaatggcgctaaagactaggtagaaggtctgcattatgtcacctcattgcggcccgctgggggccgctggttaatgatttgatgggttacatggtcagcttgtcaagttcgttcttgatggcttgctttaacgcgctgctcatctcctcccggacgacttcgcgaatggcctctttcatctcctcgcccatggtcagcttgctggctggaatgcttccggcgatcaccgcgtttccgtgtttgagcatggcccagcttccatcgctggcaacgacatcccctttcagctgggtgactttcagtgtgccgcacatggtctgcttcccgtcgatgtccaccgtgctcaccttcacctttgccttcaccagcgatagcagttgctcgttagtgtacgcaacggcgcaggtgtcggtgtagctcttcgcccacagcacccaggcgtcgcgctgtgctgcgatggccttcacggtcgcctccagcgtctcaacgcgctccttgcgcttgcgcattgctgaggtgatggcggtacgttgagcctcagcgcccattgatgacgggctgcaaatgacgtctgtagcccagtcgtgccactcattgagctgaccatacaggcgatcaatggtgtccgcctggcgcttcacggtgtcacggtcaaaggcggtgcctgctttcaggtcttccgcgagctgcttatagttggcgatctccatgccagcgttagccaggcgtgctgcgagttcgctgttattcttgctcatcgccttcgcgtcattggtgagcgcagtgcagcgttgcgttgctgcgccgatgatgtcgcgcttctctgcgatctctgcgtgcaggcggtcaatgatttctaacagcctgctgatctccttgcgtttctcgaccagttcgttagccagctggttagcctgctgcccgttcttgtcgcgctggcgcaccaggtcgacgatggtttgatcgaggtgtttggcgcgttcttgcaagtgggtgatctcttccgctgcgttgcggttgaggttgatcacgtcgtcccgctcccgctctgctgccttccgcagctggtctgatgcgtcggcgctgttgcgcgtggcgtcatagcccttgttcagctgcttgtttttgttgtacgcgctctggatctccgacttcatgattaggcgaagattcaggtcgttggcgttgctggcggggtaggtggcgaagtaggtatccaggatgtgccgggtgtgcatgcgccattcgttcagctgtccatttactaaagccaggtcttctttgcgttcaacaagtgcggcctcaagcgataccttctgcttagccagtgacataacggcatcggccagcacacgcagggttccgaccttgatcttaacgtgctgctcggtgccacgaccgtccagctcaacatcaatggcgcgagccagtctgatgtcattctctgcgtctgcatttctggaagcgcaaacgagaacgtcgctaactggtgccggtgccggggaggtgaatttcagtgattcagtcattttgatgtcctgtgcagtaggggcaggattgcccggcccctatattcctgcgcagtcatagatatgtcaagcagtatttagtcgtcaccccagtcgacagcttctgactcttcccgcggcttctcctccttcggccgctcgctgacgatcttcaaccgcaccggcttgttggcgtcaccggtcacgacgatctcagtgttgtcgcggtagccgaagttcgctttcagcatgaaggtcgcgaaagtgctgttcgtggcgaagccaatattcagaatcatctgctcgtaaagctcgcgcgcctgcgtgtaagcgacagcaaattccttatgcttcgaacgccagtcatgaaacgttgtcgtcgtgatgccgatgctttcgcagaagttgagaatagacggcatgtgcttcgggttaatgcgaatgttgcttttcccggctgccgtaagtgagtgctggatatagtcatcaacgtcgacgcggaaatattcaaggagtttttccggcatgtcctcggtgtagctggttggtctgccgactgggttccgcggtgtcgtcaccttcaccttgtcagtcatgttggtttcctctttcaagtggctctgcctcagtttacccctatacggcatggtggggagaataaaaacgcgcagccactgcgtagcgcttttttcttcccccatgtgcgtaagggtgtacgtgtttctgtaattatatgggttttatatataatagggataccacctaacacctgaaattaacccttcaatatcagacacttaaaagttcggtagtatgaccattttcctcctgaaaatttcaggtagtcctttgttatcaataacttgcgaagtccgcctgatgttcaggtggcgttgaggtggcgagtagctccgcttgagtctcgctggtttacatctgctcaaaaaacgtactctgtaagccattgaaaactaaaggcgtgatgaaaattccaatagctggtatttacagtctataaatagtattggtttacaggttttggcctgtttttcaggcggaaagtaattgatattgacacggtattacctgccgtgaataatgtccgaaccaaagcaggaggaaacgatgaacgaagagaacaaaaggccgatgacgcccgacgactggaaggcgttactgggcgatcaggagaaacagcacgaagcggcggacattctcaaccaaccaatgacccgcgaggaagaggacgaagcctattcgcaggaaatggccgacatgcaggcttacttcgaccaggtagcacgtgctgaggtggaggagcgtgaacaggcggaagaagtatcgccacctgttccacctgaaccacctaagccgaagaagaaagacgccggtcagcgccaccttgagctgcaacgcatcgttcgcgaggagaatgaaaagcagaacctcggaatggacttatccgcccagcgcgtcgaggtggcaaagcgtctcgccgaagaggttgagcaggggttggtggaagatcccgcgctgaaagattacgaccctggcgagtatgtgctgaacacctcgccggacttctacgacccggtgatcgaaggcctgctgaaccgccgcaccatcaacgagatcaacggtgacgcaggcgcaggcaagacgacgctgcttgtgcaaatggccgtcagcctcgctatgggtcggccgctgttcaactgcttccgcgtgtgcaatcccggcgtgagtgtgttctttaccgaagacccggacagcgttgagttgcaggtggccgcctggtcgctgcgcaccggcgtcaatctccgtgactggatcaaggtgttcaagcgaccagccgacctgatggagccaggaaagttgcgcattcagaagagtcgcgttttgcagttcgccaacggcaggccggtgaatctggtcatcttcgacagcaaaatgttccacctggcggcggccaacaataacggcgtgagcatggacgaaaacagcaacaccgaccagcagctgatcaccactgccgggcaccggttcgctgagtcactcaactgcgccgggatcttcatcccgcacgtcagcaagggaagcctgatgtccggccagtatgatcttgagtctcgtggcggatccgcagcgaagggcgcggtgtataaaacgttcagcctggtgcgcgagaagacacagaccggtaagggattgaacgcccgccagaaggagacaggctacactgtcctgaacgtcgggaagagccgacagggtggtttgaaggggcgctttaagctcaaaggctttcaggtgccggtgttcgcgaaggacgttgaggcgaagaaaaaaagcacgtatgagaagaaacttgccccagggcaggaggtcgatcggccagacttcatctacatcgacgacgcgacgaaggtctggctgttcgaagaccgcgtttacgatatggacgccggaacggatgaggagcactttgagccggaggagaagcgtcaggcgcacgtgtacacgccattgcaggaagccgtgtattctctgctgagggcggagccgcacggaaccgcgccatacaaggagatcctgcaccgtatcagctccacggtgtttaaggctgacgggacgccgtattcacgggagtcagtgcgcgacgcaatttacaaaatggctgagctgggacacctgagcaaagagtctaacccacacgaagcccggaacccttactacacgatcaaagatgccgttcccccgcttatgggtagctgccgtgataaccactgaggaaaacaacatgagcctgatttgccacgttacaagcatccccgcacttctcgctaaagcgggcagcatgcgcaagctgaccaccaagaccggcctgaacaccatgaccattctgaaattcagggacgattacaactgcgaacgtcacgcgatcattaacggcaggctgatgacctggcgcgagacatcgtccgcagatttcaaagaattcattaaggagtagtgtaagcactattgacatgatgcggcccctataatatatttatcgaacaggcagtaactaaccgataaataacaaggggtcgcaaaatgtctaagtcagctatcaaatatcttaccgccgctaacgaaattctcgccgcactggatctgaccatcggcaatccggcaagctggatgaccaacgagcaagcccgcggccagttcaagaacgccgacctgctggcctgcctgatcatcgactccgcagcgaacgcgctgatctgcgaaaacgtcgacacccttgacgatacgatgtacgacgatatgcagcaggctgtagaaggttacatctccgctaacctagacgactggaaccaggcagagtggaaagctaacgccagtctgtgcgacgtgaaagcgctgctggctaaactgctggacgccgttgaaggccagcgcgcctacgcagcccgccaggaagcacacgccgaagcgctggaagttaatggcatcattgaccgcgctgttcagattgcccgccactacacccacaacggctacctgatgcacatcggcgtacagcgtgccgttgaccgcgttcgccaggatctgcttgccatcgaccgttacccggcccgcttcatcgtcaagatgatggttagcgttcgccgtctcgcaaaactggcgcaggagcaggcccaaaaggaataccttgagatgatggcccgcccgcgggtgacggggatcgatagcgagctgcctttctgataaatattgttgaccatatctgctgaaacaaccggccccttcgggggccacaaccggaggagcctatgagtaaatgcgtcaccgtcgtcgttaatggcgctgaggtcgctttcttcccttaccacgaccaaccgtcgttcattcgcgcagacgaagccgccaacaagttcatgaagggcattgatggcgcatggaaggggatcgtctacccaagagttcgcgtcaccgctgccagtgggatcgtctatgaggcgtctttgtgtcacgttgacattgacgacagctcaggcgaagaacggatgttttctttctggtacataccagcgctaaaacgctgcaaatatgcggcgatcattcctgaaacagtcgaatatatttcataacaggaggaaattatgtacggacgtaaaagaccaccgctgtcaatgacgttcaagttttgggatggccgacagcgcaagcatgaaggggcggggagcgcctccatgtgcgtgcgggcgatcatgcgtgaaatgactgcccggcagcgcgtctcccttctgctgtcgctgaacagctatcaccacgcgctcgcagccgctgagggtgagcctatgcctctgaatctgacgttctcgcagtgggtcaacgccgatgaagaccgcaagatcaccatgaagtgcgatctgacccgctccatcgcttacgctgcatggctggctgccgggggtcgcccggagtgaagctgcgtatcagacagcgggccgtattaaagcggctggctgtctcagaatggcgcgcaggcgactgggtctatgacagcaagtcacataccgtcaccgcgctgaacggacttgtcagccgtgggctggcaaagtggaacataactaccggggcgtgcgagatcacgcccgcaggccgcgaggaggcccgcaatgattgaccagctaaagaagatcaccgaccgtgaagaagcccgcgagctgggcgcgcatatctgcgcaatgctcatgactggggcgcagttcgccgtgctggaagccgtcaacgagaacacgaaggagacgacctaccgcgtcgtcgtcgagttcgggcgcgtgcgctgcatcgcctacgggcacaaccgctttaaggcgtcttataccgactcaaagaaccacgtcaccgagatcgacgcaaagaccgccgccggggcgttgaagtcgctacgccttgagctgatgacgatcgccaccgtttacacgcacggcgctggaattattctatagtgttgacactggttattattacgtactaatatgcagatcccggcagggtgccgggactaacaggagagagaatcatgagtgtgttaattatttggtgtgtcatggctgtgctggtgggtatcgctgccgatcgtcgcggacgcagtggcctgggttggtcgctgctggcgctgctgatatctccgctgctggcgatcctgttcctgctggtgatgcgcaacatcgccgccgaagaagagcgccgccgcatagaagagcgccgccacattgaaaccatcgccgccatccgtggaaacaaggagtaaccgatgaaacgcatcaccgccatcgccatcgccgccgccgccgtgctgggctgctcatacgtcggggacgccagcgccgttagctgcgctgtaggcatcaagaacatcaatatccagcgcgaccttggtgtatacgaccgcctgccggataacgcgcagatggataaggtcatgaaggacgcctgcaagctgggtgagcgctaccgtaagggtaacgtgtccgaaccgatgttcgacgtcacccgtagcgcagtgatgaaggccattgccaacaacaaggcagatgatgaggcgaaggctcaggtcatcgcggtcgtatcagacctgatggacgttggctactacggcgaggtgaaagcacgatgagcaagatcccggtattccccactaagctcgtggaggtcgccgacgtgaagcccgggcaatgggtttggcaatatggccggttcgtccgcgctgagttcatcgaccgcccgcaagtgcgctgggacgacgtctggacactgaaaggattctggcgtcgcatgcactacagcgacatcgaccagtgcagcaccctgatccaccgcttcggcctgagcttcctacggtctggaaacatggtcatgacccccgacttcatcaacgtagaggatttttgcaaatgaaacagaaagagccagtattcgaacaattcttgccgtcagtctggtctttgggcgacaccccggacattgagcacgggcatgaaatggagttttgggtggtggtgcgtctgcgtaacaactgccgcctgatccgccgcttctggtacgttaatttcgacgaatgcgggtacaccgatgaacagctggcgtgctgggacggccgcaccgatgaaggcggcgaaccgttcttcttcgtcggctggtgccaggaaggcattcacccggagttcagttcattctaccagccgctcgaccgtaaccgcgatttcaggatcgaggcctatgcaccagtgacctacccgcgcgttccgtgctttggggatgattatgaagctgatcactaacgggctgtttaaggtattcaactataacggcatggtcataaccgtgccgcgctgggcgaattgggtggcggtggatatggatggcgcgctatacgcctacgacatagagccgttcgtgaatcaccgttctgaattttggagttcagaaggggtgcctgttctgctaggctacgtcgatctcgaaagcgccgactggcgcaaaacactaatgcaatgctgaggaaatgaacatgaccaccaagaagaaaaaaacaactgacgttaccgaccgcttcactgccggggacattctgcgcttcacctatgagatcagcgaaggcggcagcccgctgcgcggtagcaacatcccgggccgcaactcgctggtgacgttcatctcctacggtgagctttccgggcaggaaacaatcatcgcccgctggcattgcctggtagatcacggtgaatattctatccctaacgtgatcgaattcccgaccaacttcttccaccaccacggcgtagctgatgagtcggcgctaactcacgacaacatcgcgacactgaaccgcgactgtgctcgcacggatggaaccgcgatctacatggtcgccgaaaaggccgatgcccataaaatctcctctgagcctcttgacgccgcccaggttcttgagaaggtaaagggccaccttgaggagcgcggtcgccgctacggcgcggataacggcaaagagcgccagttcgaccgcgtagctgacgcattcaatatcgtgcgttcgtctgcgaaccgccagaacatgccgctgactggcctggacgtggtgacgctacaatccattttaaagatctgccgcgctcagactgacgacaacaccgactcgttcgaagacctcgctgggtacgcggctatcggcgctgaggtcgtgggagggatgaagtgatccacgatcttaaaatcctcccggttcacttccacgctgttaagtgcgggaagaagcgcgcggaattacgcaaggctgatcgtcactttgctgtaggcgatacgctcaacctccgcgaatggactgagaaagatggttacaccggaagagtggttgacgccatgatcacgcactgctgcgacgtcggagaatatgcgcctgggtatgtgatgttaagtttctttttgctgcaataaataacaaggggccaaatggccccctgtttttttacaccttcgcgttccggccaacggcctcagcatcccgccagttcatccccttcgccagcgcctgccgcgccagtgcccgacgaaccagcccagggatgatcttcccgttctgtttgcggaagaactccagctgtacgatcagctcatcccagcgaccttgtgtcaccaggtcgtcgaagtctcccgccttcttgtccggcttgattggctcttcaccggcattgatgaccagatcaaccagcgcgtcgaagatgggttgcgtgatggacttatgtgcccactcgttcaccttcttctcagcataggctacgtcttcacgcaggatcgccagcgcggcttctcgcgtgatgttgatgcgtggagggttgcggccagtgtgcccgaagccccaggtgtagatcccgcgacggcgctcgtcttcggtggcgaagtaaggagcgctgcggaattcctcccatgctgctgtaaattgcagcccgttgtcactcatcttcatttgttactccttgttgcttgcaatagtcggttgtactgggtgttgcagcgctgcccggcgatgtagtatcgatcagcttctgctgccagttcgttacccgcttgcactgactgatagaacagctcggcgagcagatcggcgagcgttccggcatcactgctaacgccgacagcggaggcgcgttgttttgcgatggcagtggctgcgttgagttgctggcgcagcctgtcagcagcataagcagcactagcagcgtcagcgcgtgcttggtcaatccggcgagtcgtgtcgcgatcatcttggtctttctccctctggcgcatttcggccagatcacggtcaattttgttcctgcgttcagcctccttgttaatcccagctgtaacgccgctttcataacggctttcgccgtacctgctcagtgcatagctgccgccctgccatagcaaaaaggcggcaagtgccgccagcaggtaaattttaaggttgccgatcattttttcccctgagattcattgacgggaaataccgctcaaccacgcgaatgaccttgtcgatcccaacgtacccaagcacgcaggcaacgatccagcctgcatcctggtttgcgatccagtgcattcgcggaacggaatccccgatgatgttgatgataaaggtgatgcccttcgcgaacattgccgccatgatcgcattagtccagatctgtcgcctttcatgaccgagctggatgtgacgcaatgtagccatgacggccgcagcgatggggtaatctaagtcggtcttatacatccgatagatgtcggtgatgccgtggaagaagtcgcccaaaagaaaagcccccgtgagtgttaacgggggccatgataatctcaaagtctatttagttgaaagcataacactcctgaccgtaccggttaaccatcggcctccacttctcgatcacttcaacaggcgatacctgctgcatgatccggcactctgccttcgccttgttgatatgcaccgccaccagaatgattgcatcaacgccgttcatcacgtagctttcagcgttgtcctgccggatggttggcaactgcttgccgatgccctcggtggatttcacctcatagacgtgcgtttgccgttcgcgcttccctgtgcgtgagatggtcatgatgtcaccctggccgaacgcattaaccgatacgccagtgcgcgcgttgactcccatcgggatgatgatccggtggcggccgtgaatgttgttcaggtgcttcgctgctgcaatctcacccagtaagcccacaaggcgcttgcggaactcgacgttctgattccagttatagatcttctcttcacgaccaaggatgtagacggcgttatgaaattcagccgtgtcgatatgaataacggtatgttttttcattttttcgtcgggatcccaaaacggtagcaggcgttgtaaaaaccgctttcagtgatgttgtgcttctccatgatctgctccttcgtcatccgccgaacggtgacgtcgtcggtcacttcctgaatgcgttcgtcagtccagaacttaccgttccgcgggcctatgtgcttgttctcacgatctacgccctttcctactttaagatctcgcccttcggttgatgccttcaagattgcctgtgctaacgtcatgatcttctccttctggtagcctggctagtgtcccggcgatgtatttggtgatgactcgcgtgttcttatcttggttcatcctgcgcagcctgtcagcccgtgatacagtgcgggccttatgccgctggtacgtcttacccatcggtgctactcctcaattttcccccttatatcgcatagtaacaccagatttcgtccttatctccttgacctgttgctttgtgagcgtcacgcccggtttaaccctcaccagcctgcgcagcatgcggtcgtcagtcgccagaacaccgatccctttcgcagatatcgctacgccgtcaatcgcgccgggaaacgcttttgaaacggcggtaatgaattcgtcgaggccgcactccttcgcggcctgccagacctgcgccttactgtgcatccagtaaccccagttcgcgcagcatttgatcctgatcgatgtagagcgtctccacaccggcgcgacgcttacgcccgcgcagaatgaacagcacggtgcctttgttgttctgcttgcctggcttcccggtgccagcgtgttcgaacgacaggcggccagagttcttgccgttgctgacgatgttgatgatggtgtaggcctgatccaccatgttgcggaaccacactgtgctgttgtcgttcggcagcaccaccgccagcactgcgcccggcttgatctcgcggctcttctccgtccacggcgtgatgtcgtcataaggcgggttcagaaacatcgcatcaaactggctccagtcttgcgcaaggctgttctcttccttgcaaaagtagaagtcgcatttcgtcgacttctcgcaggccgcaaggtctacctcaaacgggccgtaggtcatatccagccacgcgaacacgtgctcaggggtgcgccagtttgggcggacgttatccggggtcttgctcccgttgaaccggcggccggtcactttctgcgggcgaactgcctggtagtgcccgccagtcaccagccccttcgtagcccatacgcgattactgaacagctgccacggcgtaattccctttgctgcggcttccgcgtgcagcgccgggttgtggtctgcttcgaacgcgtcgatagccactttgtctgcttcgtctttcatttcgtttcctttggggtatttgaccgatatttgattttgctcacataaaacagctgaccgcctaacgtccattcacgacaggagatcacctgtacgtgaatatcaaggcggccctcacacgatatgcaggcatcgccaatcggcggctcttcaacgctgatcacgcggtgttcttcacgagtggcaaacatccggtaatcttccagtgtcataatgaacttatgcacggtggtttgcctcgaatacagccagcgcgaagcctcgcggagtggcgctgcggatgttcttggtgcgggtgctctttccgccgacctttatcgcccggttgaaatccttgcctactggctcaaccggcttcggcttgggcatcacgaacgcttcactgcaccagatcccggtcagcttggtgtaggcgtcacggtcaggaatgacaccagggtagtccgggtgcatctcttcaccctccgggatatagccgccatagtcacacgggttgaaggtgtgattgaagttgcgccacagcttcggcaggaatgatcgagccggattctccagcatccacgggatcgggccggtggaaaaatcaccgttgacgatgtggcaatatgcctccaccagctcaacgaatttcgccagcttcacagcgtcctccatatcccggcggcggttggggtatgccgggtgtggtcggcgctcagcaactggaagatcgcgatcttccgggtgatacagccagcgcgcgccggtagtggtcagatatgtgcattccgcgaaagaggcgatgaacttcacgccaccacctacgatcctggctacgtcgctggcatgcacgctggtagctgaggcgtcgaaccacatgccaaccgccatcaatcccggctcaacctcgtgaacaccgtcaggaagctgcccgtcaaatgtccagcactcatagccagcgtctaaccacggctgcaacatgtgccgcgagcggttaaacagaaatatcgctttcttcatctttgtgctcctttttccactctttgaaacaacgtttacacaccacgacattatcgatcacgtgccagcgtccgctgcgcccgccagcgtggaagtatgtcccacagccgaccatcttcccgcgctcgctgcctttgatcatcttccgacagccgataacccccggctttgccccgctcactattccgcccccgcaagatagttagccaggctccccatggtgacatacaggcgattgcacatgatcttcacgaagtagcggccatcaaagttgccagccgctgccgcattgttcgacttgatgacgacgacgtgctggacgcggttatatgactttctgaacagcgcggcgttagcgatctggttcaccacgtccttctcggtgaatccggcgttcactcccagctgctcatcttcgccgtagcctgttttgctggcctctttggcgatcatgaacgcgatggccggttggtctgcgacaattaccgggatacggcggcgactaatagcttttttgatttcttcggctactgcgctggcggtcttcggtgacacggtggtttgttctgacattttgctgctccttctgttgggtgttcgggcatattacttgggcaccatatgcctgtcaactgtgtttcacatgtgatatttgcgcatcgtctcgatcaggtcgtaggccatccagaaccggcggtcatagtcaggcgcggcctgctgcttgcggatgtacttctgagaggctgataagtttttctcttccagcctgacgcgcggagccttcgggaatgcgtcgcgggcgatcaccggctcggtcgtcatttcctggtcaggctcgaccttgaggaagttggccccaatctcatgcagcgccaccgggaattcgtagccggtagtttgcatgaaccaccacaggcccaggtgtgatccgcactggttgcaaattgcagcaccgcgacccttcatcgtgacgtcctgcttcgattcgccccagcggaaccggtcgttccctccgcacagcgggcaggcctgatgcctgccgttgaatgcgcgcttatcccaatactgggatagcagcacctcccagcgcccgaccatgagtcgttctatctgctcaatagggtagaacttcatgacctcctccacagcttcaggtagcgggtgttgaggttggccatgatcccctggtcatatttcggatcgagcttacgcttgtgcagcatcggccccatcttttcctcgtgtaccagtccgcgctggttgtacacgtaaagcccggcatagtccggcaggatctcccgtgccttgtccgcgatagtccacggcaccaggaagtagaagcggttggctatcagctccccatctcgcaggcagtcatgcttcatcttcaccgggtacgggacgcgctcgttttcgtctgatcgccagtatttttctgcttcctccgctgtctttgggtaaacggtgtgggccttgcggaagtcagcgcgcatgtcggcaatggaggtcttcacctccacttccaccgtgtagcggctcttgcggatacagaacatatccgcctcatagcccaagttgtcaggggtgtagtagttcgggatcatgatctggaatgagttgcccatagaacgcacaaaagcccgctgtatcgcgccctcgtgaatttctggttcgggtagtttgccaatattcatcattttaaattccttgtgttttggtattcgttgtgcagaatatattgcaatgtttaccacgtcaacgaggcaacagtggaaaaggtgaaaagcatcaagcaaatgattgaggagacggacatagaggcggttcgcggccagctactgcgaggacttcgcggcatgccatacgacccctacccgttccagttcgcggcacactttgcgacgtctcaggccatcaacaactacaaggagatcggcccgttcgtcgtcaaggccgccgtgtcggcagggaagaccacgctgatcagcctagtggcccgccgcctgacccagctcaacaagcccgcgctcgtgttgtcacgtcagggcgggatcatcaagcagaacgccatggagatacggaacttcggggtggagaacagcgtgttcagcgctggcctgcgcatgaagtccacgaccttccctatcatttgcggcagcgagaagacggtggtcaacgcccttgaaaagcagctggctaacttcgtgccgcgcttcctgctgatcgacgaatgccagcacgtcaacgtagacgacatcgttgaaagcgagatgacctgcacgcttgcggatcagaatcctgaaaacgagaggttgcagcgcaacgcagaacgcacgttggcgcagatgatcgctgctggccgcaccgggtacacgcttatcatccgggagatgcagcgccgttgccgggagatgtacggtcgggatctggttgttatcgggtacaccggcaccgactaccgaggcacacagccgatcatcaacgaagacaggaacacccccggattctggcggcgtgcggtgtgtgacatttccaccgagtacctggttgaagttggcgcggtggtgcctacccattacggcgcgatcgatgatgagctgacctaccaacttgattccttcgtgagtcgcggcgaagagggtgacgacgaattcagtgatgccgacctgatcgagatggagaagcagatcctgtcccagggaaccatcacgcaaaacatcatgctcgacgtcgtgaagcgtaccgccaaccgtaactgcgtactcgttacctgcgccggtaagaagcactgtaaggaggcggccagcgcgttaccgcccggcgtgacttacgggatcatcaccgacgacacgccacagaaggagcgcgacaggatactggaagacgcattcaacaaccgctgcaaatttatctttcagatcggttgccttaccaccggatacaacgtcccgccatgggacacgatcgttatcctgcgcaagatcggcagcctcactctgctggttcagctcatcggtcgcgggatgcgcatcctcaagaaattccacatcgaagagcttgggatgatcaaagaggacaaccttgttctcgactacggtggagcactggacgacctggcggaactgtacttctcgccattccttgaacagtaccgctatgagacggacaccagcaccggccagacgaaggaatgcccctatggacacacgaacggcaagcacgcccgccgctgccgacatgtttatgaccatgacggattcgaggacgacggcacgccatacagcgccgatgaacgctgccactactggttcatctcgcgcacatgtgatgactttaagaacgatcgaggcgtggttgtcagccgcggatgcggcgcagagaacgacatcaccgcccggcagtgcgcccactgcgggaacacgttgatcgacccaaacaggagccttgagaaaaagagctatacccgggatgactttgtggacgtgcgatccttcaacgttgaaccgacgaaatgcggaaacggcgtggtgttccgctacgtgctggggaatgagggggatcctgacttcgtagcctatgaggtgttttggccggacagtgacagcatgccagcaaaacagcagtggaaggcggcactggataagcacgttgcatcaccgaacacccggggcaagatgcggaaaggggtaaaaacgaagatcctgccgtccgctcacctgattgcagcgcctaagcgtgtgacgcaccggcgtataggcggcagaaagtctcgcgacgtcatagcccgtaaaattttcgaaggaggtgacgacctgtgatcaaagaatatctggatccaccaaccaagctgacgaaggcgcttgaggatgaccacctgattaacttcaccacatggtttaatcattggtatccagacgtgtactggttccacgtgccgaacgagaacggcgggacggctggcaagcagtattttctgcgccagcaggcgaagggactgcgcaagggtgtcgctgacatcgtgatcctgcatcgtggccgcaacggggagccgttcggggtgatcgagatgaagcgagagactaaaaagctgtcgacgccagtcagcaaggagcaggttgaatgtctgtccgccgtatccgctcagggcggcttcgctgcggtggcttatggctttcactgcgcgaagctggcggtgatcgacttcctcgggccgtcgaccatcatagttaaatagccttgacatggcctattatgcggaagtaatatgcccaaacaccacacaggaggtcatcatgacacatgcagagttacacagaatattgcacggcggcattcgcaacactgaccgcaaaacattcaaagaggcttacggccttatgcgatcattaaagaaagtggttctcacatatagagcgccgggaaataatcttatcagggacgtgctatgggaggttttattttgtggcgtacccactggaaccgagttgatgcttggtcagattctattccgcgatcctgccgtgaagtatccggctattgagaataaaagcaaatggctattgaaagttaattgcaagggcgattcacgccgctttgtcaggcaggaagatatcgagcgaaaacttcggttagatatgaataaggggatcatgtaatgtcagatattaaatcgctaaaagatgatgaagttctgttcttcactaataacgatctgtcgaacgaagactatcacgctgagacagaccacatgaacggctccggcttgtgggagttgttctccacatgcccggctaactggaagttcgcagaggaaaagaaaaagcaatcccgcgcactggtattcggaactgcggcccacgctaatcaccttgagccggaattatttgcccgtgaatatttccgcatgcctgagaaagaggactttattaagcgtgacgataaaggcgatattattccgcagccgaactttattacctcgcttgaggccgcgaaggcatttttgaaagaacacggtgttgccggttattcgaaaatgaaagagccggaattaattgagacagtcaccaataccgccgcagctcttgggataactgacgttgttttctggcacgacatcgtgaaaaaggccaatgaagagcgcggtgatcgtgaaggcattcgcgggcaggattatgacatcattcaggagatgcgcgccgttctgtttaataacgaatcatttaaggaatatttcgtcgacggaatgtcggaagtctcgatctttttcagctatcagggtttgcgctgcaaggtgcgcctcgactggatcagcaagttcgccgacatggtggactataagaccacggacacggccaaccctgaaagattcatgcgtaagtgcttcgatctcgggtatccgctgaaaatggcgttgcagcgcgaggggtttaaggcggctttcggccagaaaccgagaaggacgatgttgttagcgcaggagaagagcagcccgttcgtcgtcgctcctttcgccttgtcaaacaaaactctgatgattggatatgcgcagctgcgtgaagccatcgccacatttaaatggtgccgggacaatgacacgtggccgacctacggcggcggaagcgtgattgacctcgatcctccgtactacctggaaaacgccttccgccacctgtgggaagatgtgaaaaccaaaaaataattgattccggggtaatatactgacatattaccccctcaatataaggagtgaccaaatgatgaaattctctcagccatgcagcaccatcgttaagcagtttgcccacgcgcaggatatgtgcgtatcgccgaagaaatccaagcagaaccagcacctgaaaaaccactatgcgaccctcggagacgttgcggccgccatcggcccggcaatggaagatgccgggttgatcatgatccagtctccgacgcacgaggccggacaggctccgaacgtgatgctgatggagacgcgcatcatccacgttgccacaggcgaatggctgtccgatatctgccagatcccgctggcgaagaacgacgcccagggcttcggctcaacgcttacctacgcccgccgctatgcccgcgtttcgatcttcggcctcaccatggatgacgacgatggcaacaaatcagtgcgtagcgcagccgactgccgccgctccattgaagccgcgaaggacaaggatgaggtggatgcaatctaccgcgccgcgtgcgagctgttccgcagcgacaaggcatcactgcgcatcgtcgaagatgcccgcgccagcaagatcgtcgagctgaaaaacgcggaggccagaccgttcaaccccggcaagccagccaatgctaaacgcggtaaggctaccgtccaggttgcacctgatgacgttcagccgcaagatgtaccgccgcagcaatcagacgtcgaagaagatttttaaggagcgttataaatggcaagccgtggagttaacaaggtgatcctagtgggtagcatcggtcaggatccagaaattcgctacatgccgtcaggcggcgtggtggctaacctcacgatcgcgacgtcagaatcatggcgcgataagcagaccggcgaagtaaaggagcaaacggaatggcaccgtgtcgtcgtcttcgggaagctggctgagatcgtcggcgagtacgtgaaaaagggttctcagatctacgtcgaaggaaagctgcaaacacgaaaatggactgacagcaacggagtcgagaaatggacgacagaagtggttctgaacgggcctaacgccgttatgcaaatgttaggcggcaagagcgaaggcggacagcaggggcagctgcagggacagccgaagacacattccggcccagctcgccagcagtcaaaaccacagcagcagtccagcgagccgccgatggactttgatgacgatatcccgttctgaggtagaaaatgaacattacactgattttgaaagaacaccgcgagcgcgctggattttcccagcgtggcctggcgaaagcggcaggcattgcgcagtgccgcgtatgccgttatgacaatggccgtgagttcccgaccattgaaaccatgatccgccttgcgaagccactgggcatcgaatggcatgaactcgttaaagtagagggtgaataacgtgtttgacaaaatgaaacagccattactggcagcagcgatcggcctagtgttgggcttcgtgatcaacgtgctttatcacgtgctgtaaagaaaggggccatcggccccttttttttattcccctttcagctccttcaattcctgccgaagctcctgcaccgaagccaccaggtcagcgatgatcgccacatagtcgacgttcatcaccttgatacgctcgccgtcgatctcctgctcaacgtcctgataggtatagaccttgtcgacagtatcagcctgctgcgcgataaaaccacgccttacgcggctttctcccttcatacggtactgacatacccctaatcgttcgatgcgctcacaggcgttctcaggcgcttgggtgaagtctgttttcaggcgcacgtctgaaccggtagtgagaacatcgcctttgggtgtggagatcgtgccacctgagcggaatgaccatgcgtctgttctcccgaagccgtccatatacatgatgatcctgtgttctgtccctacatactcttcaacatagaaaccgccccacgccccggaggtgtcaacgttaccgccgcgcccgagcattcgagatcgaatccttccgcctgaaaccaacgaaccaatagcaggggatccaaagtctgttttgttggccgaaaggtcgtcgcggcattgcgtccagcctccaatatctgccatgccaccaacacgaagatccctgtcaactcgccaatgactaccttgcacactaatttgatcggcggcagtggccataatccgcccggtgaagtcgtcggtgctgtagttaaaatgaaagtcgatgtatggcgtgctaaatgacagctcaatcgcctgggaatacatcttcccgctggcagcgttgtcaatgttccccttcgccgttacatcaccaccagcggcaagcgctccggaaaccgtggttttcttatccgtgccgatggtcagaatgtcctcgaccgtcgacgccggtgatactgtcgccgtgttcgtgcgctggatcttaaacgtcgtgccgctgccgacggcgatggttccaccctgcccgctctttttaagcagcgcaagatctgagttcttgcccaggtagatcatcgcgttgtcggccatgcagttgacgttgccgttaaccttcaccccagcactgaacgtctgtacagcggtaaaagtgttctccgccccgcgctgcgcggcggtgtccactgagccaatgaccttattccatgagcgcacagtggcggtggtgccgtcctgcttcgtaatcttcacgtcaccgacgccgaagaagatctgatcttggttcgccaggtctgtgtagtatttgttaaacgcgttgtgaatatcagccgcgagctgatcgctaatatttgccattcaatatcggcccccgcaggggccgcctccagttatggtgatgacgaaccacgaattacgttgttgttgcgcgcagagaaggcgtcgaaccgcgaaaggatggttaaaaccatctgaccgttacggtccaggtaacagccatatcgcagaacagcgtcgccagtaccggcagggacgacaaatgacatgttgtctacgttcattgactcttgcgccgttaacaggcgtgttgctccacctgtttcatacataagctcaatgcctagctccatactgccgccaccagacgtagcgcctgtgccacgaagaagcattgcatacgacagatagccaggattcagtccgccgtcagcccctggcgcgtaggacatccccgctctgagtttcgcgccgccgtcgatagtgatgctatccgtctggaggagtccaccgcgaatattgatcacctggtcgaaattctgccgccggaaccgggccagctcaaaccactgccatgtagccttcggcaccttgcgcgtgcggtgctgagcgatgttgatcgcaaatgacccgatgtcgccctcgatgtggttcgcatataccgtaccctggaaccagccgtcagtcgcataaaccgcaccgcgaacgatcacgttgttgaactgcgaagagccatccttagcgatacgccagccgcgtgacccgtcaacaaagtcattcgagcggatctcgttgccgatc

SEQ ID NO: 5 - DNA, 112942 bp, unidentified
  source 1..112942: mol_type = genomic DNA
ggcgaataggatctgaccaattacccataatagcattagtttccccgttaaactcagccttaaccatccatagagggctacctggaggagggctatctgaccagccagccggattactaccagaaggcctactaggagtgctcgccattacggcgaacttcatactcacatagttgcctttagaacctggagtaccattagccccgttctcacctactgctctgatcgcaggaccccaggatccattcacctgctgacgcatgtacagatcacctgaagtgaacgtactgtgccagttagtagacccatccttagaccattgaacgtttacagagttacctgctggcccttgcggaccagtagcaccagtatcccctttgttaccttgaggacctgtatcacccttgttaccttgaggacctgtggcaccagtattaccttgtggaccttgtggaccagtagcaccatcctcaccatccatagacagatcttcaatcgctatagccgcaatgtatgcaatgccgaaaggcgttgcgctaccacccatctggataaacggtctagcctcgacagtcggcttaccatcagaacggtcccctacggtaattaccctgctttccaaacgccatccagtagcgtctttagctggggctgcggtggctgctggccatccagtattatccttatctgcgcttcgacagtgtagaccgaggttaagagcatactccccttctgagttattaacccaggcggttatacggtatttcatccctttcttagtagggaaccagttgttgccttcgtaggtatcacgtgagttcacagaaaacgctttcttgtgccctcccggatctcctccggtaacatcaactataggtttgccccaactatttgacgatccgttgtcaaaagagcctgtcataaccctgtcgtatccaatccccgggatactcttcttaagggtatagcgcttgactaaggtaccgtacttaggatgactagcctggtagttaacccaaccagatactacgtctataccgtcaggcataccgctaggagtgtagtaaccagaagagttgatgtttccgttcaagttctctttctggtcaacacccccgacaacctctactccgaaggtacactggctagtaacatcaactgttccgtaaaacactttgaagtagccattagtgccattccaattctgaataaacccgtaagggttacacagaatagaagcagattcgttagtcaaataccctactagagagttcacaccatcctgtagtctaacgattgtgatagtatcagtcattccatcacaggttgcggctactgtaacgtagtccgagctgccaaactgggcggaggtaatagtcttattagtggctgtgccacctaaagatatgttagctcctgcctggttcttggctgtccaggttatcgcagcactagtattctgtctccaactatcaatcttaatagtaccgttagacttcaggttaccattagtatcaaagctaaaggacagactatcggacgttaatgcgaaggctttggcattagtaccacttggaccttgtggaccttgtggaccagtagcacccgtggctcctgtatcacccttattaccctgtggaccctgtggaccttgagaaccatcagcaccaatagtgtccaattcattcctgatgaacgctgtagcgaaatccccctcttccagcttgatattggagataacgttggtactaccagggacattcagagaaacacgaacagaaattctatcgcatccctcaggaatagtaaatgaccagctagttctacctgcagagtttgatgctacccatgagaacacattagatccactagcccctaccgggataaagaacacgtgcattctcatttccagggcgctatccgtgtcaaatgacatagtgtaacgcttaccagcagtgactttagtaaaggccgttccacctccactgtacgggccagtataagaatcccctacaccagctcctgaattgatacgtaaacgcagttcatcaggattcttagtaatggtggatccacttccgctcgcacctgtcagtgagttgatccatgccttacttgcgaataggttgagattaaccgtctcaccatccaaacgaacagggtctgaccaggttccttggagctggttgctggagttgaattcacccttaaccatccatagtggagagccatcaggaggagcatcagaccagttagccggagagttaccagtaggcttagctggcttggtcgcagctacttggaacttcagggaagtatacttaccatcaggaccaacctgaccatcctcaccaactgcacggatcgcagaagaccacacaccgttaacttgctgacgcatataaatgtcgccagtagcgtaatttgtgtgccagtcgttagcattaccagtcttagaccactgaacaccaactgaagctcctgcaggaccctgcggaccctgtggaccagtatcccctttgctaccctgtggtccagtagccccagtgtctcccttacctccttgtggtccctgagggccagtggcaccggtagccccatcggcaccgtccatagttaggtcttcaaagtggatatccccaattagaactgaacctaaaggtgcccctgtagttttattatccagttggaaccatggccaggcgataccctcatcggcggtgcctagtgttaactcctgatcgaagtacacccaagaactgttagaagagggacctgtaaggatagttctagacggataacgtctattaccatcattacgttggacaatgaatcctgctctgaaatgagcttcctgcaacccttcagcattataccagaatctgatacgtactttctgccctgcaactaccggtatggtattcttaccttccaaggtatccctagaagtgattcgcagtgccttggtaatgctttggttggttggacccgtaacatcctgcacagctccaccccacgaacccttcttaccgttctcgaaggtgttagtgatgatcatttcgtagcttttagctaagaacactttagttactgcaaagcgcttagtaattgctccgtatttagggtgagtagctttaatatcaacccagccttccgtaatatccgttccgttagccatatcagtaacagagtagtttccattacttgagttgatgctcggtgttgcattgcttcttccgccctcagagaaagtgcactgaccggtaacgtcggtgcttccgtaccaaactctcatctgacctttggcgttttctaggctctgccagtaaccagagtagttagaaagtaccgtagctgcctcattcgttagaacagcagtcaatacgttctcaccatcctgcaaacgaaccactgtgatctgatcggatagaccgtcacaagtagcggttacagtaacccatttagaagcaccgaagttcgcagcagttagctggcgattatctccagagttcatcaatgttacagcagcacctttatcgtttacagcactccatgtgatacctgcagtggtattctgttttagtcccttgaacagaacagtagcggcagatttaatgtcaccggcggtgtcgtacacgaaggattgatagtcagaagttaaagcgaatcccttagcgttatccccagcgttgcctttagggccctgaggtccttgtggacctgtagcacctgtatcacctttactaccttgtggaccttgagaacctgttgcacctgttgcaccagtgttaccttgcggaccctgaggaccggtagcaccagtagcaccatctttacccatagcatcgctagggtggacaacataggcagtcgcataggctcccaattcaagtttggcacgactcaacacgttggaagagttggcttcattaacagaccaacgtaaggcaacgtgggttgtagctgcaccagtggtgaaagtaaggctctggcgtcccgcggtagaggtcgtcacactgttggttctagagtaactattaccattaccgttatcaaactgcattataaacattctagtggtcacggccgtctcaacatcaaacgacacggtgtacatagtgtttggctgcacttcgataaagtgggtgccattaccctgatacgggatggtatagccatccgtggaacctgtggtagtaatgcggaagcgcatttgctcttcgttcttactcattgaggaaccagtaccgttaacacttgtaatggatcgcatccactccttgaatgcccagaagttctcacctacgccagaggcatcgattcttacagggtcagaccaagtaccgatgatagcgttagtatctccgttaaacgttgctgttgccatccaaagtggagaaccatcaggaggggcgtcaaaccaatccgtaggtttgttaccagtaggtttagcgggcttagtttctgagatacggaagatgatattggtgtagttacctttcttaccgtcaggcccaatctcacctttctcaccgatagcacgaattgcagggccccaaacaccatcaacgttctgacgcatgaataagtcgcctgtttggaagttatcgtgccagttactagcagagctgtccttagaccactgaactagaactgatttacctactatacctatactatctgagtactcgacctgatactcggttttctctccgccctcttccagtttgatcttactccaagtggtctctacgttgagagtaagaattgaaggacgtagggttaagtagttaatacctgccggaactacaaaagtgcgtttaaccttaatcgatgttccggtgttaagttcttctatgaacgtggactgcggggagttcggggcagcctgccagaaaataatatctctggtttggacttcgctcgctgcatcgatattgtaggttagagtgtaacgcttacccggagttaccggatgagagaaggcacttgcaccaacaaaaggagtcgcataacatccaggggatgcgttattagttccagaagtacgggtcagagaatgagtcagcttctcaatgtcgttctttgatgtaccagagtccgtaccagtcagcaatgccatccatttgcgaactgcgaacaagttagggttgatagtaccgtccagacgaattgggttagaccatgtaccttgcagctgaccgctagcgttcatcgtacctttagtcatccatagaggactgccaacaggaggagcatcactccaaccactaggactgttcccagtaggtgtgcttggcttagtgtcctgaacgataaacttcatcgaaatgtagtcaccgtcagtaccatcttcaccaactgcacgaatagcaccgccccaagcaccattaacctgctgacgcataaagatatcaccagtttggaagccggcgtgccagttagatccatctttagaccattgaacgtttacagagctacccgctgggccttgagcaccagttgcaccagtgtcacccttgtcccctttactaccctgtggcccctgtggaccttgagaaccggtgtcccctttactaccctgtggtccttgagcaccagtagcaccgtccaccccatccatctctagagcgaagatatgaatatccgtcacgtataccttacccagatcagacccggaaggcccagacatctgaatccaaggtatagctagtccagtattcgacgacccaacagtaaactctttctctacgtagttccagccactagctccagcagctgccaccgtagtgccctgccagtctactccaccggtacttgcgcgaactatacgcatacccatggctacgtttactttagcctcggacgccattatccacaggcagagcttgtatttctgtccagccactactgggaatgtatttgcatcctctaaagcatcacgactagatagcaccaatgctttgctgaatcctgccgccaggattgatgcacctgttacatcctgtacgacgcctacactccatgaacctttattcccattctcgaatgaagtggtaataacgcgatcataaccttttgcaaggatagacttagtagttgccactctacgaaccacagcaccgtaagtaggatgtacagcacgtaggtcgacccaaccgttgataacgtcagtacccgccggcataccttttaaagtgtatttgccagctgaagtaatatcagcatcaaggttattcttctccatagtactgaaagtgcattcagaagtgatatcgcgcgctccgtagaacactttaaaatcacccgaaccagtactgtagttctggacgtagccggcatagtttgctagaactgtggagccttcattagtcagaagccctactagagcgttggaaccatcatccagacgaacaatagtgatctggtctgtgataccatcacaaacggctgtgactattacagacttagatgttttgaagttggcagcagtaagagaagctcctgagttgctaacgctggtcagggtaatattaccgcccttctcatctctagcactccatgttacgttagccgcagtgttctgacggaaggcctggaacaggatggttgcgtcagacttcagtttaccttctgcgtcataagtgaacgtctgggatagagaagagatgctgaatccttttgcattgtccccttttgcaccttgtgggccttggtttccctgaacaccttgtggaccctgaggaccagtagcacctgttgccccctcttcaccgatagtatcgaactcattacggatgaaggcggtagggaatactccctcttcaagttttatcttaccaatggtattttctttaccagcttcgttcacagagaatcgtaatgagattctatctactccggcagggactgcaaaagtatgggttgtaaggcccggtgtaagcgaagacgtgttagtgaaaacgctcgaagagttggcccctgcttgaattaagaacaggtgggtcctaacctctacagcagtgtctgtctcaaaggagaaagtgtactttttaccagcagtaaccggtatgaagtacgttccgtttccacctgaaggtacggtatacgcatcattggtggaccctgcaacgatttttaacctcaaatcggtagggttcttaacgatagaagccccgttaccattagtacctgtcaaagatgctagccactttttagtagacagtaggttctggttaaccgtatcaccgtcaatacgaaccggttctgaccacgtacctactagggcgttggtttgaccgttgaactcagctttagccatccatagagggttcccctgaggaggtgcgtctgaccaacctgaaggagtctggccagtcggagtagcaggtttctcagctgccacacggaagcgcattccaatgtagttacctttagaccctggagtaccgttagtaccgtcttcaccaactgcacggatcgctgaactccagccacctgtaccaacacgctgacgcatgaagatatcacctgtggtgaagtttgcatgccagttagtagtaccatctttggaccactgtacttctacagagccacctgcaggcccttgtggcccctgtggaccggtagcccctgttgcacccgtagcacctttctcaccgtccactcggatcggatctgaccagccctctactgttagggcgttagtattaccgttgaatctaccagaacacatccaaagaggggttccagttggtggggtacgactccaaccactagggtcattgatattacctggcttcgtgggcttactagcgttgatctgataaatctgaacagtgtaatccccgttggagccatcagtgccgccagtacctgggacaccagaccactgagacgcagcggaatagttggtaccatctactagagcaggcggatttttcttaggatccagagtaccctgtacaacgtacacgttctgatcctgggcagtgcggttaggtgggaatgctgaccatccagctggtggataaacttggtcaagcgggcgacttggcagagatgtaccaagtttataagcaaatacagtctgcttaccctgcataccggtttcaaggtctacatcgcccccaggagtaccgattacaacgttaccagaaatgcgaagagtatcaccgtcccagcgcacatactgagtgttattaccgaggtcaaatttggccttaccgtcaacgttgtcaacacccatccagacaccacctgcgttattaccgtacttcttaccctgagtgaagattgccgggttatctttaccggtcaggttagtaagaattacgttagcagcattaatgtctttagtgataactttaccatcgacgttcacaatcttattaacagggtcgaatgaaatcggtgctttaccattttcatcgagtgtaccaagaactactgcaccagtagcagcgtctactaagaaagtttgctcccactgtttggtgttagagttccagagtttacccttgataccagcgtaggtcatttctacaccggtctcgttaatgaatgcgttgtcgaaagtagtgctttcgtctataatataagtaacttcagcagagttagttatagactgagtatccggaccccaagcaaccgatagtacacggaagcgatggcggatcttataggggaaactggtgatggtaccggccttagccgcacccacgtttagcttgttggccttagtccatccggtttttgcaaactcatcattacttatatattggatgatgaattcacgaacgttagcacccgcaccacgagtccaatcccattccaggcgaacgtcaaaacgctccataccatcttggatgtgggcagttttgaaacgcaggttagttggggcagacggtggagtgaagttgtaggtcaggttaaacagtgacggccaggtatcatacccagaaacatccacagtaacaccatctggcatagtgacaacaccagatacccggatattgtatctgccaactggaacaccaccaaagatgatctgctcagtgattggaccacggtagtacttagtccaggtgctagagccctcaggtttcatttcgatggtaacgtattcggcctcaccagaaagctctacgacaaccataggagcacccacacccacgtcaacagattctgcaaaagaggacactttggtgatcttcggagcagttttcattttaaagttaacagtgctagataggttcatacctactttagcggttattaactcctcatcgaccattgagtcatagaaagcaccctgggcagagtagacagcaccagcggttaaattgttaattgtggcaatgaatgtatcaacgccggtaaaatccctacgggtggtcaccccacccgtagttagccagaaagttctaccaattacatcgtaatcggagaagattgagtgctgaatactcgcaatcgtgtaaccggtaacgatattctgcaataccatttgagctggtgctatgtttgaaatcatttagatatatgcccatgcaaccgacttctcgccctttggtccctccgcctgaattcttggctgaagtgctctataaatccccaaagtgttcgagttgttggccttgtagtcgagcttattgtagcccaacaggtaactgtagttatataaactggtgatcttcacggatctaagcagtttattagtgttgtcccttatttcaagtgtgtagaaaatccctgaaatcagcccttcctcctgtagcttatcccaccctaactctaagtcaggtccaacccattctgcagggtcaggagaaaggttaagcacccggaagttttctaccatactaaggtttttagctgagttcaaatctacagaaattgttactggagagctacgacgaccattaatatcaacagcacggatctcgaaaattgttagtccggcaggttcacccacaatatcctgatacatcttaacattaggggtaaaagcattctgctgcacaatataaggatccacacgatctgatttacgtatcgagtagtagactacgttaggtgttaagctaggaagccatgaaagctctccatttttaccaacatcccctaccattcctccaggggtgggggtgtacttaaactctcttggaggcaggacgttattagatatttcaggtacgctctcgctactgttatctacctgcgttgagttaataaatacatcctcaccatactcttgaagagttacgtttatcttaccatctcttgtgttctcaacctcatcgactaagaagaacttcttattccagccgtaccgatcgtaggtgaatactacaggatcattaggttctataccaaggaatttgtaaggtaaagagaagctcagagaacgcgaatagcgagacttcttaagctccctatctgccaaacttctggcagtgtagtagttggttatgttagcaaaagaaagttgaagtttcttatcaactccacgatcctcattcttaaacttagagttatagaaggttatggagttggttttccagttcagggtaggatcaatcagagacgcctgaactgagttgtacttattacgtcctgtagtatctgagagatccaggtccccataagtatctaggaaattaagttctagaggagtttttgaatctttctctacggtgatgcggaagatacctgataggttattcaacgccccctggaatgattctaatagctcctgcacgtttttgaacacagagttggagttatccaggattgtgttcatttgcattatttgtctgttttcggctgtccagctctcccatccaacgtatctccagaaaggttgccaactagtttgataagaggtgtctataatgtttaatagatcggcctcttttctccagtcaccaatcaccattctgtctatcgggatacttgcaccaaaggtagtggaggttaggtagtcaaatgtttgccatacaccattttggctggttttatctgttctaacagagccatctgcctggtatacttttactttacgtccgcttaattctgctgatacttcaggaatatcagttctgttctccgtgatagtgaaacgtatgacagcgtatgcggtgtctaatagcttgtatctagaatcccagtactcgggtccattaccgttctctccttgtaggaagaaattgttagcagcagcaatgtctcttagtaccgtagctaccgtctggtctggcttaccgtggaatgtccagattcgtatatccccgttaccgtcattgtacttgtattcttgaccatgctctgagagagatgttgacggaagtcctgtggagattcttgccatagtatctcccgatactcttttttgtccaaagcatgtacgagaagtactgtcagtttgatcagtacagatcataggggcgtctccaaactggaagtcgaggaacccttcaatctcaccctcgcagaacgcgtaaaccacatacacaacgtttggattgtttctttctgtatccgcgaaaaccggaataccaggaactttttgagtaccatatactacaggaataaacttggccgcaaggttgaagtccaggtctacttctttagtaacagtctcgtaatactttttaaggctgtagctcttggagagaccgaataatttcttcttagattctagcttgtatcgttcttcttttacttgatatttagctaggaagttaacgctcttgttggcgtggaagaatccgtagtcctcttggtattccggtcgtttggcaccgtgagaaggtagtaattctccatttacaatctcaagccctcggtgggaggcatcatctgtgaagcgtccagcaactcgctcaaaatcgtagaattcgttagaacagttccaggttataacagaagtaccaactccggatactgtattactttctttaataccaccacccacaatcttacctctaaagaagagtaaggggccgttagtatctgggtccacaggaaggatttccccattgtcgtcgatgatcgcctggtatatagaaatagagcgatctaaaaatgatacaccactttgcacgagcttaatgacttcattggcatccgtaccggtaacactgaagctcaaactaccgacggttaacgtacggttttgtttgtgactgctaattgttttaattttccctgattggaagagtataccaccatagttgatatctctcatatagtccgtcatataagcataaacagcgttattacccgtggaccccgggagttcgatagagacaagatacgctaatcgtatcttgtcattgttggcaaggtaggctttcgcagaaggaaggatctgtctcatagactttctctcagaactaggttaaccccgtcgtatacaccatcaactgtgatctcttcgctgaatgaatctccgttcattaatttagtttggaaaagaatcccattgaaacgtggtctctcggagccgttggtagtgagcaacagatcagggtatagattaagtgtccatactcctgctacgtttttaaaagatgtaatcttatacacctttggatgtgtggttaactggaataaatcacctggcttaggttctccagataaggaattcgtattggtgataaccagtgtggagcctttttgtccagcggcaatgcgacagttgttcgcatcccctcttactcggtaagactcgtaatgtgggagtataacgtcgagatagcctctggtacgcttatactctagaattgctgacgaaagtacagcatactcgtcgggaaacatcacaggataactaatgttaagaccccagtactgagtggctgttttaacttcgttaaccttgccgtttggtagctcgtctctgatcactggatcattatcgatcagcgtagctttatcaaacccaaggccgttatactgaggatgtgtaaagggatctggtaatctcatgttttgttttctcctctcaatgttaatattatagtcatatcaagaaaaattttcaagataattttataaattccaaaaagaagggaggacaattacgtcctccctttagtttagttaattcaggttctttaagctcagcccttgttcattcaaggctaactctacagctgcctggaatgccgcagggttttccaatgcgtactccataaagctcttagcatccattgcctggatattcagattaaccggtcttctagcaccgccagaagaagtttcagaagctactttatccgctggagttactttggtaggcaccataggagttgcaacttccgtaccatgttcacccatcttataggagacacctggataggtattaccaccctctgcacgaggaataaatccgttagcattacctatacctttatcacctcgaacgtaggacagctcacctgcgtttgcgcccatgctaacgtctacgttcttctggcgctcacctaaggtcaggtaagaagcagtttcacctccagaccctgctatatcggtcattccagtagcactagacgcctgtgctaaagatagggcacctgcaagtccagccgcgatcatcagaggaatagagaacggatacggaacagctgttgctgcctgcattaccgctactgctgtctggatgatgatttgcttcttagcagattcctgctgaagtttaatcttctccgcttccatcttcttgatcttgttcttagactgctcagatttaccgtcacgcttctgctccgccgcgatagctgcatcaatagctgaaatctgctggttagtaccgtagctgatcatctggctaactgtctgcatgcccgctgcaatcatggacgtagtatccagagatccttgagagaactggatcatagcgttagctaagttccccatactttgagcagtagcagtagcctccgaatttagctgagagagcttaccgatagcggtatcgtatgacgccatctggttttccatgtcggcgaatttcttatcctcaccctcaaggccagtagtaggcgtatagtctgcgcccaaggactgtcctacgcgatccatcatctgtgcagtacgctgagctttgagagccgccatttgcgcagtagtgttggcaatttccttgctccaacgcgcctgttcatcagcgttacctttcgtgaattccttcatctcctggtagaacgctagctgctcctgcattttctgcgactctcccattagaggcttcatgctttgattgcgttcgaattcctctttacgcatctcagcagttttggcgttacggtcaagctgctctttccagatttccctttcaatcgaggcaatgttacgtctagactgttcggcttccttctccttatctgcctgagtctttagtaaggctaacctatctttctctacttgtagatttaatttaaggttcgccacgttatactgagaatctgtcatagtgcgattatttaagagtgcgatttctcgatctatacctactatcttatccttatagaatttctcctttttagtcgcttccataccctggttcttcactttgagctcttccgtctctaacagggtcagctctttttgaatcgccttgttgtccttgttcgtcgccagtacagctttcaatgcctcttttttcgcgctaagttgctgcatttctagggctctacccgcttcttccgccttatccttattacgagtggcagcgtagacctccgctatgcgcttctcaacatctagcttggacttagcctcatcattcactatcttctgatagttagacatggccttatacgcagtgttcatctcggttacagtggaatagcccagattaaggtccttagtcatttggttagccttttctgtagatccgcccgccaatgactcaaccgctttaagtgcatcacccagtgccgcagtagctctagacgcagtattggaatcttgtgcaaagttctggatatcattgctcagatctccggaggttttctttatgttattgaactccttccgtagagcaactgccccgtctaatgctgcgttgtcaaaggtgtataatccattacttgcttcaacgttctgtgcaatattgagttttcctgccagttctgggttttccttttgagccttagatagagcggaatccctagcatctttccatttttgaatagctcccgcagagtctgctaactcctgctgtaacatatacgcctgtctacgcatatctgcagtctgttgtgtaaactctttgttagctttagaggctcctaaggtaagcaggttaccgaacccactatagttggcagctgtggctagtgtggtggacatatccatcttcgcctctctatccattatctccttattaagagctgccagcttattttttacttcctctttcgccttaactgcttcatccaagcctttctgggaagcctcaaggttcataaccactgcgttagagtctttaccgtccatctgcttaatcgactcttgctgggcagtagctgcctctgcagataccgaagccttagatgtgtaaaacgccgcgtttatagacgcaataactggaccgagatatttagccgccgcttgttgaaccttgcgtaatgcagaatccgcgttagccgcaaattgctcccaaggggttgctcttagcacttcgtcaaggtagccgaaacgtttagtagactccgctactaccgcattagcatacgcctgctgcttctggaaggaagttaggccctggatattatacgttataccagtgttagccgcattaagtatcttaacgtattcggcatacgcatcatttaaacggatggttacacctaattcgtctagaagttcaatttcctgcttggacacacccttgattacacggttgagtgcatcggtcatatcaactccgagagtagccgcggccctacgtgcaactagagcaaactcgctgatctgtttggcatcgaaaccgtaagctgccgcagtagatgcctgacgcattgcctcctcaaaggataccgcgtggccggtagcttcctgcagtgccacagcaagggactgaataggtgtacctgtcttcgcccctacgatagagccaaactgttctaagcggttcagctggtctccaagttttagctgatcaaacgctgccttaagcacgtatacgttagaggctatagcaccgtagataagaggcatagggccagtcaccatagctagtgctgcgaagttcctagtagccccacgagcagatcctgaagtatttcccaacgctctagacgccctattagcagcgctacctgtacccgttaacgttgagttcagcccacctaaaccagtattaacatcacgaatacctgcgttcagatctgttaatttgtcggataccttgtccgtactacgtgccatatcggccatggtggtgttcattttgttgcccatagcttcaatggaggttacaatcctgttcatttccgccactaaggcacccatattgaacgctgcagggttaccacctcccccagcttgtccgaggcgtatacgtttggctattaacttatctatcgcagcagcagaacgtatcgcagcagcttcaatagcattgagctccggtaccactttctggaagttgttaatcattctcgtagatgacgaggttgatttagacgccatatcctgaaatcccttggagaacccgcgttctagtatttgagacgtagaggccagtttagtctccaaggcatttaatgaggccgttgcggcattgaattgcgctggtaattgaagtacgcccctgcctgcctgtatttttgacagagcggagttaacttgcacagcggccttagccagctgggtgagtgacgggatcatacctctgatggagttacccagtggattcaggtttcccgtacctcccatagtggcaaaagctctagatagatcatttaggcttttctcgataccggttacagatccttctaactgagcacgcaactgcgtcattgaagtacctatctttccaacaactgtaggtacagaagaaagatttgcgcctgctttaatactttgcagtgcttttcctgctgccgtagcatctacgttaagctgttttaaagcggctgttactttagagatatccgaagtggaagctgaggtggctgttgatatctctgagattaacttgctcagaccactaccggttcctacggttttcattgaagcggcagctgtagcggtagaggatactaaagacgtaagggctgctttaatcttagatatctcagctaccgaggtattggctgcagtggctaaactagtattaatcttctggatttcagttaccagactattcagtttggtccctggtgcaatatttgctatagatttactcgctaaatcagcttttactgccaactcaagaagtagtttgtttagcttgttcacctcttcgcccatagaagatacagctacggaaatccctgacgcagccttactcagatgctctccggcagtccctaaggagtcggctttcagcccctgaagagacctgcctgccagcacggcttgctccgccattctagctaattggttaccaatcttttccaccccagatactaagtagctaagatccgtactagccttagcagcactagaactaatagattctaacccagcccctgccttcaaggtctgtaacactttagctactgaagaggcgtgcgcatctaactcctgaagagccttattgacgcggtttaagtccgcaaccgaagaagtggctgcagtgtcaaaaccagaggccattttgttagcggcggaagtcaccccgtttaggtttgcgttgatttttagtacggatttagccaagtcaacctcgaacgaggtaaacttgccgcttagcatgccgatagacgctgctaatgctgtaatgctggtggtcgaggataatttctccagcgacttagcagtacgtgatacagatcgttccagcgccgtgaaagacccaggaagtttgcccaagcttgtatttagaccctctgagctctgagcagccccgtctaaagcagcttcaacatccctgatttgcttagcggctttggatccaccacgctgcttgatatctacaagtaattctcgtattagtctatctgtcatgattttttccaataaaaaaggcctagggcattaaccctaggccaagcctcacgtggaacgcccgttggaggaaaatgtaactcactatctgctagaagacttcattttagacttcttaatagctgcttcaacacgtttgcgagaggctgccacagcatgtgagtcgaatatgttgatgatctggagtataagactcttctcatctggatcctcgactccgtagatatcgaagaaaactagtagggcacttttatccttgcctaaataggttggataatccccggggatataattgtccgataagttgttatatattgttagagcggtctgtgcgatttcagggaagtcatggatctctacgaaacgtttaagtacctcggggttaggttcctccccgagagattcgcacatagtcagatactgctcccgtgtaatcttggagtcccctcccttgacacatcgttctgcaaaggcgtctatttccttaagcagtaggttccgattttgaaccacgaaaggtgtctaggtggaagacagtgctattcatccaggtctcgaaggcgctggaattacgtaccaacatcatcgcgttgtcaatactaaattctaccttatcctccaggcgatcttccggaacctcgatcagcattagtttctcaacatctgcgacggttagaccttcccaacccgcaatagccactttgacgaactcttctgcgaatttgtcatcgttttgcactttaacagcgataccattaacaaactggttctcttgtgcagcttccaggattttcttggagagcttacgggagacgtagttaactttcagtttgaagtggggtaggccagggtatgcaatggtaatctgtttggtatccagtgcaatatcttttaggttaatactcatttgttattctccaattagcttgattcggacaggatctgattgctcagtagggatcacatcgtaatcgatcttgtacacgtcggttaagtctaggcgttttgtgattttagtggatggaaagtccaccacaatatatttatttctgatctgtaccggtaggcccacatcaggtttaatgttatgcgtagaatctatatgaagactcttcgcatagtacatcgatatcaaagcagatgagttcaactcgttaacgattgctctcctattattataaatcttattgatatcgaataaacttctgtcaccacgccattcgcattgctgctggaatgacataccggctgacataagtcctgggagcactctcccattcgaagatacctgaggtaatgaaaatggtagcacctcaccttgatcaagcgtatagctgttgagtgggtggcctacttcctcaaagtatcccgactcgataccaacgtttagcaccgggacactcttatctagagaaaagtcgcaggtggtagcaaaacagttatcgaaacgtaagctcgtgttcttgttaataatatatacggagaacattttaggctcaatattattactgaacaatggcatctgatacattccgtctatctctataaaccccatcagctcgaagaataggccttcgagagcattactagagaagttaagagttagagaaattgaagaaggagactgagcagttatcttcgaataggcgtagttactgcgtctgtgaatcgtcctacgatttgctttaaactcttcgtaggacgttccagcagtgtaatcagacagggcgtcaaatccgtacgccctgccatcgtactcgatgactactctagactcccgcattagggagtatagcattagttatccttatggtgtgacagggttaccgtcaccagaggtaatcagtttcgcgatagaagtcttggtgtatttagaagagaaacctaagtaaccttcatcaccagcatccatctgagacgggatagccttgaactcaatagatacacccagcacgtcatcggtctcgatcgacgggatattcaggttagcgtgcttagctaccagaacggctgccggacgagcagtatcatattcaccacctaggatgattgctacttcgaaatcgttcacagctttcaggtcagaaaccagatctttatacagctggatagagccattggcagcatcattcatgtatgcagtcagggaaccagtcagttcaaaggacccagtgaaggaaccaataggaacatcaacacgagacatgatgttaggagtcaggtacgtcacgttgttgttcatggtgaaagaacctcccgtgatcgggatgttataggtttttccgccggtagcgttgttcttcagcttaagaatggtcagtttgttcttgatataagaactctgaatcttagcataaagagcgtcgtctatccctatggttttagggtcgaacggctgagaagctagggtctccaagcgagtaccattacctgaccaggttacacgcccgatatcatcaatatctacgttaacctcagcttgcccaacctggcagttacggatcacagaccaagagctatcggttaggatgtagatgttcaacatggccagctcgtggtatccattgtctttaaagttgacaaccaggttagtagcgttttggaatacgccagtagtacctgctagattcacggcagcgccagttgacagcccgtgccacagtaggtagtccggtagaatctgtttacctgcgtcgtcatacggcaggatataagtggagaagctccactcagcagcgttcaatgaatcgttaaagcgctgcgaaccgcgggtcggcttagggccagcctcatttagggtaatatcagtggagttactgtcctggctccaggagacatcatcctgaactaggatctcctgagtgttggccttagtgaaccccgtagtaacggttgacacgaagattcgtgtattacgtaatagttgtacagacatttaaatttctcctgagctgtaacttatctatccagcgctcttctcagaggcatataccggactgttacgttaacttgagcaaaaccaaacggggacagtataccctcgtctgtggacaccgacgtgatctgcatgtcagtggcttcagaatcgatagttgaaccatcaggtttcattatagtatattgtaaatttcctccagtgtcaatagaggtttttacatccgctatgagtttctcaagttgcatgttaatatcatccttttctttatcatagataagaataggaatttcaaggtaaacccactgctgtgcagacggcaggtagtttccagtttcggtacccacgtggactgctatgtaagggaactcattgatctgctcaaacgaataagtctggcgggatacgttcccatacatattagtaaagaactctgtgggattactcccgtccatgtccttcttcagtcgttccactagggcatcagcaatacttgttctgtaattcattatgtaccctgatttactcttatccggtatctagaatggataaggtctcttgcagccttagcgattgcctcgccgatcagcttctgcgggttcctagcaccagggaaaggccgtagggaaagtccgcggtaggtagagacggcaggattgaacacagagtaaggcctaagcatgtagttatacgtgatgttgaggtcaggattctttgctcctgcgtcttctcttaacagcacatctttaatcttcaaggaattagcgaaacgccccgttctaaatttaaggggtgccccagcttttttcatatccttgactaagtattctttcgctacgagttcaagtaacgctctaaggtttgtgtttgagacgaaacgcccagaagcgccagaaatagcaccagcgtaaccgttgtcagcatctgaaggatccccaaagttaacctctaccctaccggtagatcgttttcttcctattttggattttttaccagtgatactatttagaaggttatcgataacaccaacgtcgccttctaagttaagtgacgacgagacagcttttaaaatagaggacgtccgaacattcagtaaatcctccgataccggcttagtaaatcggaaggataccttgcctatggtgccatctttgtggttatccatagtttccgcactatatatcacggtgttcttagtagagtggctaccaccactcataatgtccagctgttctttaactatctgtcgagctagatcgcccaacgccactacagcctccggtatacttcgattatggtacgaatatgttccggtacgccagatttagtggtattgaaagtaacggtttctccgccaaatgtacgagactcgcggtagtccttcttgacccaatgatcgactaggaagcatgctgctaataccaggtcgtcaggaatcgaggtgaagccggtctgagtaaactctacttccatatacccctctggaggagagaatttcagcaagagcgtaccatccgggtagttcttatattgcgacttatcgatctcctgatcgttaatcgtaattttagtgatcgtgctaggcacgggagaagataggaagtactttttgcgtgctggtttagtaggcagaacgtctacaacgttagcactatcgtctatacctaggagctgagtaatcagagcattggctgctttgattaacattgggatatttgactctaagtcaggacgtttaaggcctccatatgttctccaatcagaatctgtcatgaattgcatattttacccaataaaaaaggagagccgaagctctcctttagtcggcagtatagccaaattaagcagcgtaagcaccagcaactacgccgttctcgaagaaacgcatcaggttcagacgctgagtaacgtagtacgcatcgcgctgacgttcagcctgacgctctttctcaacggtgattgcacgctgacgaggaacgatgaagttgtcacggtaaacaaccacacagaactcagcacttgcagccttagctgggaagaactcagaaaccagtaccggcagaccgtagatgcgaccaacctgaccctgcagtttgatagcggtggtagcggtaacctgtgcaacgtcctggaactcttcatcttcgatcagatcgtagtaagcatccatcgaaacaaccagagccagtttgttcagatccagaccgtggcggcccagtgaacgacgcagcttgtgaatttctttagcggtaactttaacagaaccgtcagctttagcagtggtagcaaccactttaccatcgtctttagcgaactggatcagacctttcggagtaccagcagcaccagtaccggtcaggaacgctttttcgattgcgatagcgtgggcttcaatcagacgacgacgcatgatcggcagcagagtgaagatagcatcttcttctgtttcgtcggtcatatacgctttagcagccagtttataggttttgaaggtgatttcagacagcttggttttgtcttccgcaccaacagtagcaggagtaccgtaagtagaggcgtcaacccagctagcttcaccagcttccggctcaaccatcatggtcagcaatttgctagacatcggcagttcttcgaacatggtaccgataatcagtttagcctgaatgtcacgcaggatacgcagggagaagatggtttcgtacgcttcggtagaaacttcgatagaagaagagccgttaacagctttcaggtgggcttcgccacgcttagtaccgaatacgtctttctgcattacgtaggacagaagaaccagtttctcaacttcatcttcgaaatcttcctgcttaccaaacattgccttagcaacgccatcagctacgaaagaacgaccgttttcacgagcggccagcagagatttgatttcttctttcagaccagtgatttcttcctgctgggagttcattgctttaacgaacgcttcagcggactgtttggatttctcatccaggttttttacaagctccagagcttctgccaggtttttacggtcttcaccagttgctttagcaaccaggtcttccatacgcttgagttctttagcttcctgctcagcagcaaatttgcgagcttcttcagctttctgagaggcggttagacctttaagctgctcagcaatgtcacccaggcccagatctttagacagttgtgcgatatcgtaagacattattatttctccattatcctttagcgtaaccagcggctactaggaatttctctaaattagaaagttcaggttgttcaacaggctggacctgcgaagattttacaaaagacttacgaagttccatgtaatcattatggtttacagacttcgaaaggctaaaagttgagtcttggttgcagggaaccgagactacagagatctcgagtaactccagatctttaataatgaacgtttcagtcatatcgtcccattcggcgtctttaatatagaagcctacagagaacgttttaagaacctcatcacgtattaatgagtaaatctgtagatcagcagcacttacctcaccctcaaccataagtccggactcggttggcaccaggtctaggatcttaccaattgggcggctatggttatggccgaaaagcatgatcgggttcttcataaaattcttgagggcgttactggtagtccacgcttcggagagaataacgtcgccggcgcggtctttggtaatcgtgttagcataccctttgatttttaaaggaggattatcaccctcaccgacagctttaacagatttaatctcagcattaagattaatattctgcatcgtttgctccaaacactttcgtgttgttcctcagttttcagatactattattacataccaaatcgcgaatgtcaaaagatatttgaaaatcccacacggtgtgtggaattagtaggcagtcgaaattggttacactgagaataaattttccacttgcacagaaaaatggggagccgaagctcccccagttatcaagtattatacaggcgcagtaggtgccttaactgttactgtagcagtgtcggtcttattgccgtcagctgttttaacagtaataactacggtaccgtccgcagctaagttggagggaacagttacggtaccatccgcagctacggtagcttttgtagtatcagcagaagtataagttacagacttattggttgcgttagctggggctacggtaccagtaagtttgccagtcttacctgcttcgattgtaatagtcttaggtgacatagtgacaccggtaaccgctacaacaggagctttgacctggatagacacttcactagatttaccacctgcagtggcagtaattttaacagtgcctgctttagacagtgccgtcactaatcccattgcactcacagtagctagggtagcatcgctggtcttccacgttacagttttgttatctgcgtttgcgggtagaacagttgctgtaagctgtacagtcttagtatagtctaatgatgctggagcgcctgtgatactaacagaggctaccggtactggtttagttgcttccgcgtaagcctctttaaactgtttccaggttctacggttagtagcagcgtacccatactccttacgcagaatctggtaagtaagatgcgctttaacagttgccatcacattgtgcggctctggcagtccgttagggaatagtgcttttaaagcgttataatcaatcattctttttcctcgtctttatttggtgcgccaccttcttgtccacttactcccgtagctgatccagctacgttggcagggatgcgaattttcttcatctgctcgtcagccagttcctcgtaaccaagctctatacgaccttcgttaccagtaaggataccattgttgactagtgcagttacgaatttagcctctttctccttatcaggagttagtgctactacgtctttagtattgggcgttactttaaaaccgaagaagaacgtaagagagctacatactttattgagcataggcacaatagtcatgtagtagaacagctcaatgttcggtcgaatattggcgttattacctccatcgatcagtagctgagggacaccaagagcgatacatacgtctttattaaaacgagcgatatcgttttcgaagtcgagatctttaaaggaggagatttgggagtatggcttagccttcatcccgccgtctagaatgagcacagttgattggccggtactagggttatagtccagctgaagctcttcttgtttacgttcacggagctttttatttaggatttcatccgtctccaggataagaccgataaccgtgccgttgtccaggaatttctccttgaactcgagcattttctcacgcttagtaagcgagttgattacggtagctacgcgagactggcctgtgatctgggagttaataccaccattctggccattatctttgatgaagataatctcatcaacgcgatagtcgatcatattattaaagacaaatttgttaacgaattttttgtcatctgcttttacttccattagggcagcaggcagatggtacagagacgaaccgtcccaatggatatacgcacacccttcgaatagaaggtcagacactattaggcgtctaaaagtactagagtccatgtaagggttagggcgaacattaagcagcgtctcaagagttttactcctgatcgtgccataggttgttattgttttatattgttcacctacggtgtaggagcactcagcggcgctgtcaattaccatgttcgcggatctattaaggatctcaatagacgaataggctttgccagtcgtgaatggcttgacgttagtacggtgactaacatcctccaagtccctgattatgcgttgtccgcggtttagtttagtaactaaccagtcacgaatagccattataggaaccttgcgaatcctgatttctcagtcttgacgtcagtcggaagccacttcgcaaagcctgatctttcgccagtattgcttgtacgaggtgcctctggattcatacatctttcacgttgtttctcaacccaaatcttctgtttgttagctgaaaacaacggcggttctttcgtatagaccttgtgcagggtctgatgatgaaagacacataaggtgaccgtgtcctctactagctcatgccaataatgttgatagaacttatcccgattgcttaggacgacttctgagtcagtgaaatccagttggaattctttagcaaagtttttaactagtaaggccacagtcgagtagtggtgtagctccaggttttcctgtgagtcacaaatggcgcaacagttgcctcttttgtactgggctttgattccgtcacgcattatggagattgcatctctcttatattttacattggaagccaaagtgtttctcctcttagttgggaaaatactacttcgggtacagcaattaaatattcctctcattcaccctgatgtctatgagatctctcaaggtatgaatatattataactgccacacacgaaattgtaaagtgaattttataaagttggaacggaatttgtactcactactatccgttccaactcagctcttatttgccacgggaaatcgagtagatgccgtaacgcagtgcgtcacataagtgagagttggcatcatgacgaggtttctctctggagagcttctcctccccttcctggaagtcccacttgtagttctggagtgcgtgaattaacgcagtacacgaggcgtcgacaatgatcttaccctgctggaatagagcagctaggcacgctaggccatctagaacagatttcttggctggggcagaagatatctcgtgctcgtatgccaagtcctgtcggaactgtgcggctgcggagtcaacaaagatacggtctacattataccggtctatacagtgctgtatatacatggcatgctgtgctgtagtcttctctgcctgctggtactcctcaaggatatagtacacatcctggtcatagtggtacttaatggtaagtactgctgtcgggtccctgtaaccaacgtcgatacctagaatagtttcgaactcgtggtctgctgcaaagaagtgacccatacctgcgagatcctgtacatgctcggaaacgctaaaggtatcgtagatctgaccttcgaatacagagaagtccgcctcgtattcctgtttgaaatagttcttagatacagtcttacgtgcttcctcgatatctgcaagagatacgcgagggttatctcggtatgtaccgtggattgatacccactgcggaagatcttctcggaatccctgctcgtagaaacgtttgaaccagttaccgccacgaggagtagagataaacagagctttagagttaggcttgtccagtgtaggacggagctggatatcaaaagcgtcaccaccaacgtcagaaattgctgcttcgtcaaagataataaagtcgtacgaacgaccaactgcggagtcagcctgcgcagcggaagccagcttaaagagtgaaccgttagcaagttcaatttccttatctttggcgttctcacgctcagtttgaaggccatatttcttaatcagacctttgatctgcgcccacccgatgtttgccagggagtagttcggagctactacgagcaccttaacgttcggctctaggagtttaaggaagcctagagtatacgcaatgaacgacttgccaacacgacgtgatacgcatgctgtaacgaaacggtgacgcgggtcttccagtgcgtttatgattgcgcactgcggaccatttggggtgatgccctcggtggccagcaagccggacaccgggaatttaaagaatcgtttatcaacaccaaaatccaccacgtcagtcgtattaatataactacgtgagatctccattatttaccggcccccacaatgcgtgacaggagatccgtgtagttagagtcgtgaccacctgccaagttgatctgagtattagtctggtgtacaggagctttagcctgcttcaccttctcatactcgatctgcatcttcatctcatccatcttcattttgtgcatgagtttgaggatatccataatatccatctctgaacccattccagtttcatccagttcctccattttcatagttagaacagtgtctagaatgccgaagaatttatcacggttacggaagccagattccatgaagatatccgtaaggtacgctttgacctcaggtttacgcataatatcacggaatttgggttcctccataccaacagctaacgctgctttcgcaacgtcgctgccagactccagatacgcttctataactagcatgccttccggagacattgcatctggtacaattaaatcattgctcatattgcctcctttaggcaagcctttgcacagcaatcctaacctcaggaagaatcacgcgcatgttcataatattgctcatctcaacgttaacccaaacctcaacactaccatcagccctagctatcagccaatagataatggcataatcgccctgagtggcagagttggtagtagtaggtgcccacatagccttcatttgcatggcgttgttcccaggaataaccccacactgagttacggtcccgcgtataaagtggaacggcacacacatgttaactggaagacacatgatttgatgcacgcgtttctggaagtgatttccgaaaattctcagcctactatctacctcgctccactgggtaagatcttctagagggttataacatccaatccctgcagcagcaatccactcatcgtttttccagtctagagtgacgacgcaagccccatttctggagttattaacccctaaccacaaggtagccaggtggtgactagcattaccgctagtacgtaggttccctccaatatcagcagagccggtaccgcccactaggcgaagaggtcgagttgcttcggaccatactggaccccactggtttccaatttccggtgggttagattttacataccactgcgcatcagatctaaaattgtaaactcctacagtggttacatgcatctcacttatgttaccttgcccaaactcagcaccattatctggtcgagttagaggctggttgaagtgaacatacccattattaccaacagtagggttgccactaaatctggcgacgttggttgcaataactcggatatcaggcctattacctgggctgtagtttatatcgttctggtttatgaacttccacccagtgttcattaggtttataccgtttacaatgaactctctagggctgattttaatctcctggttgcgggagccaaatacgttctctgcgtagaacccctgcccattgtatttcatattagtaatataccagcgaacacgtttaggaacacggaagttattgtcacggtaaatggcattgttaccccaaccactaccagcattgttgttatctgtgttctcccaccccataaagttattgggcggaccacggaaaaaacctgctttgtactgaacctcctgataagactcagtctggatgttatgagcataaggaccaccaacgggattggagctctgcccatatctaggccccatatgtccgtacatattacggttgagagtctcaccacgcaaacatatactattaactcctgtggtacgcatccatgggtggcgcatagcatcaacaccaatagtaagaggtctattgggcggagacacagaaccggctatattgccactaaaagcccccctatagagcacccatccagctttaataatagtctcaaagttaggacgtataggagctccaaccggcggcccaggccctctgtctccccattctgagttaacgccccaggtgtacatacacccagtaccgtctcgtagcttctcgttaatagtacctggcgtctcttcgaaatagaaactaatatccatgtgtaagtctgcagaagcacaaacgttagtcttcatactagccatagtacctgcagaagcctgggaaccgacagtattactaaagtaagcgttatacgctttagcgcccacacccagggatgtaccataaatgaaacgtctagtaccatcctcaaactcaacttcagtcaatactactctgtcgtaatctgcggacagtacctgaataatcctatctggcattctagtacaacgataccaatcaccaccatcccagaggtctctttcgtgagtttctaaaactacaacgtgaggcatatcgctatggaatatagtatcccaacctggattagtgtggttattaacgtctttattgttgccagaggtaagagacaacacttttttgtcgcctatccttcctgcataaaagcccataaaaacctcaaaatctcacttgctaacaagtgacttttataatataatattattataaattaaatcaaccgccaagtaaaccagattttttaaaaccatctaggaggaccactatggaagtagttataggagcacttgttttactctcaatcgtactatttgtcattaccgtaaagcagggtaagacaatcaaacagctagaacgcactaacggggtgttgcaaaagtcttacgacaaccaaacccgtttgctgcataaggcgcagttaaacctgtctgaatgcaaggcagaactagaatcagcaaacaaaatctacattactaagggtatggtgtaaaacatgactattgtattaattttcacaacattctttttcctggcagcagtttggtttggtgtgcgagcacatgacctacggaacgcggtagtagcggcagatcttcgtaacaaaagtctacatcaagagatccttcaaactcgggcggaacggcaagtagctatctcgaaacaccaacgagtcatgaacgatcttcggaatgacccgagcaacccatactacatccctccaataacaccgcaggtagcgagacgcaaacagaatcggggaaactcgggaagttctcgaaaagtttcggggagtccttcatctaactcgggaagttctcggagcgatgacgggtcgacggcggcaatcatagctacaaccgcggcagttgccacgtatagcgggtatgactcgggaagttcttactgcgacagcggcagtagcagtagtagttttgattcgggttgttccttttaatactccctttagccttttctccaattttcttaaagttacacatgaaggtgggctcagtgggtcggggggtggtatggtagtccgattacccccctagctaactattagtaccctaactatttcgctagggtactattagctttcttatgatgcgatggctaacgattgaatgaattgttgcggcttaattccgtagtcgcttctttcttcttcggtcataccttcccagcaatgagctaaacgctcgcaaagatattgataatcattatcatcatccagcgcttcatctatgaatgactcacccgcaaggcgcacaccaatagatagaatatcgttaattgcggtagcgtccatcgtttgaaggccagcagcagcagcagcagccaacacgcctctattatcgtcaatcatagtgatagtagcgttcggatattcagctttaagcatttcaaaataatgcgttttatagataccatctttcgaatagtacacctctttataatcagcatcgccaatatatcggtgcaatacatcgcgggatagtatctggatattaccaccgcgccccgcccggatacgttgtttgcgtaggaaatagtaatcactttttcccatatagcgagcggtaacaataatgtttaatacagtgggatcgttaagcgatgcccgcatatattcaaccaaaggtaaaagagtgtcggtcatgattgcatcatgtacgcaagccttttcccggtacatgtttaaatctaagttacctttctcatccatacacgggaacacacgggcaaaggaattaataacagtcccgtctaaatcccataacttaattgccttaattgctagtttattaaaagccattttcattttctccggtttcggggttgttggtaattaatcaagcgagctatattataactcgctttgttaattatcagaagaataaagttaaggcatcggctaattcagccggtttaatccgggtagccattaccgggaggattgccagcggtggtgtatattcgctagaagaataatccattacatcgcctaacagataagtatcatcataatcattttcgcttacgacgataaacataaggccagcggcggcggcgtcaatctctacgatctcgcaaatatcagcttcatagagaatagaatcagcggcgactaattgcgacacaatgccggattctttaaaatcagcggggcgcgggaggatagcggctagagcttttaaaacggtgtcgccgtccaccgtgttaactttctggtagctaacatgcgggcgcccttcgctatcgcgggtgataaccagactgttttctacgacgttggacgcggtgaaagatttacgattgttatagatgaaagtaagtttcatttatttctccagcttatttatttaggggttatttattgccggggtaattaccccggctttttttgttatgcaaagaaaacgccgtctttaaagtcaatcaaggtacgttgaccgttttcataggtgattagatgagtctgtgaccagctagacgcgccaatgttgtaacccatatcgagggaaccagcgacaccagcagtataaacgccgccgtaaatgctaggcgtatgcgtatggccagtgttcatcttaccgagcttgcggaatcccttcgggttgccgcgagcgccgttaatgccgttgtgaccgtgggaaccgcattcgatgcccgcaattttcatcgattcgtctgtagttaagaagatcgcagcgaaatcgcagccagcaacattgcgcagggcgtaatctagtacgttaaaagtatcgtccttgttttcgattgcctcataaatcgcagcattcaggcgataataaagatgggcgttcgccgggtcttgttgaatgttagctttgctatcatccagccagcgagaaagcgctagatcgtgattagattcaacaatgaccgtttggctaaactcacgttccatttgttccagtacgcggcccgtatcgatcaggtcgtcaattaccttatcacgtccggcggcgtactgtttcgcaaggaaaacaccactagcgcggttgtgatggttgcgcgatgtaaaatcatgtacatcatgcacaatttggtaacgagggcgcaggatatctactagcgcggtttcgctagggttgtattcccagcttgccgccgagacagcgtgatccagcttttcggcgtgaatgtcaccatattgcagcgcggcaacgtggcccgttacctcctcgccaccgttcacagtaaatttatggttaagatcgtaaaacatcccgctttcgtccatcgtttcgatttggcgagcaaagaagttgccgttgtcgtcgatctctaccagcaaagcgccgtaattatgcagcgcttcggccttctggcccgctttttgctgaatataatttttcagcgtcgctgtgccagttgaatacatacggcgcacagtgtcgcccttcattgccgggacactttcggcggtgattttggcgtgaccaatagccagccctttcaggccgtaggcggtcgcagtctcgccaaagccggacagcggaaaatcagcagttggcagaatattaatttccgccatgaatgcgaatccggtttcgcggttgcccaaaaacacgttttcatcacaaatgaaatctgagaaagcatcatcatatttcagttcatcgttgccttgcccgttttggaagccttttttgttgtaggcgtatttgcttactaacagagtagcgccgagatatttcgcggcctcctgtaaagttttccagaaattagcatgagggaaggtattattttgaatcgacgttagcagaaaacggcggcccggaattaccttccagctttcgacgctggaattaagctgaccagcggcaacggggcgggaatcttccaccgcaacacgttgggcgcgtttttcagcagcgggtttaacaggcttgttactatccagccaatcgcaaatttcgctagagtgtttcgccgtgccgtaatgctctttgctcaattcgtcgcagatctccagctttttagcgcgcagacgtttaccccaaaaattgaggttgttagcagcggttaaaatagccttttgtttctcgagtgcaatgatcattatctaaattctccagttaatgggatataggcagaattgccaaatataacgccttctagctggtggcgttataatttgcgactctaaactattgccggaataatgcttgctgatattccaaaagctaccgccagaataataaagattattgaccagcggcggcaagtattcgctttcttaaaccagaaatcacggcggaataaatccatttgttcactgcctatctccatgaaattatagtaaccatagagacaagcggcggcgaaaaatccggcaataagaattaaggattccgtagggaaaaagatcattttacagtctccttttcttctacgctgaaagcgtaattaagaaggtaaatttcgcgggatgataattctaacatttccggcttaaacacttcgcggttaatagccataccgtaagtatccgcatcagggttaacccacaaaacaatatattcaggtactttgacgctgggcggcgtcataaccttattatcctgataccccgtttggattaattcatccacaacagttcccgttaatttaataacggagcctttaattaaagccatttttatttctccagttatgggggacaaaatatttaattatgcgccccgctagggaggcgcattataattattctgctgactcttttacttcatcctgaacgccaaccatacgggcgataacgtccagttgatccagcttcatttgttccagacttgccaggccgtcggcgtcctcgatcaggccgtcggcgatggcgtgctgagtgagaacgcgcacatagtgagctttacgcagggaggagccgccgccgactttgcgcggcttatcagacttctgatacacctttgcgctaaccagtttagagcgcactttaacatgcgattccgcgccgacagctttcgcaatatcgataagaccttgcgagttggctacctccagaccatcggaagcaatgataccttcatacatagaaatggcggttgcggcgtttgtttcgttccatgcgaatttttcggttttagtagcagtcatgatatatctccagttttatttaagggtttaggctagaaagttagccgctatatattctagttagaatatataacgaaaactctttattttagttttcaatttaaagctatttaaagcggcattgtatttatacgctgcctttaataattacgctattacgtctatttcacgctatagattcgtgttaactcacaattgccgttcaaagcatgatattttaagcgatataaatagttagctaactgctaaccatttatcatctttgcgaataacctttacaacgtcgccggaatcgacccggacgctataaagttttaaatcactgttttttgctttttccgtttcggcgtataccgcattaattttatcaaacgggatcatcgccgcccctttgatatatccgattttttcattttcgcccggcttacttacgtcgccagtaacgaaaggaataaaaacggaatcgccgatcattggggttttaacgttctgcatgtttcttactccagtttagtttattgggttatccggttaacactctaatattctagagtgttaacagaaaactcaattacccttactgagagaatcgacttttccaaatttttaaagagcggtgttgcttattgagattctataataaagcgttatcggcagactgtcaaacgttattttgtaaagattttagataacgcatcatgttatcccaaatcatcggtaagccttgctgacctccgcgctgataagagcggtaacgccgcgccatatcgcgctgcattttgaccagttcggaacctgccattttattcaattttgccgccggtttagatgatattacaaagcgtttcatgttgtcaacctttaattagtggagtgtatgattccgtttagtttgcataatgatttggccgtctttatgaatgaaggctaaatctacgtcgtacacatttaaataagtctctataaaatgttcggcgtctgctactgtaaacgtttttactacgtcactcagcatatatgattcttttaacatgttttcggttcccttattaagtaaagaaagccgataacgctttttatagaatcccaaatttttaaagagcgcggcggtaaacttcccgccgtgtagttcgtcattgccgccctacgagataaataataacacaatggcgtttagccgcaagcggagaattgtaaagaagcgtaaagagaaaacaggcccacgatagataggaggcgcacgcacgtgacacaatatttaaagaaagtcaacgaatatttttactatttttcttcaaaaggggttgacaaaacctatttcacacgaggtgaggagatcgcctcatacccggtatgattcatcggcttttatctaaaaccgcttagaatcgattctagagcgttttagaccctgttaataacttatacagaaagcaaaaatgaaatttaattagttatccactagacaaacgattatttttatgaaaacacgaaataatgcttgcgtttattttatgctgtactcctgttttccgggcaagttatccacagcacaaaataacttgacaacgtagaaagcgatgtaacgagatatccacagacttatccacaggttatcctactgtatatccatacagtatattccggcagcggtaatactctaatatgcccctagaacgctctataacgcattctgagcgctttaaatttagaggccatattaaaggccattgctggaggggcgcagaaaaacaaaaagcccgctcattataagcaggcttatcattagttagctaactattagcggaataccgtttctattgagtcgccgctagagcataccgatccgccacgataaaacaggcgttcggttttatatttggttagcagatcatagagatccagatcatcggaaagcgggtaagactcccccagcgcggaaacggaaacaggtttacccgctactagatcacggcaaatcagaatcagcaaaggccagctaatattgatagcatcgccccgcaatccaattttgagggtagccacttcgtcaatatgccttgcattctggcggctaacatattggatcacggtttccatcgttttatagtgggccagaaaatatttgttgacatagatgtaaatcatagatatacgaccccgctaactttccaaccggattttaaaccttcctcaacatgaaacatggctttctccaataaggggggcggctagagatttagccgccgggagggttttacagcttatcgcggaaagtatcaagccggttgttcagctctttaatcgcgtcggcatggatttcgtcatacgttgacacgatatccgccagttcatccatagttagcgaactaacaataacggacgttttcacctccagcttttccggttccggttccgctggtggcgtatccaaaaacgttagcgagcctaaactgatcaggtacacttccatttcagtagcgccggatgcgcagtcgatttcaaagctactatcaccaatacagatatcaaagccatagccatataccccgataatcctcaaggggattcccagcatatcatctgtatccgggtaacagtcccggcggtcaatctggcgggccagattatccaaatttttcggttcgacgaaaatagcataattgccgcgatcgccattatcacgcaggtgataccagatatcggcaagcgtcatctttttaccttcaaaagtagcggtaaactgttccatttttgtctccagttagttagcagggtaattattatagcgccccattatagaggcgctagggataattattctgctacgtcgttttcaatcaggctagaaagattgacgccttttaatacctcgtcaatcatttcgcctacattgaaactttgtaccagttccaacatggcggcttgcattgcagcgtcagccgcaatcaccgctttgcggttgttcggcgcatactggctaaccgcgaaattcagcaggttagcaattaccacacgacctaccgccgtgtcaacataaccgcgaaccataaacggcgctttgctggcggcgatgccggaaacttttttcaggacgatagaaccggcttccagtttagcagcgtttacagcagcgtttttgttagcggcaacgatagcggtagcagtagatttgatagtattcatttgtaaagctccagtctcaaaattattagggttaactacattttcagtaacagccggggcgacttcttctagctcgccatcataacgataatttccagtccttgccccttcttcgatatcgatatcatagaagttacatggtaacaggatgctaccgtccttgtcaagcacaaaaatcatcatttcgctagagattcgtgctggtggtagttccagatgatcgcacagatttttaacccatgcgcgggcatcagtgaaagcgagcagttcgctttcatggtaacaaaaacgtctcgacgcttgcttaccttcggacgccttatacaaataggaatccgtagtagtagatactatcagatcaataggctggctgtcaaccaaatattgatcatcgtgataaataacaatcgccgcgccggggttggctagagcgtagtcgcggcaatgctcaaaggcatagccggatctactttccatattcgagcggtaaacgcccaaaatatgaccaatagaggcgcacttactgccatctaacaggttgcgagcgccaccgcgaaccataggcaaattagcaacgggggtaaacttctgtaacattttctgttactcctttgtttggctgagaatctattatagcaagattctccgctttttagcaagcaaaatttttctatgcttgccgggagatcaaactatagggaaatcggatttgattgtctaccactaaaaatagtggttgcttcccgctagagttatgttattattatgactccaaatagaggagatcgaaaaatgactttttcaatgttggcgctcggtttagtcggttctatgatggttttgggttttatcgctttttgcggctatgccctctatgataccttgtttaataaggaggctttttaatgagaactttgcgcggtggtagtcccaaaagccgtagccataacgtttaccaattgaatgttattcgtgatggtcagaaaaagggcggtggcggcggtgagtggggttttcgtgtcatcatggttattattatgaccctagtatttttgcagagctgccaataatgagcggcctaatgtttttgggcgtgatagttattagcgcaatcattaccctgctaatagtttcagttgtaaatcacttttggcctgagtgtttccacggcgatatgtaggaatgtcgccgccctcctccaccgcgtgaccccttactaaaatacccccaggaaaattaaatcgcttagagcgcgttctagagcgcttaaaatcgacattagcagaaagtgttgccgggaaatactgtataaatatacagtaggataacctgttgataagtctgttgataactcgctaccgatcgattgaggcgtcaagttaatttacaattttgtataactctggggataacttaaatgatagtgtttctcacttcctttccgaaatgcaaatcattctcattcgtattcagctcggtgaacgagaataattatcattcgcattcaacttctcagatgagaatcgttctcattcgtatttgcatttccgacccccggcccttcctgcgcttatgtgcaaatccgacaatttgtcaagcaaaatattacgtgaggctgctagggtatgtgcaaatccgatgaaaatttatttttaccgccctgggggcatgtgcaaatccgacactaatatgtgcgaaaccgataataatttttaggaggaaggcgcgcagtttgctgcagcgcagcggtgggcgcgagtctgggtgagcatgtacaaatccgatgggtatttttgggggaaggataaacggggttaattggggcaattcggggatgatgggggcagggggcagataatggaaaatattatgagttaaatgggggtaaaggggttgacacagaaaaaattcctgtggctctaaaaaacaagcgaactcacggtgacacaccgtgtaaaaaggcttgaaatttcaggagatattttatattcgcagaatcgaagattttgatccacagctaccgttcgtcagagataatgtgcatttccgacaaccgtttgagtatgtgcaaatccgacaatctactagctgtgtgcaaattcgaccctgtttttgtgttcaggagtaatgtgcatttccgacaatcgttttgttatgtgcaaaaccgacaattgctagaaatctagaaatgcttagcttctttaatatttgagagctagagattttatttagtggatgtgacgcttaggacttgggcaaatgacgtgagtttgtgtgggaacttcgtgaggactttgtggagtgacgcttaggacttgggcagctagcgttttaatgtgtgagatgtgtgaggcagctagagtttggtgtggaacttcgtggaattgtgtgagtttctagaaattgctttccgaaaaagtgagttggaaaataaccgccctccccttaggtgttggtagataaccgccctgtatagaaagatgactagagttcaaccctagagccgcgaaacgatggtgtgtaaggattacctacttttaaacgtgagtaatcgtgagttcattcccatgtttccctatttttctccttagtttccagtaattaataattccccttagggttttaacgagctatcgcacaccccggctagcgatactgtgcagattgatcaatttttgtaatttcgcactaagtgtcttgagtcgggacagggccctgacacttacgaaattgaaaaatcaatatctgcacatctctagcggatgtgttaactatctatttaatctaacttttttatcttatagagttattctaacatacatctgaaataatgtcaagaatttttacgagagtgtttgaaaaagtgtcacggggtagatgtttaccccgtgaactcgtagactacagttgagaacgtaggttctctaactcagagaggaaggcaggattcgtttgatcgaaatccttaatgaggaggtgctgatcaaaggagaattcgtaatcttctccgtacagcttaatgaagaggtctggatgttcacgcttcaacacaacatgcgctacgatactcggggtgatacccccatcctctttgtggtaatcaaataaccgtagagtttcatgtctagtttctggtttagctggttcttctttctcaatgccccaaggagtgacaaacttaggatcaccacctgggaagacagaagctctcatcttataggcgtaagagttgagatctttcatcgccttaccgctctgccaaactgcgaagatctcatgtttaccttcagactctctgaccggtaaataatggtcagggtagctggttagtgcacaacggaaggggtcaccgttatagctaggagcgtgagaaccataaagtgtgtcatgttttagtggttcatcttctataatatagagttcaccaatctgcggataagagaaccactgattgagaactttaacagcgaagcggtgtgcgtatggtgtcatcttgagaacgtgatacttcgctcctaaatcatcttttgccgatttaccgtcctctgttactgcgtaacgtctacagaacatctctacgagtctacgctcgttagttgtgagagttgagtatttacgttggtgcagctcataaagctcctctagcattccctccagcttagttaccatttcctcagggtatttggggaagggtttctctactgcattcagtactgcgttagacgaacttttttgtgctctttgtagtgcatttttaaatctgctcattttcttttctcttatagtccattggactcttttttatagccacgggattgtggctcttaacttacttcattccacctaggatgtgagaacggctctctacctgtcaagcgatccatcatcctccggtgctcccgctctctgtgttcattaaacacccgaagagcggagaaactgtccactggcgtgtacggcacgccgttaactttgaggatatcctcgcctctgatcttgaatagcgggttgtcctgctgggccttagcgtggcattcgctcaagtactctgcgaaaggtttgccatcttcccgagtacatagggttcggagaagatagctacagttctcaccaaccggagtccatacttcatatttctcgttcattgtgttatcctcttacataaagaaatcttcatcggattcagctatttctttataaaagccgtgatatgcggcaactgcctcgctaggtgctgccatgtcgaataagcgtgctctttgttttaattcagctttattttggcactgcctaatcatctcttcgacttcttgctgtaatttttcgtctacacgaaccaccagctcaccgtcgtgaattgccccgactttataagtcaacatcgtgagatagccaggatgctgtcgagacttcttgagaaccacgttagtaaacgctgttagctcatgtacgaatactgcacctgggaacgcataaggagttagcttcttacgagcttttactgccttaatatcgatcaggtggaagaagtctttcggagtcttggatatgtcgtccggtacttctagctggaactgattccagaggatacgaactttgttttcagacatgccgtagacaatgtacgtttcgttagcttcttcaaaatcaactgtacagaataacataccctagccctcttacttgttgtagaactctgtagcactatcccattttatgagactctcgacatgggcttgatcccagatatttctggagttagtcagtgccgaaacatgcggctgaataagttcgaacttcccaacggtagcaccgctagtgagcagtaacgaggttaatgcttcgaacttaacggtatcgctaccagatagctcgcttaccgctttaaccttgtcaattatagagatcatcttagcctcttcacccacgaacgtaaagcgcaggttgcggaagcggaaggagatagctgctacactcggcttgctagagtccggggagtagtttggatggaacttgatctcggagactgattgatcagtcagatagttggtgctcggattattcagggaatcgtatttcatctttaacctccaaaggctttatcaatttactggagttattataccaaataatagagtctccgtcaattgaaaatttgtgataatacgctggcacggtgtaacttccataatccgtaactctagtaaccatgcggtgtctgcatttttggcaaccattgccttctaggtgacttctagcagtttgcataaagtaatcctgatggtctgggcaccatatctccaccagctgatttaggctgtgaaacactagcttctcatatccaaagaatactccatgagcgtctagagcacggttaataaagataaggttcttagcatcttgcctgaaatctggcctcagttgctttatcttattatggttgatcgaaccgtcgcgtttaaggaactgattaatggggaaggacttagcttcccatactagttcttgatttatcttctgtcttaattcttccactactcaaattcctttttcaacctctcgtacaggtctttggactgaatccaattaagatatactcgattaggttgattgccacctccacgttgagtaagtataaaacactctttccttactttttcaacagtaactgcagcctggtctacgggattctcccctcgtaggtagttgtctatagatttcatttaatatccttaaaccacgaaaggccagagcaattagccctggcctctttgttaggtgaacagatccagaaactcctctggataatcggaaggatctccaaagtcgatgtgatctgcgttgaccgggtagccttctttcgtcttgatgccctgaagaacatgggacaacacatcaaagtctacgctgctgttgttagtgcagcttgcccaggcttcctgacggtggacgcacttgccatccaccataacctcaacaccgtagccagtattccagcaaccgtattcgcaatccccagaatcttcttctaggaagtttaccacaacacgtttcttagccatttgtcactctcttagtgaatagtcccgtcgatgccttccacatggatatcaattgccattttcagcattgactccgatttatcaaactctttcttcgaggccaggagtgcttcaccacgagcttttccatactctgcaatagcattcagtgtatgtttcaggatatcatcggcggataagccctgagtttgccagtggacttgagctgtggcgatattcaccataaacttactcagctcaacacgttcttcgtctaacgcctgcattacatgggttttgcagttatagaaggagttcagacaaatgtcttcttcggtcagaccctcaaccagaagcatcttctctacttgcgccaggcgatcaagccacggattttggagcatcaaatttttcacttgcatggtataagttcccgtcgttaattggtgcgaatgatttagcgttgcgttcaggacgttgtttagcgatccagcccatcatcatttgtcgaggaaggacaacctcagtgttaaggaatacttcgtaaatccagtgacgtgcgttctgatatttaccgaactcatacgctttcttgaacaagccccaaaccatgctaagttctagcgtctctgcatttgcagtctgtcggaacggtatcactttggagccaatgagttctttcagagcggagttgatatcctgatgactgaacgtggtctcatggaactcgttgaagaaacgataatccagagcgttattagcgttgacaaacatctggatgaacagatcgctgaactcttggtgctcacgattaaaatattgatttaaaacttcagttgatgcggccatctttccacccgttaattgctacgagatacatctcgtaaatgaatacagtgactggttgaattgcttccatgtagaacgtcgccgggacgttatggaagactgaaaccaccatggagaggaataatgcccagcctaggaaacggctgggtagttctcgccatacctggaagttgcaatccaggaagttatagattcgaagctgattaagcattggtcagtctccagtaatagtgacgagtattaaactcgaaaggttcgttggtgatcttggtgtgcagagtgatgatatccggagagtaggactttgccagatctctgcgaaccatcacagtgttaaacggagcgccatcagcacgctgaaccacaattgccaagcctagaggaggaagctcactcaaaggacgccatgagtccttttcagcaagctcaatcttggcgattagggcaattgactcaacgatatcttcatcacaaagcaaatcgtggtctactacctgacgcagagcatctactaacacttggcgttctttggagttaagattcatttttcttccttcttaatggtgttttcaatatcatccagcaatgctgtgcagttatcgtagttaactttgccccggccaaagattctcaaaacacaggcatagtacccggttaacagaattgccagaggatacagaggaaccagcattgctgccttgatagtaccttttaaaccgaagccgtggtacttcccggacaggtagccaacaactactaagtaaagtgctgctacaattggtgagatcatttcttaatctccgtgatcaaccgcattttggttgtcttcgacattgtggaatcctgaccgataatctcttcaatcttagccaggcgaactaagagtcgttcagccgcagcagagaactcatcggcgtcctgtacttgactcatcaacttctcatggagtccgttattggtcaatctcattctacggttattttcccgcagtattgatacccaaaccgccagacccgttccagttacgagggctgctattaacagcccggagagaatttctagtaccattactttttcttcgccttttcacgtttcaggtcacgttcaaagctatcagcacgacgctcagcaacctgctggtgttctttggcccaacgcgcctcatttttagcgaggttgtaggccgcagcatttttgttagtaccttcgtacagagcacgaagtgccgggagagacagtttagcaagctgaccttcgaacccatccatatccagcaggattaccagtaccgcaaccatttcgtctttggtcagggtgttagcttgttcgtcagcagttttaccagtggtgtaagagatagtgttcttagccataatgatttccgtccgtttcgttaatttatgcgtatattataccgaaattctaactacttagcaagtgaatttttaaacttttttaccaatcgatccggtaagcgtaaacttcagaatgaatgtgttcttctaccagtttcttaatctcgggccagttcttttgaatctcgtctagaacatagtcgttcgaagcgtcttcccattcgtcaggagtgcgcatgaaagagttcgcatactctagcacactctctagaacgtcagtcaggtaaactatttccccacgattacagtaggcgtgttgataatcccgacgatcttcgttaaacggggagtcgctgagatagtcccccatatgaagaagttcatcggcgaactcttcaaatgccttaacacgagcagatagcggtatgctttcatcacgcatcagcaggttaaaagaagcacgggcggtgttaactgcgtggcgaagggactccatatttgcattcagttcgatcattgcgtttttcatatttgcttcctcatcaatttataaagctattatacagaaaaattggctcggaagcaactgaatttaaaatacaaatgctacgagcgcccagattccgcctacaattgctgcaccgactaacgcagctaggattaagaggccaaagaacgccttggccatatcatttcccattccagtatacatggttactcctcgattaccagtcttctcatgtagtcgttccaccctgcacagaatggagaaacaccccggagtagttcggtggactggtgctgcttataatgatcttccgcagctttagccccacgtttcttctccgcccttttattaaactcttccagcgcgatacgtccttctagagcttccttagcgataggatactccggccaatcctcctctagaacgatatagttcgggaatcctaccttgccgtcagcctcacgacctttaaagatcagagataagctgtcgtttatctcccggatagcagtgctggttagatacttagcggcatctgactgcttaaatacaatatagcgagattcgagtttcatgatttacctcaggcagtgaatagaatgtcttccattgggcgatctttatggatctcccagaattctttgggttcccaggtttcagtgtccggggcaatagtaaccgagatattcgcgtcgtctgtaaacacggagtttccgttgtccagcattgcgacacatttctgcaactcgaaaccaccagcaactacgaatacttcaccttcttccagatctttgaaaagtttcatgtctcacctattaaataatgtcagcggaaccacagggatcatcacgatttgtggtaaatgtgtataattgacctagaaccggcgacgccacggtcatgcgaccgttaaaggtgccacctgtgtccaaatagacacggttcttccagcgaagtgggaacgggacaccagtatggccatgaaacgtgtagtctactcccacgatttcaggaacatcgactgcgcactcctcggagaagctggcgtagcgatcgaagtacggatgcttctccccactacgatacagattaaacccaacttcttggattacatcacgatcccacagcagtacacccaaacgacgtaaatctggtgtagattcgtgttcgtgcacaatgtcgtcccacaccggtacagttacacccataccttgagcctggtagcgcagagggataccagcatgaactaccccgtaacgcttgccacggtgttcaacggtcatcatgtacggcatcttgctgtccatgtcctctgcaatgcctttcagggtgtccgtatcgaaaccttccgtgatagtccagctaccaccattatacatccagttagcataatcgtcctggatcatgaactcgtcatgattccctcggacggaacggaatttcgggttgtacaggaacttcgctagaacctgtaagttctttgggccacggtcgataagatcccctacgcagaacacgtagtcacgaccttcttcatacccagcaagttttagggcatccatcatcatatcgtactcgccatgaatatctccgatgaagaagatattagcattgtcgggcacggtaactgtttcatgtacgttcattaatacctcgtctctaaatagtaacgttttggcagcgagaagtctgtgggctgctgcctgtgatctcttacatattcccctcgataggggtcgtatattacgtattgcactagaccttcgggttcccaggcaatcagtatttcattgcctattcgtttaaatgcgtacccattctgcttagcccacagtatacacgagtagtccaagctcctggcatctacttttatgccagaaaagcccctctctacattgtaggtgataccctttattaacttatcgagctgtattttcttattatagtaggcagcagctcgatttttacgggccatatcagaagaccagtctctagagaatttttgcattatgcacactccacatcgtcgtgttcatagccatagttagtgcaggtgttagcttcatcatcgtccttacagaacgcaacgtagcagtctacaacttcccagaacgcttcgttgatcagagcattttggtgggttagatctaattcatcccactcttcttcgctctggaaatccgtatgtacgtgagcatcacaacctacagcgcctagagatacgacaataactaactcgtcatctaccatttccacgtaagcctctgcgtactcccaggcggcttcattaacaatctgagtctttacttcggggctgagagcttgccactcttcttttgtgtaccccagatcaacgaaggtagtaccaaccgcaaaaccgttattcaggataagatatgcttgcttagtcattatgtaatcctctctcaattcaatataaatattatatcaaaattttaagcgtttagcaaataataaaaaaccccggtctcgtattgagccggggttatgtattattcttctacgtagtcgataaagtcttggatagctttactaactactacagagcgaagcgtggcaccactcagaatgtgatgtgcttcttcacgtccgttctccacatccaccaggactactgcgggtacagtgcgaaggccgaacttacgtagggaatctacgtcgtccgtgcgtttttcaacgggcaggttgaactcagcggtgagcttatcaaaaacaggttcaaactgcttacaaggggcacagttagaacctttaaggaatacaatcttcttagacattattaatactctccaatagtgttttcattgtttttacggttgcggtatccaggtctagcttttctccgaaagcttccattacagcttcctgatacggctttttcagacgaccctcaggcactgctacttttttaacatctcctgccttgacttttgccaaaatagtggttaaagttggcatggaaagtttctggccctcaatgttaacgccgagcagttcggttagcgcattgttaaggtcaattcgggtcattttcttaccgttggacataacaccctccgatttcttagcaattttcttaaactccggtgactcacgatcccgcagagctatatttaactcgtagggagctactttaaaatgctcgcacatctgagtgtagaatctgtccgacattttgtatctcctctctcgaatttataaatatattatacgctaaatcgagcagaaagtcaattgaatttttcattaatcgcagtacttgcctcgtcttacgaaaaatagtgtaatggggtaaactgagtacatcaacacaggagaaataagagttaggatagacgtcactccacctgcgtacattagcggtataaatgctagcgttatagctaggactatcataccgaataacaatgccaaggacaatgagaagcaattctctagacctaaccagagccagcaaaatcctgtccctctctttttctcacatggacagcgaaacacaccaaaaataccaaatacgaaatgtaggagccatctagcaaccctagctaagcgtgttctgcgaaaataaatggcaccgcgtattaaaatccatgttgcggaaaagaatactataccaaattgaaatatcttgagtagcattatagttactaaacttgcaaacataaccacctcctatttgcttgctccatacaaagaaggggagcctaaaagctccccttaatgtcacagtaactctacgtgtccgccgtcatacgttccgcgttggatttcatcacggtagtcgccagagttgttccaatccgctccgaaacgaacggcgatgttcatttcatttgcggcctttttaaatgcaccgacaatagcccagaatgcttccaagtcgttccagtcaatcttaccattgatatacggagcgaaatcaatggcctttcccgtaacgtgcttagacttgctagggtcttttaaaaatgaggtgccattggcaatattctgggcactctgttgtacagtacgtttgccctgaatgatggtaaaatcgtgtggtgagagttccagagcacgaatagccagagccttaagtttaggatctacagtatcgagctgctggagactacggtttccaaatctgaaactcatattgatctccctagtgatctctgcggcgatgcgcagatttttgccatatagtcattaaacatgctcatgtcctcgtctaatagtgggtatttctcccacgcgacggcaacatatccagcgtagatgttattaaggttaaaatatgggcacgtgtacacatactcgaagtttgcactcttgaacggcggcaaacccgttccagaccacttcgataaaccttgtttattccttgcatctattgcaaagtttagaccgtctaaatgcgctcggtagagcatagacgtcttgtcaactgctttgtcggatacatcggatttatccaactgaacgttgctttcccaagctatgatagtttggtaatcatttatagcctcaggcttgtatttaaccacgaagacggcatcagctcgagtctgtgagaataggatcattgccttctctcgtgccacatttggaaactctagtgtgcgttgtactttaacatcttgtaggaccgccgaagtagagaaagtctttaagtacgacatgacttcactcgtattagctataaagaggtagataactagaccaaccagtaaggttagcaaacgtttaagaagagaagctggatccttcgcttcttgtagtaacagcgatatcaactgtataaatttatccattaagaacctcctctaaccatttataattataccctttattggaggaagttgcaataaaaatttatagttattgctcggatcatactttgagacaaatgtcaagtagaatttagataaagaaaaaggccagagctaaaaagccctggcctacttagttttattgacccgcagccttacgagcttcttgttctcggtgcgcagccatacgatctacacgttcgttgatttctttggaggtcagccaaatatccttaccaccttctatcatctcagtgatctcttctagagagaagaatggatagtacaggtctagcatcatatcctcgaagaacgagttaaactgatcggcatagtgctggatctcgtttttacccttaccatagtgtgcgccacgataggtatgacccatcaacataacgtaagggtgcaccagccaaccatgacatgctaggaagattgagcaggcagctgatgctgatggcccaaccaggtgcccaattacggttccctggcagttcatgataaggttgcacaactgaactgctgtatcaacgtacccgccgggactattaatataaagattaagagtgtctccctcttgcatagttgccagagtgactgataggtcgcggtagtagtctacatcgactatcggcccatcgagatgatagtggtaaatattatactctgccttagtcgccaccagggaggcgaagtagttaggagtcttattgccacctttctgctctacgttattaatttgtcccatactattaccttatataaagagaatcctctcgtcgcaaaatgcgtttacatttttacgtaaattttccagtccgtcaaagttatttgtgaccacattatcaataaactcgggtgcaacacctctagcagaggcatgagtagattggatagcgtggatgttgttaggggcgtgaactttaagaatactagagttctgcgcacctgggaagttccgaactagcgcggcttcattatcaaaacgaacatcagaaataatactaatgtcagctttggtagcagtaatacgatcaaccacaatattcaaccacaagttctcatccaccagagcgcgtcctaactccgtgccaacaaattccagcattttacgaggggacgtgtataatgggtacagcggggtctcatgaccctgatagaagtcaggcgcagattttgcgatcaacggatatagtgttgacgcttcaaactgaggccaaacgtaaggaaaatcggcgtacttgtcgatcccgaaacgtttccagacgttagcagtacgctcgagggcttcctgagtcacccaaaaccactgcttgatctctttcgtcctgcgctctgccagcttttctggcgtgactccaaggattacagccgcgagttcataaactggagctgcaaaactgaatttactgatagaatactccggaccgaggacttcccaggcccaaaccttagccatgtcagcaaaggtgtctttgcctgcgccggcatcaccaactaatcctaaaacgtatttcattttgtttccttattgaacggtttgcaacgatattcattaagtgacacgcgataggtacacgttaatgcggtaagattggcaatgtaggtgtagacctgctcattacacttgcccattgtgatccaatcctggtaaggtatgcgaacatacactttcccttcttcgtttatgaactcaaaattaaacgggcaagtctgtaggcttgctggccacggtagatgttgcggctctatccccgttactgagctacttgggtctggccgttctgcacacccggatgcgataattgcagccgagagcaggagtccatatttccagttacgcatgaaagtctctcctggaattcattaactttgtcttttgccaccttggtagcaagtttaggtttagcggcaaccacgccctctttggctctagctgcatccagtttattaatacgtccatccagatcttcctggttcttagctaggttggttatgtaggtagtggtgttgcgatctcgatttctaatctctgtttggagattaccaattgtcttttctagttgttcattacggtttgatagggactgtaaagaactggacatatctgttagcttattggtaatgtagtaggcaccaccgaaggtgcctgctgcaattgccagaaacagaattgctccagtcttaccgctccatattcctgaaagaaactttagcatcgaagcccttagcaattaaccgatcacgatcagacgtagattcggtctttggttccccttgacccagcacaccgaagatataggattctagggtctggtgccagcgatacaggtttggatcaatttcctgccacgggaaatcttccgcatggaagttgaaatcagttttaacggtaatgttaaccgttgggtcagtcttagactttgcagcatcccatgccatcgcaatgggcttgttgaaggtctctaggaacgcagaagccgtagcagttgcgttacgaacatgagcgtcgatcttctcaatcgtatttatgtcccaacccatccgcaggtagtatccttggtcttccagtacctcttttactttaactggatcgaaagtctggatatgcacagcatccgctcctaggccagtgtgataaccatacagccagcgtagtgtaccacaaatcaatactggacgaacttccagagttcccatattaacacctccgtatccaaaggaagtgcggttacgcaagatttcagcgtagaaaataatttgttcgaaatcagcggatacgtttacaacctttttcacctcttcgcgataccatgctctttctgcatcatacatagtaccttgtagatcatatacgtcctttaatttagagataatacgcatctttgttctcctctcatttataaaaccattatacaacattttaagcgagagtgcaagtaatttttaaaaaagaaaagcccaacacctttcgatgctgggcttggatatttagcgatttagcgggtgatgttccacacagtaatcgttaaagatcttggctcgcttgatgctatccggtttatacttagcgaacgggcctttcaaagccccctgtaggatgaaaataaccttacacagtctgccgatagtcttgcggctcatacagcggagctctacggcatgcttaccgttacgaagctctaggatcttatcgaaggacttcaggacaccagatgcatctttggcaccgccttttgcgatgatggcctcgatatctttacgggtggcaaacttagccagaaactcgaaggctttagctgacagcagcttagcagagtccagaccatgattgataccaactgccatccacgctgatactgccagtataaataaagtaaacattttgcttcctcagtttgtctttgaattagttaatggtcagcgaccaactcaccacttcgttcatcgcgggcacgactccggataggaacaggaaggtgacccctataacggccctaccattatacgtgtgggttcatgttacacatcatccgagtcttttctacttcccgtcgtgctttgcgacgttgccgtcgtagcttgtattcattttcaataaccttatggaaatggtcattgatgttatcttccggcagcatcaaacgaattgttgccaactgctcaatctgaacccgaaggtgggagttaggcatacaaagctcttgcatctccacgaacccggataatcctagagcggtcatagaggctttagcgtatactttatcctcttttaggcttagttcaacggttatccggtagcgattatcaaacacagtacaccactccgagggggctgcaccagctcttgcccagacacagtaaggagcttcctcaaaagcgcactcctcattaatccagtctagggtctcttgaagtttggggtgaagattactcatcgctatcatcctcgtcttctacctgacgaccatagcggtccagtgtcacagcaggcttgccgtaggttttgttcgtgtagatcttagtttccccaaaacgggtttcagatttacgaaacttaccagcttctttagtaatcccattcgttgttacacgaacccgcccgttatcagagatctctactttgttacgctctgcggccagagatactccagagtacatcatactgaatacgatgattgctgcaattgaacgcttactcatagtcttcaccttcgttatcttgctcatccacttcaccttcgaggtctggctcgcagtcccggcagatttcctctatttggttctccgccctttcaaaagcaggacaccaccacccgcaattcacgcaccggaagatctccatatcttccgcggtctgccagaagagatcctcgataacaccttcgtgaagattatgcccgttagccaccagctcttcttcgataacattgagagcctcagtttcgcttacacaggaaccttgtacatacccgtgcattaacgggcggataatgctttcgatacttagtttgctcatgaagctctccctatcaatttatgtaactattatatcgaaaaatcgcctacaatgcaactgaatttttcaattctttggcttcggcacgctttcttttgtattcggcagctcccttttcgagttccgaattaaggtagtcaaccatggtatcccacttacggtttatccagtgacgagtaccataatgcgagaatacctgtacggtatagtctaccggactggcgtctttgacgctataccaagcctcaggactaaactgcttgaggtcatccagctgaggggtaggcatatccaaagccttttgatggtacagttttgtcaggtcaaatactttctgctggtaacgttcatggtcacgatagtagccagagagtcgctccactagtgattgggctgcttccagattacgagaggttacaacgcaaatacgatccggcaacccctgctccatgaattcatgtactacacaatatcctagatccatattaacagctccagctacatttaggacacgggcaggacagtgcgtgtacgcacatcttgccgtttttatcaacaccagtaccgtgacacttggtacaggcagcatgtaaacacaccggtcgttgctcttcgactaacttcttaataaacggagcgctttcaaccattttgcacaattcttcgtgagaatatccaaatcctgtagtaatcattttctacctctgcgtttcggagtgggccaggaattagtcttgccgtgagtaacctcctggcgggagctacgtggcataaagttattaccaatcggatgttcgtgttccatttcccgagcgtaggattctaactctagaaagctggcttgggactctcgttccattctttctaggtcagtgaagctgggaaatccgccgatgccgccgtagccaataagcattattttcggcacctcgacattacgttcttccagtcgtttacgaacaagttctattgcttcccgagcaattttatcgtccattacgttcctccttcggtaagtaatcatgcagctctacataagagatgttctttctttctttatactctggcttaccatacataccatgcacttctactactttggcgcgacgaggattattaaacataacattccccggtatgactactacatcacctatctccggggagtatttccaataactaggtactcggtaaacgtaagttctgttactgttggaaaacttaattccaacgtggcgagtagttgaagccatgatataaagccttagccgcctgccgcggcatattaagtttttcagccagttcagaccagaagtctttaccgcttaccatgttatatgctacgatgttcccatcgaaatctttgagacgctcggcctctgcctctagagctggtcggttcttttcaacttcgagctgaaactcgttcagacgcatgaagttacttttgtcgcctaggaaccttacataggctccggctacaccatctatggaggaagcaccgcatttacaggtctgcattttgtggtcgaccagttccagggtgtcacggcagcattttacgaaatatacaactttactcataatcattatatccttcaactgtaaaccagcgtttaacttgtgtgaagcttacccaaataccctcatttgcgtcgctccgtaatttgtaccctgctctactatcgtgtagttcaacgaagtagagcttacccggagtgaagtattgaaacttgtgacccccaacaattttatactggaggccaactccaggagtgaagcgtaagagactagctttcaccatatttcttctccaaacgtttttcacgcagttccgcttttctcttagctacacgttctcgcagcgtgccgtgttctttctcatagcgcaggtgatgcttgttaaaatcacgcttcatacgaacagtatgccagtactcttggctagcaatgaagatagccgggcgagacagcctaggaacatcgtatagctcgaacatgcgcttcatttctttatattcggcatagttcataatacgatcaccgggagcaatctgattgtcccaaacccacttttcgtgctcccaatccgtatagaatgctctgataacgccaggggttacttcaatttcgtaccacgctgtcttagatacacgatcgtgatacagccctgggcggttgaatacggggtttcgctctttttctcgccaatcatagaatgtaccgtctaacgcttgctcaacagtgcgtcgtgttgctttgccccagatgtagaaggaatcaacaaggctagagcgaaagactcggataccacgtaaagattgcttattcattatttgatccccaatgcaagaagatggttagatagcttatccagggcttccagagcagctttgttgttttcgctcaagttgctaatagtcttctggagactatcgataacaaagtcccgaactgctaactccgcagcgatcgcagacttactattaagtccttcggcggtcattgcgttaacgtgtcgggtataataaccaccagcgaaatccagctcgtcaatagcacgttcggcgtaatgcaattcattcagttcattgagttcgttcattgattactccttatccatcatttcgaggcgttctttgacgtataccagtctgttgtgctgttctttcgctaactctgctaatcggtaaatatcagccactaactgcattgtatggtcgtccataccatcaggtggaagcgtatctgcatacgcagtacagatagcgataaactcttctgtgttttccattgttactttcatcttggaaacctctctcatcaatttataaatctattatacggcaaaattggcatttttgcaagtgaatttataaagaaaaagcccctcgctcaaagagacaaggggcttttgtttagaggtcaggaggtgcctcagtgttcttttctaaggatttttgtgccctcagaacaatctggtttatttgctccagagagtcgaaggaaagttgcaggccatgaccttcatcggtggcttgtatgaataaaactctcttagaggcgtctacgaagacttgaaattcttgttccactttactctccaaaaataattacaggacactggttttctctggctatacgagagacgtaagcgtttacgccgtacttaatagccaagctaggctcgtcaaacatgatgcagctgaatcgacggcctatacggtaggtttctagcatgctatacgttgtaattttaacgtgaggttgaagctcactattcttcttttctaggcgtgccatctcacggacgccggatgctacgtatactgcttgaatacctttaaatactgcaaactcataagcagtattaatagcctcaaacgtcttgccagtagctcgtcccggatctactgatagaggccaacgaaggtcaagttctaggaacctgaatagttggttacgatctatgtacatgctggctccttaaaccaaacaatgcgaaaacctgtctcgtcctctagggcctgtactatttgctctagtgtcataaccttatcggacgagaatgtccagagaaactgttggagttcactccaagactcggcctccataatcggaacaccgatttcctggccgaaataatcatcagtaccacgaacgtcaatgcgaccaccggcatatcgtttggcaaatacttttcgagttagttgccctccgtctgcaaaacgattcggctcggttacttccgtatacggaatacccatacgaatgtaccaattgttggagactggccccataaaattggtgctataagtgatcatgatcactcctttaaactggcaaaccccaggagactcgaactcctactgcacggttttggagaccggcgtgctgtccagtaacactcggggaatagaattagctaccgtggtagacagatactgtcttaccattctgattcataacgtaagctacctcatcttcttttaggaagatatgctgatcaagaccagcaatagagatgctcttctgcttaggattaaacccaacgcttgaaccatcgtgaatttcttcgccaccgttaggtgacattaccttaactgttaacatttgcttctcctatagtttgccatctctggctgttaagtgacgtcctaactattatagagtcgagttccaggcagacgtcggcaccctggactacattggctctagaacagcaaataatttaagagctaaacatactaagacgcagcgcacgtacacgatctacgcaggcttccatctcagctaagagtgagaacactagttctgcatcaaaggctttcattgttgtacctctcaagtagtatcgacaaaatggccttaccggctcccagttccttgtttaattccccgcaacgtcaggggacggtcattttatcgaatttggagcgactagggggaatcgaaccccactcagtaccgcttggaaggcggacgctgtaacccgtacagttaatcgcggaattaatgggctagtctcttcacctcagactactacttgatcattacgatctgtcggtagccgcgagcatcgacccttcatatttattttacatctacagaaggtcattagatagattacttacaactacagccaccagagaatatggagccgtagcatctgtcacacataacatcttctatggaaagaatcttcatatgcttaccttttagggttgctggcttccggaattgaaccggaatttaacgacaatgtaaacttaatcacactgtaaccataaccagcaaaaatggtgccccaagtaggaatcgaacccacgacctaccgcttacaaggcggttgctctcccggctgagctattgaggcaagattggtctcccctaagtgatttgaacacttgacctgacgctcccaaagcgcccgctctgccagactgagctaaggggaatttgtatagttatgggagaaggactcgaacctaccatcacctgtgcggaattacgagaccatttgcctacggaatcgaaccgtatctcaaccctagccaggccgacttccccatcagtcgtgccccataatttggtacccactcccggactcgaaccgggaaccctgaagtcttaagcctcatgcctctaccagattggaccaagtgggtattaatcgttatccaagtaggcttctatagcctctagggcttctagagtagagatattgaatctctctttaagcactaccactagagtttcctgattccaggaatctacggaattaatgtagttctcgatgaaattagagtagccacccattatcgaatctccagaccttggaagtagcgagggaacggggagcctacttcaaagctgataccccaattgagttctaccagctctgatttatctaaaagcagatcattgccttcaaagatgtagccgtagacagtagggaacatcgcagccagatcttccatatctgagtgagcgttatgctcttcatggaactgctcaaactcttcaaagaacttttcaaggaagaattctggtacaatgaacgttacaacatcagtgctatcatcggtacgatagaccgttgcttggaacagaccgacaccgactaggttgatagcaggagtagtaaagatatccattattaatataccttaattaaagtgttatcgatggtgttcagaaacttaactgctgcgtctcgattggagaacgtttccagtactataatgttattttcaggatcaccattacgtactctgatctgatacgagacaattacttcccagcggaaccataaagcccgtgggttatatcgcaaaagaattttctgattcattaggtaagccctctcattaatttatgaatctattatacattaaataagagcgtttagcaaatgaattttagaactttcgggaaaatgccaccctcagtcgatgccactgctagagacgttataggcaatctatctctagctgtctgccccattgctttcagtggtttctgcacgcagaaactcttcttgactggaggactttaccacgtcaaacggccggaaatcggtggcttgtttctccgttcattcatcaatcgtttgtccgagtttaatcggagaaccaactaacgaactactttggatttggtgcaaccggttcgatttgaacgaacgacccctggactttcaaaccagtgctctcaccgagctgagctacagttgcgtaattcgtgcctgctcctttgaatcaagaagtccaccccggtctttgggtctttgcagtacatcacgctgctctgatgtttggtggaacttgggagactacgtgttactcccctcacaggccgggattccctgctacccatgatgcttaaccgattagctgaagtcccataatgtggtagaccgcccgagactcgaactcggaacctatcgcttaaaaggcgagtgctctaaccattgagctagcgatctatggatatgttattgttactgcaccgttaaagagctgtaactcccccgtattgcggagatgagataattgaaagatatttaagttatacttctcagcaacttcgcccatagtggagacgtagaagttaaacccccttacgtctactgttaccacgtaatctttatctttcataagtacctcgatttggagcaccatcatggattttaaccatgcttcgagggtttgcaagcctctgcctagtcactcggccaatgatgcattgtttaattagggcgcaccggagttccaccgattgctaacgcttcaccgcaacctaagtcgctgttcttaccctaatactgtattactgactaggattttcacctagacggagttagcaccgtagcgtgtagcggcttacctctccaaaccgggccacatctttcaatttcggtggcagtgttcctacgcgtgcctgagttaattaaataaccctttcagtaaaattggcgggagaggtgagattcgaactcactgtcattcgcttaacaggcgaccgcctataccacttactgcttctctcccaaatttgttacaactcaatgagtcccgcatgaaactctctgtgacatctacaacagagtggaacacacttttcaagttctgctatcagtttttctctactgaaattagagcctcgggcatcacttagtacaaaatctttttcgtttgggtctaaatggtgaaagtcaatggcagctttacacttatcatacccacatactgcgcagtctagaactgggaatacttcggctactatagcatcaaacctatcggctctatgggttagctcacatattttgcacgttggcttccacttttgtttaccggatacaggctgtttaccattagtccagaagttatctgttgttaatgggtaacttacgttacacttattacacgtctttaattccatttctataccttaattggtgcactgaggtggactcgaaccaccgaagtcgcgatgacaagggatttacagtcccgcccgtttgccgctccgggaaccagtgcgtatttgaagaagctctcataagaacctcttcaaatacctcgtcgaaacgagatatttgctaacttattgtgactagggctgacccttgtgtccgaggatacctctagacggtcatatctcttagcccagagagaatttggcgcggctaacgggattcgaacccgtggctccgacgtgacaggccggtatgttgaccgctgaacaccatagccgcttaatttgttattccggttcgtactccatcagatcgtctgactcacatgtcgggcactcccaatggcattcacttaactcaccgcaatcggaacaaatgtacatttttacttcgttttccatttgcttttcctctttcgtttcaatataaatattatactaaatttcagagtactaggcaaatgaattttttcattaatcgtcttcttcgtcccacgagagggagtgcatgaagatcggtagaactgtaggttctacgtcaagcgacggatagaagtaagttttaccttgagacaggtcaatgaacgtgggagttctaccctcctgcatgtgttcatcaaccttgtctagggcgtcgtttaacagttcgaagcagtcagtattcgctccgcaaacaacgataaaatccattaacgacccccgttcggaaaaccggaagcaagcaggaagcgaacaacgtcttccagcgacgggccttcgccatcttcttcttccagatggaagggcaggatagcgtactgcatgtcagctggtgctatcggggtaaaggtaggctctgcgggagcttccgccatgaacactgcggttccgtcaaccagacgatcgatcgcttcacagacttctagctgttcttcgatcttggcctcgcgttcgcgcatcagagccagcagttcagtgcggtactcttcgatacggcggtctagagactcgatgttattggacaggttatcctgtacaatcatcaggcggactacagcagagtttccattagtaggacgtgtgtacatagtatttcctcagttaattgttaaataaagtcaccggtagaaactaccagtttaatgcttttacggaagatttccttgtgatcgccttcggctcgatgcaccataatggtgccaaccagtttgttaatctcaatttctacatctatgataccgtagggcatagcatgctcatcggtaagcctagtccatagttctggctgaagcgtacagctataaaagaccatccattcgtgatctccgtcccatccggcccaatcaaccaccagtgcagattcaataccagttgcagtaatcttttccatttgctaactcctctcattaatttatgtaactattataccgtaaataagagcgtttagcaaataaatttttgaattatccgctccgaagagcggtaatccaggcttgcagctgttagttacacttggttttagtttgacgacggtcgcaaagggggatctgtttctttcgaacgatagagtaccctttacgctgcgacagggaatgaaggttgatagccttcccttttctgtaactaacagtccccaacttgtttttaacgtggatgcttggggaacggaggaaccactacacgctaaccccggaagggatcgaaccttcacaagatagaccatttatctcagcctcgttttcgggtatcttatgcagagtggatgttctgcttacgccctttaggaagccccgtataccgattccggcacggcatcaacgcgctagggcaatgaccgtctaagtccctagattcgccatttatactcctggacggcatggagtcgattccctagacttttacatagcattgcgctaaaacctgtgaaggtaaggatggggtattcttacgaatctgggatcgtccccatcagaaattacagcttctcggacgtttgacggccctgacctaagtctcactgtaaattggtacttgctgctggtttcgaaccagctaccctcgccgtgtaaagacgatgctctcccgattgagctaagcaagtatttggtggtcaatagtggactcgaaccactgtagtctcacgtatgaagtgagtgcataaaccatctctgccaactgaccttaattggtactccgaactggactcgaaccagtgacctaacgattatcggtcgtttgctctaccaactgagctatcgaagcattattgttcttgctgacggacgcagatttcctcgtcctggtgtatttgagctattctagcatcttcctcagcttccttgtacgtgtcatgaaaagccggtgcccaaaatacgatctcttttgtgtgggtattaattagcataccttgatagcgaatcatagttaccccaacgtttaccgtttcgtggtgctcctggacgtctagcagcctctgccattcgtttcttgattttagcaatgttctctggtgtttgttctgacttgcgtaagcctgtcacgttacaccagttatcaccatcccaggaagtaattagcattactccagtacctagtactcgttctgtgaaagagattttcatcatcttctcctagaattggatgctccggcaagattcgaacttgcgatctccagcttatgagactggcgaggacggcctctcctctacggtgcaattggcaggggcaacaagaatcgaacttgtgacctaaggcttcagagacctccgctctacctactgagctataccccaattatgcgcactctgctgagtacaacgttgtgtctagggccagaacataaatgcttgcatttatgggaggcggctagaagagggatgtgacccagagggctaacctcgtcactctcagcagagattttatggtacaccatcgaggaatcgaacctcaaccatagagttcgtagctctatattctatccattaaactaatggtgcagtaatctggagggatatcttggattcgaaccaagatagactcgatccacaatcgaggtcattatccagttatgataatatcccaaatttgagcaccatcgagggctgatcagacctccacagatagaatgcacatcgcacacactatccggttagaccgcgtattggtacgttgcacttcgcgcagcatattatcccaacaggcgactcatcgaacgatgatactcaaatttggtggccctaagaaactcttcccactcacaactagttgattacttctggattttcgcccagaaaattctctagaaaggggcaaccgttactcgtcgggccattatttggcggaaagcgaaggacttgaaccttcatgcccttgcggactcatcattagcagtgatgcgtggctaccgtttcaccagctttccaagtgtttggcggagaataaaggaatcgaaccctcaccgtttccgatggcgactgatttcaagtcagcttgctcccatgagcactactctccagttagtatttgttctacttctttgcgaagttcatccgggtcggcatgatacgtaatttcccagacgtacagaactccgttagcacatgctaagtcgaagatctcgctttccggtagcaccagtcccatacacttaatatgaaactctagagcttccttactcggaaaggtatggactttacggaactcatttgtcttacgatccaactgcatgatttctatgttcatcacgaactcctgttatttggtagggatggagggggtcgaacccacacggatatttcaccactagaacctaaatctagcgcggctgccaatttcgccacatccccatttgtttggtggagtcacagagattcgaactctgctgctatcctcggtgcaagcgaggtgtccactcctagcagaccctgaccccaataatttgttaaggcaattaatccggtgcgcgtaataccctgagcaattagccatgcaaggatacccgctcttcacgaatacgatacactctacgcttaccaggcgtttcggagagtcactccgctattcttgcgaaccctcagtacaatgaccgagcaagctgcaagcgtgttttttggtgccgactctgtatcagattaattccttaacaaactatataaatattatatcaatttgttaggcatttagcaactgaatttttcagtaaatttggtactcccgacggggttcgaacccgtgttcccactgtgaaagagtggtgtcctaacctgcttagacgacaggagcattttaaatttggcaagggaaggaggagttgaacctaccgatctcggagtcaaaggccgatgccgtaaccacttggctattccctttcaatataaatattatctcaaattctaaagcatttagcaattgaatttttcaagtattttggtagtgacccggcaacgcaggtcactatgcaaactactcgccgtggtctacacgaatgagcggacaaagtttgtccttcttatagattctcatcttctggtagatgttaccgaagcgaagctcttcatcgcgagcattatactctttctgtgccctttcgaaagatttactcgcgttccattcctggatccgatcccctatcttagcgcaggcccagccgatcccggctatcgccagcagaatcgctactatcgtagatagtcctgctagacttaaccctacaagcatgtaccagggagtaattcccagctcaaaggtgaggcccaagaacgtagataagatacttcccatccccaaagagaagagtacagcaatagcagttacgccaatctgtagcaggaaataccacactgagtgccaaaataggctacacaaggtgactctgttgtcgttcagccgataggtgaaagatgcggaagagaaattaagccacttgtagaaaaaacctttacgtttaatattcagcatatttagcctattacttgagttgattgattagaaaaacttgtagcgcaataatgaatgcggcataggagtcagagcctttaccaccttcgttctcattaacttcttttagtagggcttcaaaagctgctttgtgacgctcatagtgccctctgactgtcgggccagcatcctctaacatgcctagaagcatatagtactgggtttgtaattgggcgtccattagtcctcccacacgattttaatcgagagaagacgatttacaggaatgaccagcatagtctcagaccgtttattaaggatttccaggatatccccatcacgatggagcagacgtttagggctgatatctgttactgtggactctaggacgataccattatcatccacaaaggatacgattgcgtttttagtagacattttagtctcctgttatgaaattggtggctcccggaggattcgaacctgcctaccttccgcttatgaggcgggtgctcatacccaatgagcttgagaaccagagaagggctatttctagcccttagttagttatactgctgcttcgtcttccggggtgccttccaccggaggttcttccgtaggggtatccgctaccggaggttcttccgtagtggtatcttcagccggctcgggatcctttacgaaacctgcttcttcgtcggagatcacgtacagatcctgaatatcttcagtattgatcatacgagctacgctaccgtctttatagaagacggatttggtaccctcgttgcgagccatgtttgcatcaataaccagttccgtcagaacacctttctttaaatattcgattttaaatgccatgttatcctctactttctctttgatttaaagaactattatacaaaatttctgacaaaattgcaagaaaaattttgtagaatcaatcttaatctgcgccctgcgggctttctgccgctgcccactgaatattacgtgtgggcagcgattaaagtggtactccctacaggattcgaacctgtgacccacggtttagaagaccgttgctctatcctctgagctaagagagcattaataaagtttaagcgtttttacaaccagatcgtgaacctgttcagaataccggccaacgctcttatgcagcgactctttaaactctagagtacgcctggcgattagctgtttttgttcaggtgtcagattaggtgctggacgttcatacggaggagtatgcacagatgccaccattattataccttgatagagtttttgagacgatcgcattcagcggcgaactggacgtttagggttttgattgcgtccgtacactgatctatttgtttgtctagagctttgataagccccagcttcaccatatcgtaacacggtttcatttcgaaagtgtaatctagagtctggctgccacataggtcaaacttaatatccccggcttgcaatgtgaagcgtttctgtgtaccaccactgatgatttgtttagccttagtcagctcactacgacgagagaccatagactgaatatcagagcgtatcttagttaacatacttaaatcgttcatatagacctcgtcaattagtatctttaagaactctcgtaaaagctcttaaagataccgccagtagcaggggacgaatccccctattaagcgtctcattggtacgcactactgtcagacatatcttccagttatagtcagggtgactaatataaccccacatagtctccacagcggggcacactccaaacaggggcacttctagcctgtgtaagggtgctataaatagtggttatgctttcgctcggggtgactccggtcatgactccattatcacatgcttacacagggtatacgagcttccgcggagctgtatactcaaccgtgtcccacttaggtctcggagcggccgtttgtacgaacggctatccgagtactctttcccacttagaatcaggcgagatcccacctcgccaaagttcatacgatcatcgtgccgtatttaaggattattttcgtcacttaaaggagagacgtcctccacgcggtctgttaaaatcacacctccgaattttcgatgtgaagttttgatagcttgaaaaacgactcctcgtggaggaaaaacttcactatctaggctaccgcctaaagttcttcttttgatttgggcatatatcaggtaagggtagccaaatcagcatcctagtccttcgtggtttagctgtttcgttcccgcgagtctcccaagtctttccctgggaggggaggaggtactccagcagcgagtggttcgccaatagaaccatcagttatctagctctttccgaccgcaggacttgaacctgcatcttccggcagttacgccatgataatgtccattatactaggacggcagtgttgctacataagtgatttcgacaccccactatggcggcaataaccagcaccagacgctatacacatgtctccaatttgcagcctaggcaggtcagtgtgggagctatacgagtttctcaggctcagctccccacctctccggcaggccacgcaccatgcttcattctggtcgaacaggttaaagtgagattccaccattttctataaatcaggagaagagtttacgagactccgggacagctcccgagttttacaagagatctctaacctacgcccgtccaatacgctccctggccggtacccggactggatgcacgaactttgtcaggtgatcactcttaactcaccgattctattcaacgaatcttaatgctcgacgagccttacattaaaacaagttcagcgtaatcggcccgctgttctctctaatttatgaaactattatatcaactttttaagcattaggcaactgagattttaatttatagaacacatggttgccaattttacttgttcttttgaagtccttgtcttttgtccagtaaggtttagtatctttactgtgaaagtacaaggctcccttcgtcggatctactggaagatccatatagtaaactagtctagctatctctttagcttgtttccactcttcgtctttgcgatcgagtttatgtttcttcttaccaacccagctgaactgccctggttgatagactactttacaatatgtggacgggaattttccatagttaacacgatttttcgttacttgtgcaactgcggtcattcctttaactccttcccctctagcttcaaagtacgcatttttagctatgcactctatctcatgcgcatcaatctttgcctgcgcatggaagctagtgaggatggagatcattagaatggctgctttcattatttctcctttactctttgattcaagaataatagtatatcaagaaatcagccatttagtcaaatcaaattttcaatttcgattcgatagttttaatacagtacgcttctaccagggcgtcaaacaccggatcatgtttcgacggatagaccccctcaggaatcaggttgtaacgctcaattacgtcgtgtgcgtagatttcagcacaacgtaccaacgctttccagtcccctccgagagcctcgaaatagtcacgcgggttacgggcgctagagatatcccagaatttccacggaacgattgcaggatcagacggagagaaaacattagcttgagccgccactgtttcgtaaatagacatatcgaactgcgggccattgccatagtggcgcagagaacgagtgtcgatgccctgctcgtcgataatgccttcgattacctgttttgcctctacgaacgggcagatcagatccatgaacgtgtgcttggacacaggagattcatgagtcggattgcaaaccagaacagtggactcgccgtctttagcgttcagagcttcaataatggacagcgacggagcactaccagcactagcctcattcatccagaatgcaatagttccggcggagactttagcaccgagggccaactgctgggcaacgttagggatgcctagaacgatatacggatctaacgatagatctttcatcagtacgaaagcgaaagacggcatagcgataaaggtgctcttgcaatctcccggagttcccagggattcgatatcacaaacagagatccagcggtcttgtaagttttgcatattgtttcctttgttattaaagttgcttctagatgtgttatcacatttagaagccacctccggtggtggcttagtcatatcttcggacacatcccagttttcttccatcgacggccagttagccgcccaatcttcgagttcttcgtagcacgaatccatcagttcccgggagttgaccctagagtaatctagggccgacttatgtgtcgctgcacgattgaaatcgtttttagctacaaaatttcgcattatgccttcttagctggtttgcgtttttgattacggggcttatttgccttgcccgtaaatttaatacctacgccgtagcacagagcgcgaacattctcacggctgtattcgcagccaaagatattcggcttgacgctaccgaaacggccctgggtcttgcgcaggacttctttggtgtctgccttatccggcgtactccaaccaacgatcttggagacgtagccagaggtagaacccttagttaccggctttttacgacgcggggccggtttgcctacagctgatgctgcttgagtatcagtcggatgtttacgcagatgacgctccagacgttctttgcgattcgcttcagttttgggaaaagttgcaactttggtttctactgcttttttagaggtctgcttagccataatttatttcctttgttttgattggtttcgttaatttatgaatctattatacgttactttttagcgtttagcaactgcgttttttcattttcatctacaagctcatcgaagatgatgtactcgtacctattaccgcccgatgtgcttcgcttgctcttccgagctgatgtactggtacccgcctttgttgtacgctggggcggtacagagtttctttcgctcaatttctttaagagcggctcgttctctttcagccatctcaggatccaggatttcccgtgcctgcggtcttggtggtagacgcgtagagggttccccgattttgacgcttccagaaacgcggcgcagagatcgagctggtactgtggtacgtttgggaacaaatccctcaaatctggtgccattataattcatccccacccctcagagctttccactccgcttcaaagatttgggcttccatacgtgcgattcgcagtttcattactactagatccaccccatgctccatcagcagcacttcatacttcattttactaactaagcggcgtaaattctccaacatcacatatcctccatttccagttcggtcatgcgaacatttagcaggttatctgcggcctcattaccttctacaccggagtgacccttaaccttaacgaaagttgggatctcattgtggtttagacgatacttcttgagttcgtcgataatccacttccactggtctaagttcagaggtgtctcaccgtctgccttcttccagcctttacgttcccagccccaaacccaggattcacaaccattcttaacgtaggtcgagtccagatagattgtcattggtcggccagggtttttgttagaccatagcagagcctctaggactgcttgaagctccatctcgttgttagttgtgttgcgtttgggagcagacttggtgccgatttgctcttcgctggagttgtaaactaccatagcccaagcaccaacgttgtctaccccacgggtattaccacggcaaccaccatcagtataaacatgaaacattacgcgttctcccagctaatagtgatgtagtcagtatctctctggtcgaaagcctgatttacccggacctcgtatccagattgctctagatcaaggattatttgacgacgcggggtaactgctatgccgtttagtgcataggagtctacttctgtcttaccggaagtagcggcgccatcgatagcggagataatagctcttcgagccgaagtcactgctatatcatttgcccgtttggctttagctgccattgcttttgcatcagtaaaagacatattcatttcctctctcaaatttatgaatctattatattaaaaattcacgtggtttgcaaatgaatttttaatataagtggcccgaaggccacctcaattacagtaatttagctggaggaaccagtaagttactattatagtcccgcttagctggaggattttcttttggaggcttaggggcaaactgacgcattagtgcgtccatgcccttgtactttaccatccctaggataacatctatgtgtaatcccgaggattgaaccagaaacttcagctgagactcctccctttcggagaaggttattttggggcgtctgttaaataatcccataagtcctcacgctgtaaacggatatgcaatagggtcatgagacttatatcccacgattttaaagtcgttcttagaaacccaggtgagtacgtcctctagggtttttatttccgggttgatctctaggcgaggtgccgggaaaggtttgcggtcgaattgaccatgttccatgagaaccttgtactgattctcgtagatgtgcatatttactatacgctggtttgctctgattgcccggttccctgtgatctgggccataagcgcgaggaacgtgtagcattggaccatgttaaaggcttgccccaataggaagtcattggatctctggaaggagtcgagatacagatttccattgagtagcgagaactggtgggtatgcatgcacggtcgtaagcacccttgatcaaattcgccagggttccagaaggtgagaatctctccgcggtcatcaatgcctcgtcgtaaattctcatagatcttatagagttggtcaaagtgggaaccatccggtcgaagccacgttctgccctgtactccatagactctacccatatcgtcggttccctttctgttagggttgaccagccacgcctcgttttcgttggcgttagcgttccacgtattgcagccgatagcacggaattgctctgcggaatcatatcctcgcagatatccgataagctccatgatggcctgaagagcatacgctttacgagttgtgataagtgggaatttctttccgagtacatcatattcaaagtttgaccctattacggttaaacaacgaacccccgttcgagggttctccagccagacaccttcttcgagaatgcgtttgccttcattaatatagtgaatcacagatatactccttccataacaaaacgatagcgctcattttccccagaagctacatgagttactacagcatccggaggggtggacgtaagtatcgggtgttccagatacatgatgtggtctaggcttggtactgtaccagccttaggataaatggtggagcgataaatcgcatccagacagcccatagttgctagagtttctagcaaagctttcccgccgatgcagactacctcaacttcattacagaagtcccgaattttggaacccaagtgggtaataaaccgcacattacggggagggttttttatcagaattggggatgccgaacctactacgtacaccatggatttcttctccagtgcctttttcagtcggggaggggccgttgtgtaggtattatgtcccagaataacaacctgataggtatccaggattttgtagaactgttctagctcctcggggatggagccccagggaagtttcccgtaggcatccatcgtagcagggttgaacacaccaaaggctccatcaactctcattgcgtataaagctgtaatcattacaggaactctccaaattcgtcagacagatcgtccgggttagcctgagaggttgcaccaacacgatagttggtaatctgtgcttcttgcggagctacttgctggttcttggtgttcagccaacctttcatccagccaataggatcttccataattaccgggagatcttccggccacggaatgttgattgccataaatgccaggcgtgcgttgtagtacaggtactctaccagcaaatcggcgttcaggcctggaatatcttcgccttccgggaaaatataatgcgcccagttaatttctgtctccagaatactgcgcaggatcttcggagcgttagcctgagctgctgctacaacatgaggaggaaactctccactctgtataatacgcaggacttccatcgccataacggtgtggagcgcttcgtcttttgcgataagctgtaggttcttagcgatacctgtcagaatatcgttctccgccagagcaaaggtacatgcgaacgaggcgtagaacataatggcttctagagcgtatacagcgtagtagaactccaggattttctgctgtaattgttcggtaagtggattcagatcagcatataaacgatctgagatctctttaatacgtacctgttcctccgcaatttcgtttgcaaggaaggatagctctgccttttctttatcagtgttatcaatgctctctaacgcattatacttagaaatgcagtcattaaggttctctgaagctaactgaatagttgcttctacatcctcacgttctttcagccagatatcagcaagtgctgccagctcgtcaataacagaaaccggcagtgctaaacgtgcgaatgcttcgtcgttagcctgtacagtcgcaatgaagtcgcccggattagggagaacgttgcgaataatgttggaatacgcacggctgtgaatattctcaaagtaactccactgaataagcatgccttccagctcaggacgagataccagtttcaaaatagcatcttccggagcacgggtgataatggagtcggcttgagtttgccaggctaagttcagcagggtcttgtttttaatatgctgaggcagattaggccattgtttcttatcggcttccagggagatctcagtctcaacccagaactgcgagcgttgcagtaacgctagttcctctagacgaggatagcgaacgtttacatagtcggcgatccccaggtcttggcccaggaatagtttagactcagtgtgatcccattcgcggttaaatactgttgccattgtttaatttcctctctcatttaatatacgaatattataacaaaaaatccaacctacttgcaaataaaattttgctttcggttggatcgagcttaattacagagtacaaccgccactggaacaaccctgctctgctgcagagcctccggtatctacgtcaaagtttgcgtagtagaggttcttaatcccatatttagtggagttaaggagatctttgataatctcagtacccggaataatacctccaggatatttgttaaagtcgtagtacaggttggcactaatagcctgatccgtgaacttctgcagaaccgctaaccacttgatgtgctcagtacggtcaatatcgaacgcatacttataggactgcatggtgtcccaatcgtctagacccggggctacagtgattactttgttaacgcccgaagtcttgatagttactgcacttcgaggaggctctactgcgttggtaacaccaatcagtacagagctagactcacccggcatacttgcggttagaacggagttacgcataccatgcgttttgatctcttcgcggagagactcccagtccatttctagacctacggaaaccaggtcatccacagtcttcttgtaagtatcgattaagagcgtaccatcagaagtatgagtacggtggaaccactcacatgggccgatctcttttgccagacgtacagacgctttgtgaaggaagaacgatgccttctctgcctcacggtggatccagttacgggcttcttcgccttcgaatgccaggccttcagcggccattgctcctgcggcgttcatcagtccaatacctacgttacggcggcgcaatgcagtgtatttcatagctgggaatggatagtgctgaatctcgatgatggtatcaacgaacttcaacaggatgtaggagatcttctcccattcttccagggttttgatacgacctagggcgaatccgcctaagttgcacagagatacttccccgtactctgaaacatccattttgtccagttcctcgtctgtacggtacagatctactacgtgagggattgggaacgttggctgtacaatctcaacacaaaggttggacatacgcacaggatctttgtaacggctgttacggttcacttcaccagcgtccatagtgtacaggcggccagtttccatacgtacagttttccagaactcaatcagttctgcggcaggaatcaccggggctacagggagaacttcacccttgaaaccacgtttggtaacacccgctagacgtttttcggctgcgatgtacaggcgttcaaattctgctacattaccagagtcaaatgctgcgtatacttctggagcgtacaggaagctcatcagtgtgatgttctctttacgcaggaagcgtttcaggagaatactgttgaacttcaggttgtagtccatcttatcgattttcttttcatcaggggaacggttgctcttagcttccattatctgaataatttccggatcgaaaaacgcagtgtaaacggttgcagaaccgccacgggactgctgggtgttagcttttacggagcggtcgatgtgtcgataatatggcagttttccagagtgtgggaacgcgccttttcgcaccggatcagcaattgatctactctcaagatgatagccgatccctgctcgggcagcgaccattttgaagacgacgtgctctgctgcgtcaatggagtccagggtgtcagtaccatcaacaagacagcaagaagcgaagcccctgtcagcgctccgaaggcccacgagcggcggagttgggacgttgattttctgtagcgacagcgcgttataaaggtcgattgcatcgagcatactccagtgaggttgagaaagcattgccattgccatacccatgtaggcaaactgcggagtttcatagatctcttccgtatagatattacgtctagagtatttatccatgaactgcttcagaccagcattagtgaatagttcgtcacggctgtggtcgataacttcgtttagagcttcaaactggtcgtcagagatccagccgctcatatcttcccacgctcccagctctaccatgtggtcgtggaagaaacgcagagacggcggggtgtaagaatcaaacaggttcttacggagctgggctaaacgcagctctagggcgaatcggtcgtaacgatgatcacgctcgatcattgattcagcagacttaatcagcattgtttgcagatcgtctgagtgtacatcacccttcggtaggttcttaactgcggctaccgctaccggagaccacggcacatcgcttcggataccgatgtattttgcccagtcattcagcttctgagccatgaacggttcttttgtaccgtcacgcttgataacgtattcaatacgttgggtcattggtaactccttttggaagttgtcaggatttaaaagatattctactttgttttcggccattttgcaaatgagattttacagacaaaaacaggcaacccctttcgaggctgcctgtgtgtcggtctactttaataaaagtgtaattttttcattcgactaactaactctttagtaccgaggggttggttaggaaactcgtttgctatcttgaaagcggcatggtgtcgccgctcatcctcaggatagttagcattgtatttattgactgttgccagggatactggatgcactttcgttttacgagtgcggaagttgttcagtgtaaatacgttgttcatacgcgctcctagagttagaggtcaggacgttcgtcgtgagaagtgataccttcaccgaagcctacaaagccccagttttcttcagaggtaataccctcaccataaccaatgatcagttcagtaaccatattagattcccatatcgttaaagattgcctggaatgctttggattcagcggaacgcacgttatcatgcaactctactaaggagaatggcacatgttcgtactgatcgtagatatccatgatcagttgcagaccagaatcggatttaatgtctttctgcgctacgtcgccacagattactaatttgcaatcctgacctacgcgggttagaatacacttcattgcttctacggagatattttgagcttcgtcaacaattacataagaattgttgaaggtacgaccgcgtgcatgttcgatagcaagatattggattgccttgcgttcaaccagcccctgataagaacgttcccccaaggcccatttaaagccatcggcgattggttctaaccacggtgccattttctcgttcagatctcccggcagcatccctagggatttgccaagaggttcgttaggtcgaacaagaatgaacttttcgtacacagaacccggctttgccaactcttgggcagcgagaacagatgggataaacgttttacccgtacctgcttctccaataccaaccgtcactgtaaagttacggatagtgctgatatagtgtttttgctcagcgttcttcggcttgagttcttttgcggttggttgaaaacgctcccgtgcttcaaaatcaacagggatgacgttttcgtgacgttcacgttttgcgctaccgttacggcgcgactccttacgacgtgctgcttttctcattgcgatctccttagaggtctacagagggtcaaatttcgaccatgtttatcaatttagaataccagtataccaagttttgccgtggattgcaactgaaattttctagaatgatacggaggacatatcctttcctttattcgcgcgatgcgcgggcgcacacgaataatataaaatgggggagatagacaaataaaattttccggtttttattgttttgatgatccagatcaagttactgttgattataataaaatagggttgacatagttgtgtctatttgatataatatatgcctaactggaggaatatatgaacgaactagacctgattgataatatctatagtatcctcgataacgagggtgaagaagaccttatgtttaataacgcgaataaggcaagcgagcagtttcctacacagagagacatgatagctggagaggtttctaaatatgtggtagcacaggagcttccggcatatctcttggcggcgcataatagaggagagatacacattcacgatatggactaccgagcacaggggtatactaactgctgcctggtagatttagcggggatgttcaagaacgggactaaaatcggtggggcagagattgaaactccaaagtctatctctactgcagctgcggtaactgctcaggttatcgcccaggtaagctcatgccagtatgggggtacgtctatcgatcgtattgacgaggtgtttgctccatatgtccgtaagtcttacgataagcacttagctattggccagcgttggctgcacgatagtaagaaggctgcggtatacgctaccgaaatgacggagaaagaagtatatgatgcttgccaggggctagagtatgaagttaacactttattcaactccaacggtcagcagccctttgtgacatttggattcggcctaggggaatcctgggaggcacgtatgttgcagaaagctatgctggaagttcgtatacgggggcttggtgcctcaggtcatactgctgtatttcctaaacttattttcgcagttaaggaggggctcaacaagtccccaagtgatcctaactatgatatcaaacagctggcgcttatctgcacttctaagaggatgtacccggattacgtgagctatgaaagagtaacggctgttacaggcgattttaaattccctatgggttgtcgatccttcctttcagctattgagtctggggaaaccgctgggcgcaataacttgggagttgtatctattaacctgccgctagttgctgtagagtctgagggatgcttcgataggttctggaagttgttagacgaatacattgataaggcgatggctgcccacgattgggctattgagcggttgaagcgtgtgcgtgctaaacaggcaccaattctctatatgcatggagcctttggtgtaagattgaaagccaatgatcttgtatggcccatctttgagggtagggcatcagtgtccttggggtatatcggcattaacgagctgatcgaggtaatgtttgaggataccgaccctatgtctccacctgcggttgaattttcggtacaggttctcaaccacatgaaagaccgttgcaacagaaaagctgaggaaactaatcttggattcagtctttatgctactcctagtgagtctctgtgcaataggttcaacactaaaattgccgaacagtatccggaatatgactggctaacggataagggctatctgactaatagtcaccacctggatgttcgcactaaagttgcccctaacgtgaagtttgactatgaagctaactttaccaccatcgccaatgggggtaacatatccttcgtggagcttccggagatgcgtaagtttatctctgcactagagtgggttgttgactatggattaagtaagtctcactacataggggtcaacattcctgtcgatgaatgtgaggagtgtgggtacctaggggagtccgtatccggagagcacggttttgtatgccctcagtgtgggtcggggaatatctcggttacccgtcgcgtttgtgggtacttgggtagtccaggtagcaggccgtttaaccccggtaagcagcaggaagtaatgcaacgggtcaagcacatgaatttgaaataaatcacttgctaaacacctccgtttttgatatgatagttgtaattgagaaacggaggatttatgaaaatccataaaactgatgaaaagcgtatctactttatgatggactctggagcatacggatctatttcccgagaagacgtggtaaaacttctgcgatgccgtaaccacttgtggaaagataaagtcgatcccagaacctctgagtgcttgtccgaaaaggctgagcagttgcggaaagaagaaatgagaaactatatggagttcctgtaatgcgtagattgattatcgtaagtggtgctggattgagtgctgatagcggagtgccaacgttccgtaagggtgccatcactcccctgtgggataaatacaagctaaccgaagtatgcaacattcaggcattcgataaggggtttcactatctggacgaccctatgcctccgttagaagccctttctgagggatctgatgatgagcctagtcgcaacctgtacgagctaactcatgagttctacaacatgcggcggcaggagctaggtacggtggagcctaacattgctcacttgagaattgctgagtggtataagcgcttccctggtcaagtcgttaacttcaccactaacgtggatgatctgctagagcgtgctggcattccccatgatgatgtgatccatgctcatggctaccttacggagataatgtatcgccgaggtaaggatgtgatcgtggaagatatcgggtacactgcggttgattaccgtaagtatgagtgggttaagcctgcaattacgttcttcggggaaaccgctccgtggtatatggggcagattaacctgtttgataacctgacaactcaggatctggtaatcgttgttggtgccagtaaccaagtaatcgactttaattgggaactattcccagcccatagtcgaggtactaaggtgtgggtggtaaacaatggtattaactacatagagcagagtttgtacggggaacgtggaatccctgtctggtatgatactgctgctaacgtgttcagcaacaaacatttcataggtcaagttgaggcttggttggaggagaaaatttatgtaccatcccgatgatatcctgttatggcccaacggtagttggtgctaccgcagtgatataggtgacatgggtcacttgtctgatgactatcagatcctccgtgccgactctgagcagtggcacgaattcatccaaatgggagaagaatatgctggtcaatgaaaaggttgttaatcaaggggttgggctagttccctgggctgaaattcctctggacgtaaaagagtctctgctggaccatcttcgtgtgtggtgcgataatatggaggtctacttcgactatgacaatatgcacctaggactgtgggttcctatggacgaagatcaagatgaagtcctagactggggcgatctgactgagatggggctggtgtttgcgctaggctatgtatgtcttatgcgtgagtcctatatcccggttggggttacaggtgtttcagcaggtatttgggtcggacgtaatgaagattattatgctccggaaaatattaacggttggatccaggtgctgcgtcgcttcggtttccaagttgaagggttaactaaatgagtattcctaaaatggaacgtatctcctgggcggatatccccaaggaattgattgatgtagcagagaatttgctgcgggccgcgttgagggacgaggagctttgcttcatcatccagcatgacgtgtgtgttggtttgtctaaaggtagtttggcccaggattatgagatcctctttgattgggatgacctctcggatctggggctaatggttctggtaaacaacgttgtgttccaccctgctaactttgcggcattccgagagcccggggtgggtatttctccggggttcttagtagctgaggagccttggacgtatgctccagaggttcttcgtgagggcaagcaaaatgcctcttctaactcaattaatattatgggttggaatgcctagttgggagcttagaccaggggattttcctctggtcttttctatgcttaaacccagttacctaccacgtatttaaatattttacttgcaatctcgccacgatttttatataatatattcataggttgagagaaatgatgtgagttacaaaactgacataattcctctcattcacttccgagcatacagaacagtccggctgctacatgcttggttgggtttggcttattggaaaattgattccgaacggaattatagataattgatctagaatgcgggtaagagaggttggcatcgcgaggctctcagatatttgttcgttagtcatgtggagcaaatagcaccgcggtctgaaatgaccaagaagtgaagctgtaagtagcaacgtacctctgcgcaatagcgacgaataggggtcaaccacatggagcttagcggcgattacatgctgtgtgggagttgtgcgaagcggccagttctagcaatgaggaagtgaccacccctccatctataaggaaatttgttgagtcagtggacttttaagctgttctatccttgatagttcgagatcgctttattcttcaacataggagaaaacgtaatgttttctattctagaaggacacgcgggtttttcccgcgatcccgcttccggcaactggaaggaagtgaaaacaactgattacctttttgcgaaggagttttctaacgagcatccagaaggtaagccagcctcaatgccctacaaatttaacgtagtggatacggttgaccccaaaaatcttaatgaagcgtatgagctgatggttcagctcactcaagatccacatctcgtagcagtacgaggtacatgcttagttgcagagaaggccgtgcgtcgtaaacgtactaacttcaaaatcgaccataagagcaatattattgctatggacgtcgatggaatctctgatactggaggctgcgacaggtttgacatcgtgggtatgggacgtcatgtcattaagttattaaatagcatcagcgaggacatgttcccgcttaacgcagggtttattgcccatgcgtcgtcctcggctggaattaagccagggattcgtatgcacatgctattagagagtaatattcctgttactcagggtcagttaaagtttctgtttacgtccctcaacgatagctctcggcagaagtatggttttgatattgccgacttagcttattattcatctgtacagcttcactatttcgctgacccgattttccgggatcagtttaccgatccgtttaaagcggagggtaagccacgtctggttaaagttaacggcgctaggattgaactgcccagcactatgccagattacgaagccactcgtggggaatttaaagaagaatttctgtctttgctcaatcagattaaaggcaaacgtgtagcctccgagaaagtggaacaaactattgcagagctggaagaagcagaggatggtgtttatctgcgtattattcctaaactgtaccacagggcgctagaagacggtgttgatttcgcgtggcttgagaaagaaattacttcagctctgtctgattatatcaacacgaaggataattcccgtagcctacaggattattttaataacgggcgtaagcaggcgttaaaagcgtttgtgaacaactctatgcgagatattcctgagtctaatgttaaaggcgttcctgtacacaagttgacctctgatagccccgatgggatgaactatttgaaaatcaaccgtccaccgccggaaggtcatctaacgtttatcaaggcttctctaggcactggtaaaaccaccgcagtgacaaagtggctagagcgtgatcagctgaaaggtaatttccttgcagttacgaatacacgtgccctggtttcatctaacgccaagaagtttgaggccggacagtatgataagtccgtagatatgttaaacttcaaacgcggtgctattgatcgtatgtctactactatccactcaatccacaagtttaaaaactttgttgggcagatcgatgttatctttatcgatgagtgcgacgcagttatgaatgatctgttattcgccccagttgttaaacaacgtcgcgaatgtatctcagttcttcgtgaaattctgctatctgcaaaagtcgttatcttgtctgacggggatatcagtgcggagaccattgaggcgtatggatctctcatagattttgacaagccggtctcttattataagcatcatcgtaagatgctatcggatgctcaggcgtatgagttcccggatgaatccagtatttgggttgctctccaaacgtccctagagatgggggagaaatctattctagtgtctgactgcgggccggatgagttaaacgagaaaggcctaacgttgagaagcaataccggtgcgattgttaaagagattcactcaaactctacatctgacttagatattcgtcgtatcttggattatacaacgaatgagttaattgagcagcagattgattgcctgctgtgtagtccgtcagtaacgagcggtgttgacttcaactacttcgataacgtgtttgttatcactcgtaccgctaaccaggcgccaaacatgcgcttccaggcaatcaggcgcgaccgaggagctaagaatatcttctatttcatcgataagtccaccagcggattctctgcgggttcggagcagtataacatcgatgagggttggctagaattagcccagcagctgtatgtaaaacgtcgtgagctagaatcccgtaactttatcagcacattacgatactatctgctggatcagggagcaactatcgatatcttcagtgaaagctggggtaagattgatagctcagccgcagagtatactgctgaacgagtttctgctattttgagcagtaccccggattggtgtgcaccccgtcatgcggacgcatacgaagccaagctaatgctggtcaagtacttccacctggactctatcaagagtatcacacaggaacatgcggagatgtggattagtaagaaacctcacaaacgggcggagttcttccacaaacttcaagatatattctggaaggatattaagaagtgttctaacgtgacgattagcccctttattgaagccctgaagaaacacaagaaggacttctttattaggacgggacagtctgccaaccctaaatacgcccgtatgtacctaacccaaatgggtattaataaggaaatggaaacggagcagatcgtagactggtatcgaacttactgctctatcgaggggatctctgtaccgtatgagtttatgacggacgaggagaaggcgctggccgatgaagcgcaaaacgaacttggagcacgtaatgagcaagcgtgatgcccgctgggagacaaggaagtttcccaaacgtgatacgaaagcacggaaagctaaagaaatagaattgtgtagggtaatacccattcgtttagcacaaatgcccaatatctatgattggctagaggctcagcgaaagacacgcctttctatacgcattaacatggaacttaacatggggtacaagagtctatctgaatttatgcacgttactttcgaccctacgttctatgaaaatcgcgattgcttagaagctaaatctgtattataatagtttcataaattcgagagaggataaagaacatggcaatccgcaaaaaacttcatgcgaatagcatccctgacgaaaagtttaaggaagcgattcagtggctagaagatggcaagaccaagaaaggcgcttgcgaaatcctcggagtagcatccaactccacgatggagcgtttgatcgaggaatggaaagataaccagcgtgtttctgctgaaatgcgtaaaaagaaacgtggtactaaaatcgaaggggctgagctggccaacgttatcgattcgtatctgtccggtgatagttttgaggcaatcgccgagcgtttctaccgatctgcaaacatgatccgaatggttctgtctgcacatggtgctctgctccgtgttaatggtgaagttgacccactctttccacctgcgattccagaagaatcaatgaaagaggtatttgaagtaggcgaacacgtttgggttccaggatatcagtgtatcggagaagttaaaaaagctctggacaatccggtaggcgcatatcgtgtttacctgctatccgaagcccgtcagcagtacgttaactatatgtattgggatctggcgtctgttgagcatctggtagcacttggtgttgatatcaagtctctgggcttcaagtggggcaaagaagacgtagctgaactggttaataatgctgtaaaagcagccctgaaattagagaagagaggcaaaggtgagtaaatatcaactcctgaacctatttcagatttattccgaaggtgctacagctatccgggatctgcactacgcagttcccatggacgaagcagaagataatggctggcttaccaaatacgatcgtggtttgctgaagatgtatcgtttgtcccctagtggtttggtagctgttaaccaaatcctagaaaattctgtttgctttgcagctcagtaacttgttataatattctcatagtttgaaacaaaacttaaaaactcttttaacaataaataaggaagtaataaatatgtctactccaactcaatggtctcctgaactcgaagctgaactgacttccgcctacgtcgccaaaattgaactcttcccggaagatgagcgtcctggcgtttccatggagatcgtagctgagatcgctaaagagcacggtgtttccccgaatggccttcgtatgaagctgtccaaagctggcgtatacgtcaagaaagaagctggtaagtctaccgctaaaactggtggtgatgcccctaaagctggtggccgtacttctaagtctgatgctcaggctgaactgcgcgctgcatttaacgacgctggactggaagatggcttcctggacgaatcgatcgttgacaaactgaccggtaaagctgcctctcacctggccgaagctatccgtaaaatcactaaataagagggtattgcaatgaataaagcacaagtcgtagctatctgtgaaaaacacggtgagttttgcatgcaatacaccaaactgcgtaccaagggggtgacttacctctacggtacgactgagttcgatcctaagcaagataaatatctggctgagcgaatcgtccgtgaaggcctggaacccgctgacaaagatcatatcctggtctttagccgctctagcgataaattccgctatattccgattgcgaatattaagcgcatcaccagcctcaaccaagaacttgatcgagctactccagtaggtcgttaagacgcaatcagccccttcgggggctttttgtttatctgagaacaataaaaatgaatcaaaacatttgtcaggattacgaaggacatattgatgatcagtcccacgttatctttgaagatgaagggcgacagattcgtatgactgtctcggagtttagaggcaatttatactttggtttccgattatggttactggatattgaagataactggttccctactaaatcaggcttctcgttcccttacacgttagaaatgactagcacgctgttccgagcgtttactaaaatactaagcaattcagaggttcttcatgaagtttaccgtgaatctcaaaagacccaagccagtgacgactaagttgctggctttttctttaaaatctcaattgcttagtgttttaaaccttgatataatattctcatagtttgaaggagatctttatgaaagatcatgaaattgctcagttggtcaataagctaaccgaagctgctaagacgtatgctcatactcagcaattaagagcacacatgtctagaattgttaacgaggcactaaagaatgcgaaagataacacttgatgcgtacttcagtcccccactccagggccaggaactagtcctcacgtggcatgaaaaagaaaacggtaagccagtagttcatgtattgtccggcttccagatgctaggcatgtggtacgagaagaacgtattggtatgtgaactgtatagtccaaaatctaatcgtagggtaatgtccaccttccaggcggtatgcgaaaacttttactgggaagggaagactcagatgctgttcgattactacgaggccaaataatgcaacacgttaaagaatttattaagctgtgccaagacgcatactacaaaggcatgtcgatcatctccgatgaagagtatgatgccttaatccgtcgttttccgctagaggaagaaattggccctaaaggtgatgtacctcacctgttccgtatgttctccctacagaaagtgtaccctggccgcggcgaagaagtacccttccagggcattgaaacgccgaagctcgatggctgtgctatttcacttctgtatattgatggaaagttcgtttctgcgctaacccgtggtaacggcgtcttaggtaatgatgtaactcataatgtgaagttactgaacatccctaaacagatctcccaaaagactccggtgcagattactggtgaagtacacatcaccaaagaagttgaaaatatgcgtaacttcgcctctggtgctattaacctgaaagattctggagagtttctctcccgtattgcggaaggtggcctgatgtttacggcatatagtattcagtgtgaaaccggcaaagttggcctgaccgctactttctgtggagatatgcatatccttcagggtgatggttttgttacctgtctgaatatctccagccaggtagattggttcccaacggacggcgtggtggttcgtatggacggcaacaatcagtttaacgcagcaggttggactaacaagttccctcgtggcgcgtacgcgatcaaagaagacgatgaaggcgaggttactacgctagaacgggtagaatggcaagttggggcttccggtaaggttactcctgttggatacttcaccccggtagtcatcgacgatgctgttatctcaaaagctactctgaataacgttggctatatcaccgcccttgacctagaaatcggttgccagattcgtgtaattcgtagtggtggggttatccctcgcatcgtagaacgcgtttacgagtaacacttgattcaatagatacaccgtgatgattttttaaagtagttattgacattttcatcgccagggtgtatactattatcattcagttgagggaaagaaatatttggtgagagactgagctaaattctgaaaaatttcgattgcttagtcctgattttcttgctataatatttatataaattgatgaggaagaaaatcaatgaaaattgaaattccactgaattgcccctcttgtggttcgaaactggacttagttaacgatcagttgttctgccgtaacaagtctatgtgtccagctcaaagcagtaaattaatcgagaacttctgttcaaaaatgaagttaaagggttttggcccacagactattgctaaactggaaatcacgaaagtttcagaactctttttcctgactaaagaagatttggtcagagctgtaggtgataaagtcgccacgaaacttgagctagagttggaaactaagctgagacaagatgttgactttggttcggttcttggatctcttagtatccctcttatcggtgaagttgctgctaagaaattatcccagctttacaacgatttccaatctgtgaaagcggaaggtaaagctggagaaaacttagcttcgtggaagaatacaccggcaggacaggacgtaattaatctaccatggaaattcagtggggcgcgggaaactcaagttaccccggcgactgaatccaacggagttgttctttgtattactggtaagctcaacgacttcaaaaatcgtgcggacgctaccaaatatctggaaagtcttgggtatacggtgaaaacctccgttaccaaggctgtaaactacttaatctgcgaagatgaaaccaagattggttcttcttcatacaaaaaagcacaatcgctgggcatcgaagtcttgacgattaaaattctactggagaataaataaaaatggctaaattaacctggaacgaagaaatcactgcatccctgaccgctaaagctaacgctctgaacgcgaccgttatctctcaggaagctgttgctaacatcgctgctgaactggctgctgaaactggtaaagaagttaccgcgcgttcggtcggttctaaactgcgtaaagaaggcttcgaagtgcagaaagcatccgacgtaaccaaatctccgtggactccgggtcaggaagatgaactggttgcattcctgaacgatcatccgggtcagtatacctacgctgaaatcgctgctgctgtagttggtggtgcttataccgctaaacaagtacagggtaaaatcctaagcctggaactgactgccgctgttaagccgactgaaaaggccgctgctgtacgtagctttagcccggatcaggaagccgctttcattaacgccgttgccagtggcgcgtccgttgaagcaatcgctgctcagttcgaacgtaccgttaagcagatccgtggtaaagctctgagcctgctgcgtgaaggccgtatcgaagctatgccggttcaggaagtctctaatgctaaggcacgtgaagacgttctggaaggtctgaatatcgccgatatgaccgttgctgagatcgcagaagcaactggtaaatccgagcgtggtgttaagtctatgctgagccgccgtggtatctccgctaaggatcacgatggtgttgctaagcgcgctaaacttgacgctaaatccgccaagtaattgatttgacctgaggggagaggaattttgttcctctcccctttttcgtttaagtagacgctaacgcggcgtagagagtatcttatgtataacgtccaagcagtagttttgaaaatgctcctagcctccgatcaaaagcaggtggctctagagacattctctagactgcgcaaagatcacttcaatgacgcatttaccgcgatctaccaagctgtccagaattattacaaaaagcataacggaatgccttcgttagatgctctaatgctagagtctaacagaaacgcaaggttgtctcaagcactaactgttttagcaaacactcagattccagacgttgacatatcgcatgcgattcatgtcctagagtcggaatacacacaggatctattcctgaatctgctagaaactgatgtgttgcaggatattaccatactggatcagggagaattacttgatcgagtagcggctctgcacatgaagctagaggaacgagtaacaacgactggtaaggtcttcaacgccgatactatgcgtgttttcaagagaaaagaagactccatgttaaatcttatctctctcggcatctcaaacgaatttgatgctcaacttggcggaattgccagaaaagaaacactgctactcggtggatggcgtggtacaggtaaatcaatcatctgttctaacattcaagtagcccagtattataacggggatatcgccccatatttctccatcgaaatgccagagaacgaagtctttagacgtaacctagccattatggcaggtgtttcagctaaggctatgcgtaatgactccttacaaggtattgaactcaacaaacttgcgaagactcgtgcaaaaatgttcgaaggcggtctggaagtatataacgattttgtatcacgttatacactcaacgagatgagtgacttccacgatatggagactatgctaatgcaggaaagacccctgcacactcctatgatcatcgtatatgatccggagcttagtacagcaaccattgatgttgaactgactaagttaacctccaagtatggggacaaggtaacaatcgccctgctagactatatcaaccaggtacgtttgcccgatacgaagacattagatatgtatgactggaagcagcagatggttgtctcctctacattcaagtctacgtgccaaaagcataacgttgctggtgtagctccttaccagattgaccaacagggtaacgcccgtatggcaagaggtattctcgattcctgtgatatggctgcaaacctaaatgctgctaaacagaacgaggggcatgacggtgcaatcaagtttgacttcgtaaaaactcgtaactccgagggtatgacattcatgccgaagatcaactggaactcattgcgtatggatcagacttctgatcttaaactagaggatattcgtcagatggaagcagagtttgttatcccacttgaaagcgataaaccgaaagacaaaccaaaaaggaaaaaggcttcggatgaggatactaatcccaccggagaatcctcaagagacttatgagtagaataaccgagcttttagatctcaaaaggattgaatacagagatacgggtggggatatcctcatccgctgtctcaatcctgatcatgaggatgctcatccaagtttgcgtgttgaccccgactctggggtttttcactgcctaagctgcggatttggtcgtggtataccaagcatctttcattacttcaatgaagaacagtacaggacgtcccctagactcctgaaagttcgtagaatgattagtgacctccgaaccgagggtcgcagtctagaaattccagaatcagccatgatattcgaccaagactttcgtggtatcaaagcagagactttcaaaaagtactttgcattccaacaaacagaggactgggaaggtcgtgtagtgtttcctattacggatgccgtagggagaaacttattcttcttaggccgtaatatggatagctctgcccctccgaaatatatgattagacctaagaaggtctccccaccaatcttccctgttcgatataacaccccagctttaatcctagtcgaaggtatattcgacatgttgaatctagaagacaaaggttgccctaacgtttcctgttgttttggcactcaccagttctcactagataacattgcagataaattcatgccgttccaaatcgcgggtacgactcacgtagtcatcgtattggacaatgataagtccggtaacgaggcagctaagaaactggccaaattaatccgtgataagaccagaattataccaattataggtaatttcttgcttccagagggcaaagaccctggggacctagatgctgaagaagtcgaccagctcatcagaaacgtagaaatcttgattgccgaacatgtcaagatttgatataataattgggtaagtttgagaagaaacactgacgttttacttgcttacctaataggagaaatcaatgaaaattgcagttgtagacaaatcaccgaataacgtccgctatcagaaacacttcgaactcttcgaccatgaagttgagaccttcttcatggctagtgagaaagtaaccgggcgactgctcaagaaacatatcactatcggaacaccggagaacccgttcaatccggaagattttgattacgttattctggtaggtgcagacccgttcttgaagtttgcagctaagaaaggcatttccgattattcaggcaaacgtgttgagcatgatgggtacgctaactggattgcaagtatcagtccggcccagctccactttaaaccggaaatgaagcccgtatttgaggctaccgtagagagcatccacgccattctcaatggtcgtgagaaacgctctaaagcgggtgattatcgcccgattcagtgcccggatgaggccgaagcatacgtgaagatggtgtataccatgtgtcccggtatgatcgcatacgactccgaaaccagtgcgctgtattgccgagatggctacatgctagggatttcaatctcccaccaagagtatcagggcgtgtatattgatgcagacgtcataacagaaaataccgtctattacttacagaagctgttcgatagcccggaacatggtgttgtgttccataacttgaagtttgatatgcacttctactgctatcacttaggtttatcctttgacaaggcagcggaagagaaacgccttcatgataccatgctgatgcactacgccttagatgaacgacgtggcacacacggtttgaaatctttggcgatgaagtatactgacatgggggactacgattttgaactcgaccagttcaaggaaacgtattgcaagacgcataagatcaagaaagaggatttctcgtatgatctcattccgtttgatatcatgtggccttacgcagcgaaggataccgatgcaacactacgtctgtctaacttcttcctgccaaaagtcgaagctaactctcgactgaaatctctgtattatgatgtgctgatgccgggatgcgtattcctacagcgcatggaagatcggggtgtacctatctccaaagatcgtttgaaagaagctcaggttcagttaatgactgcgctacagcttgcaaaggctaagctgtatgagtatcccgaggttcgtaagctagaggaagaccaaggctcggtatttaacgcagcctctgtagtccagcttcgtaagctcctattcgactatgttgggctaaccccaactggtatcatgacagatactggtgcagattccacaggtgcggatgcgttgaaagaactttcagaccaacatccgatagctaagactctgctagagattcgtaagatctctaagctgctctcgacgtatatcgagaaaatgctgatcagtattgacgctgacggttgcattcgtactggattccatatccatatgactacatccggtcgtctgagttcgtctggtaagctgaaccttcaacagttacctcgtgatgagtctgttattaaaggttgtattgttgcccctatcggttatcgcattatcgcatgggacttaacaactgctgagatctactatgccgctgtactgtctggtgacattaacatgcagcaagtgtttatcaacatgcagaacgacccggaaaactactcggacttccacggttcaattgcacacatggtatttgctctgccatgcaaacctactgaagttaaaaaactgtatcctgcactgcgacaggctgcaaaagcgatttcgttcggtattctttatggttctggcccggctaaagtagcagcgtcagtaaacgaagctctcctagaagagcacatgaagactggtaaaccgtacaccgaatgtaccactggtgatgcgaaagagtacatcgaaacctactttggccgattccctcagcttaagaaatggatcgataaatctcatgcccagatccagactaacggcttcatctacagccacttcggccgtaagcgtcgtctgcacaacattaactccgaagaccgtggtgtacagggtgaagaactgcgttctggtttcaacgccatcattcagtctgcatcttctgatagtctcctgctaggtgctatcgataccgataatgagattcgctctctgggtctgcaggacgaaatgaagattatcatgctggttcacgactccgtggttgccattgttcgtgaggatttagttgatcagtacaacgagatgctaatccgtaacattcaggtagaccgtggtattagtattccgggctgtcctattggtatcgactctgactccgaggctggcggttctcgtgattactcctgtggtaagatcaagaaacagcgtccttctgttgcttgcattgaggacaaggagttcgaggagaaagtacgtagtattatcggtatggaggacttcgactacgctgctattgcggctaacgatgaaaaccaccctgatcacgataagtacgccaatattaagttcttgccggaaatcagcaaagatattgtcaacgttcgcagggttcttggtgcttaactttagcttaccagtatatgctttaagggcttatgatgtactcttccaagagggggagtacattgttatccagacgagatttacaaggtatgtgctggacaatccaagccttcctgggacattctctcagcgaaggctttttctttatggtgagcgggaaaatttaccttacaagctctacccattaaagaaacagttcaagtacttatctcagataataaattctggactaaagcatttcatcgactccacaggtaagatagtaacatggaaacctacaacttattataacattatcacagaacgcgttagaggatcaactagaatcttcaacggaaagtaccagtgttatgtcaagaacgttccatatcctttcttacttagtgaacctgccaactatatttcgtacgcgttggttcgcggttcaccagttatttttgatacgcacgaagaggagccagaaactcctagacttagagttaagatatgaagatagttatatctaataaaatctattgtaaacccagcaacgaactgtgggaatacttattaaaacacacttcataccagatctttaaacctggggcgaagtatcctctaatgttccagaactcaggatcggtaggtaaagaaatcaagtggttccccgtaaccagattagatcttctagaatctttcgggcaaaaagtgacagaggtcgttgataaacgtactctagttcctgtggatattccaaagccatcgtttaccctgagaccaggggatcagctccctatatatgaagactgtaacgatacgtgcattattaatggtaaacctgggttcggtaaaacaatccttgctcttgctatcgcacataaacttgggcaaaaaacgttagttatatgtaccaacaccaccattcgagctatgtgggaaaaggaggtacgcaagttcttcgggattgagccaggagtcattgggtctggcaaatttaatatcgattctcctatcgttattagtaatatacagacagttaacaaacacggagccgctttggcaaaagaattcggcaccgttattgttgacgaagtgcaccactgtgttgccaccacgttcaccaagtttctagagcagtcctcggcacgatataaaatcgggctatccggtacgttaaaacgtaaagatgggttacagattatgtttaaggactattttggaacgaaagtgtacagtcctccggtaaataacactctgccgcctactatccataggtttgcgctgaaaacgcaggtttctggaaatatgaatgtgccgtgggcgataagagctaacgatgtatattcgcagccagaatactttcaacaggttgttgacttgtgcgagttatattcgatggcaggtcataaagtcctgtttgtgtccgatcgtatagatctgatcgagagagttacgaatgctttggaactcaggggtgtgaagacctacacgatcaccggagtaacttcgctcgatgatagggagcaggtacagattgacgtgaccaatgacggtccgtgtgtattagcggcttcccaaagcatcttctcggagggtgtatcattaaatgctttatcgtgtttagtgttaggctctttaataaataacgaatctctaatagaacagttagcaggtcgtgtccaacgtatggcagatgataagttggacccaatcctcgtggatctgaagctagggggtgtaggattcaagcaggcagcgggtagagaagcggtatatcgtctcaatgggtgggaagttcttgactttaacgagaagaatatggtaaacttagataaaattctgtttgctaagaaccccaaagtttgatataatatttatattgaattgagagacagatttacaaagaagagttaagcaaatagttaaaaatttcagttgctgagttctcaaaaatacgatataatatctgtataaattaatgggaacagcaactgaatcttcggaaagtccgaagcagaaaaataaaaaacttagttgctaaattctctcaaaatggtgtataataatcatgttgttttatgattacgaaaaaatttacatatcagcacgaggtaactcatcgctgattgtacagattatcagacgaatggttgaagatcccgaagctcatgtgatgttaacgggtagatcattcatcttgaacgaagatacaatcgtttataacaaacgaaagctgtcagaccgacagttggctgagtatctaggacttttgagttttagaaactatgccgaatatagcttctcgaaggattcttcactggatatgcaatatattccaccgtgggttcctagagcagttatcgagcaccacccactaatcgcaatcaacaagtcaaaattgacatttatcgaggaaaaataaatatggctactaaatcttggggttctactactggcggttctaacggcgacaaactggactacatgaagttcaacaacggtaagaacgttgtacgtatcgtttccggcgttctcccgcgttatgtgtactggattcagaacaaagaaggtaaaccggctccgtttgagtgcctgcgtttcgaccgtgagaaagagcgtttcatccgtggagcatccgatccggttcacgacatgggcttcaaggatccggagaagaaagatggtaaggctcagccgctgcgtcctaagaaaaactacctggccgttgttatcgaccgtactgataacaaactgaagctgatggaagttaaggcaaccatcctgactggtatccactccatcatggcccagctgaatctggaagatccgggtgaaatcgatatcactatctccaaatccggtactggcttcgatactaagtacgacgtacagcagatcgcagcgatgcagttccagatggctaaaaatcagccggattctaaagaggccgccctgcacgaagccgacgttgctctgattggcgaggctctgtacaacgaagcagacgaattcgaaggcttcgaaaaagtgcctaaactggatgttacctacccggttccgtcctatgatgagcagaagaaagcaatccaggcatggctggaaggtaagaaagatgaggagggcgatgaatctaaaggtaatgaaggttccgcgaactccggtaacatcgatcacgaagcagcttctgacctcgattaatccaaacaaggggagcttcggctcccttttattttgactatgaaaatacttttctcagcagatcatcacatcaagctaggagcgaagaacgttcctcaggaatggcagaaaaatcggtttattcttctcggcgaaaagctggacgaagtgtttggagctaccgggtgcgacctccatattattgggggtgacatcatggatgtttcagacccgtcttcagaagaagttgaactactgtttgcattcctagctaccctccaacatcctggtattatttacaccgggaaccacgaaatgaaatctaaaacgatttcttgcctggatcactatgcagcagcaattagcgacgcaacagacggactttggaaagtcgttaaagactaccgatctccagagttcgatatcatcccttacagcagccttcacaaagctagttggaagcccagagtttcagacatttgcttcacgcatgtcagaggtgcaatcccgcctcatgtcgtaccagaaatctacctcgaaaggttcgtcgaacatgggtactccaaagtatttgcaggcgatctccacagctacaagaacagccaaaagatcggggacgttgacctgctctatcccggatctccgcttacaacttcgtttcacagagaaaggacaaaaggaactaacggagtttttatcatcgatacggtcttgccaagagaccatgagcactacctttcgtgggttgaactgggagatcttccacagctcatacgaaaaactattgaagtcggcgagccaatggaagccgatgcgtatgacagagttatatacgaagtcaccggcgacgtatcccaactcaaaacgttaaagaacagcgaactgttagataaaaagatcaataaccgcgtcaccaaagatgctaagttagatcttgacgatatgtcactgctacaggagctggatacttattttacaaacgtgcagaaactagacgaagcgtctagaacccgcatattaaagagagccgctgagtatgtcgatagtaattaataaattgacaatcagccattttatgtcgtatgctgagaacgtggtgatcgagtttgataatcaccgcgtaacccagttaatcggacgtaatgggctgggtaaatcaacaattggtacagctctagaggaacttctttataataagaactcacgcggtatcaagaaggacgacctgtttaactggcatactggctctaaggcctatacgctagaaggtcagttcactaaagatggtgacgtatataacgtcaagaaagttgtgaagtcaaccgccaaagtaaccctcactaaaaatggtgaagatatcagtggccatactgcaacccaaacgtataagctgatagaagaggtactcgcctgtgattttacgacatttactaagctcgtatatcagtcagttggatccagtctcgacttcctcaagacaacggatgctcagcgcaaggctttcctcgttaacctgttcgatcaggaacaatataaggaagtttctgaacgtgttaaagcgggacgtaaagccgtctcggcaaaactgtccggattggaaggtagcctgcgaactgcccaatctatactttcctcaaaagcctcgcttggcacacctcaatcagagatcccaatccctgttttcgatgaagagccactagtcgaagaattaaccgaagcaaaagtcaaggtagcactggctcagaaacaaaaagccagtattgcaaaacgtagctctttggacatggccgtacaagctgccgaaaaaacttttgcaccattcgaaaatttacctgcgcccacctcgaaatctgaggaactcctgagtgttacgcgtaacctaacggtcgtggcaactagagcggatgatctaaagaaacgttactacgatttcaaaaatgcagcaggtaaaactcagtgttttgcgtgcggaactcacttagacacctccgccgctcaagaggctatgagacgaactaaggaggagtatgatccgctctataaagaacgtcaaaagctggaagcagaagttgaagaacttaggaaggaagatagggcgtttaaggattacatctctaagtttaacgctctggaacaggctcgcaaaaacctcaaggaatttgatgaggtcaatggaacgcaggatgaaatcgtagatgcgagtggattagctgagcgcatcaaagctattgagtctagcattcgtcaaggcagatcttcggtagaacttgcgagaacccataacgaatcagttgtacgtgaaaacgcgaagtatgaagctaaacgtgagcagattcaaaaggccgagcaggagtttgataagatccaagctgaactgtccttagttgcagaagaagtagcggatctggatatcttaatcaccgggctgaaagatctggtgggatataagctagagcacagcgtcaaggtatttgaggagatgatcaaccactatctttctatcatgaccagcggtaaatttgctctagggttcgagttggacgagacgaagctacaggttgtcatctacaatgatggtaacaggacttctatggttaactgctcaaccggtcagcagagccgcatcaatatctccacgctattagcaattcgaatgttgctttcaacgattagtaaggttaatatcaatctgctcttcctcgatgaagttgtaagttatattgacccggatggaattaataccctcgtagaacttctacaggaagaagatcagctgaattcaatcatcgtatctcacgggcatacgcatccgtacgcacataagattgaggttaaacaagatgaagctggcttatcaattttggaggcctaatggccgtagatagtcgcgagaaaggaaaacgagcggaataccaaatccgtgatatgctgcgtaagtatacctccttggactgggaacgtgttcctggttcaggggcttttggacagtcccactccctgaagggtgatgtgtatttacctccaagtgtgggtaaaatgagccaatactgttttgagatcaaacactacgcagacgagaaatttaatagcaatatcctaaacgttggagaatcccaattagaaaaatggtgggcccaagccgcacgtgaaggtgagcaaatgaacatgaaaccagccttgatctttaagaaagatcgtgggcaatggcttatcgctctggatagtagcgaccctatgattgataacctcatgagtagagcacatttcatagttaataaacgtggaatggaaattgttatcggtctttttgagccgtggttaaacgcatgtgatattggagatttagttaaatgagtaaatcctggggaacaatgaaacgagaggcagaacaacgccttgcctcacgccgtaatcttatgattgttgacggtacgaacttgggcttccgcttcaagaaagatagtggtaagcctattgcagcatcctttgcaaacaccatcaactctttggcaaactcctacgatgctaagcacactatcgttctaggagataaagggaagagtatcttccgcactaatattttcccggagtataagggcaaccgagacgcgaagtacgccgatcgctccgaagcagaagtagaggcggatcgtcaattcttcgaatacttagacgatgcgtttgatcttattgcaagccaattccctactttccgaatccgcggagtagaagcagatgacatggcggctttcattattcagctgataggtcatcactacgatcatatctggctcatctccacagacggtgactgggataccctgctggctccgaatatctcacgcttctcgttcactactcgtaaagaatatcacgagaaagatatgttcgacaaccataacgtagatactgtagatcagtttatctcattaaaagccattatgggcgatatgggggataacattcgtggtgttgaaggtatcggcgaaaaacgtggctacaacctaatccgggaacatggtagcgtgctagacattattgatgcactaccgctcccagggactcaaaaattcgtccaggctctgaataaatcaggcgaactcatggagcgtaatctaactctagtagatctcccaagtttctgtggggaagcagttgccgcagcaggacaagatatctacgatcaattcgttaaagacattatggctattgccacaggagaagtataatgcgcattaaattatctcaccccgattgtaaacctcacgttggaagttcggaagcggccggtatggatctacgggcctacttcggagatcgtgcttccgacctgttgcgtgccatacctccaggggaatcattgatgattgataccggagttgcggttgagattcccgaaggctgggtaggaatcgtggttccgagaagttctctagggaaacgtcggctaatgattgccaatacaacaggggtgattgactcggattatcgaggaaccattaagatgaatctgttgaatatgagcaatgagactcaaccaattgataacttcgagcgtctgtgtcagttggtgatcataccccattataaccccaacgatattgaaattgtcgacagcctgacagacactgatcgtggagaaggtggcttcggaagttctggtaagatgtaaatagaaaaaccccagcggattgctccgactggggttttattttatcccttcaactgagattcaagatatgcaacacgttctgtaagttctttgacagagttaatcaataaggctacaaccccatcataactaacgccgagcattccatcttctccttccctgacagcctctggaagtactttctgaatatcctgggcaatcaagccagcttctagggaagctccacctaaaggcagttccttatcgtacgtataccctgtcagctgcgctactttctcaagaggattctctatttcctttaagttagtcttcaatctagcatctgaggacttgataaagtctgtcgcagtccaggatccagtaagagtagccgctccagtagaatcgacagtcataacatctactacagcacccgctatagtcagcgaggtatccgtactcatcttagccacggtgaatttcttaccgtgggcgtagaccatcttaccgttagatcccctcttcttcatcatacccaggtctttatccttaccaaggtagatcatagcatcgtcagaaaacgtggtgatatctcctgactccactaattgtcgagtccattcagaccataccatagttccgccgctattgtagtgccatctttcataggatgctttggtatctccggctatcagcacctgacggtgtatagtgtctgtatccgtattcctacggactctatccactctaactctgaagttaccttttaccccattaggtttgttgagtactgcagcgccacctgcctcggatgggcaatcaaaccctttctcgctcccgtcttctcctgaggagaatatcaggttattgaggtcataggtgctaggaataataggataccacaaggaacctacgttggcgtacgcggcgtctgtaacagatatctttttggtactaaatatgccgtcgcttctaaactcaaaatcccctgcggagacccctgccttgtttttagctcttacttttaaagtacccaaattgtccgttgaaggcggagcatatataaccgccctttccttattgtttcctttgaaccatatatgagcgttactggcatccgtggagtcgtttgcatggaaagctgcaccaggcctaccgcaccatatatctcctgcggtttcaatttcacccactacctctagcttaccttcagaggatatactcatgagccgagtccaagtagaacccgtgccgttataccagtcaaagccccctgggccacctcctcggtggttaaagaagttagtgaatccagtcccagaccgccagttccagttcatgtatgccccctgtgagggcggagtccaatctaccattccctgagcagctacttgatagcccttagttatccccctaactgagagcataggggaatctatagtttgttctccagtggttctactagccacaccaaaaccgttctgggagtcatagatagagtatacgttaccacggataaaaccaggtgcctcggtagtaatctctggagtagggtacagaaccacactacccgtatactgtagacaggctatagcggggtttgctatatagttggtcatctgtacgtagaagtcgtactttgtttctgatatctggacgataccataacgcatcccttccgtaggatacataccgcttagcctacgtaccttcaagactaggtcaatgttgccactattaatagctgatggcatcccacgaccagatatgctaacaaagtccgtcccaccatgcgtagaaccaaattggtctacgccagagatcataaactctgccttagctgaggaggcaccagggttggtaacagtggccagcttcagccaggagcttgcgttaccagtgctaacccctgcccttactaggttagctaaggccgctacgttctgggtatcatagaatacttgtttacctttaaacaagagctctctgccgtccgttatggttaactggttatcgttacctccagcagtattacgcatgtagatatctgcaccacctgccccaaagtacgctttgttacgtactatagtagcaggaccttctagatagagattgccagggatacgggtgtgtccagtggtatctagaagtttcagaatcctacgaatactattggccggtccacgctgaactattcgtacttcctcgtccccatcatcaattacaccaatctctaggaatcccttgttggtgccatcggatccggaacctatataccatccgtcattgtcccctgtcacgccttccagatgtttggtcgttgctcctgagttatctttattaacaaactttaaagacccttggggattatccccgttagggcctaagatattcttgatcgtggtttcggcatctttggctgctaaagcagagccttcagctctggaggcagcatctaataactccgtagcagccatggagctaactgagtagcctagctgtacagtaaatttggggtacttacttacccttgagttagctccgtcaagggcggtaacctgttgtgcaataattcttgttgtaatagccattacgcggttactccatcactgacgtacacgctcccttccataactctgtaagaagtagcggtagctcctgttcctttagtcatgattacatcgtagtaaccagcgaaccgaagtctaggattatatttatctcgttctttacttgccttgctgacgattgttgccacggtagccgctgtcaatcctagcgacgcctgaccttgtgtagcattcactactgttacgacgaaatctgctaattttatcccagtggattccagagagtctttaattgaagacttaagggttacccctgtcaaattgacaggggtttccgttgctgggtaagcagagtcatcgatatccatgaactgtagcatcagtccgtatgatacgttttgatcaaggataatatcaactactctgttttccgtgctcatttattaccttatatgaatgtacccgttagccaggtctattttcattgtgtacgtaccttctgggttagaactcagtgcagcagccctattgtatatggtattaacaccaatctgtgccagaaacgcattgtttgcaataatcttatccgcagtgatagagccggaaacgatcatatcaccgtgaacagttagtgctggagctgtccatgctgagccattccattggcgagtccaggagttctgcggggaacctgacttatactgggtcagtacatcatacttaactggcggtccagcgaaggttgactggaagaacgatgctgcttgagtgtcattccacgcagtcaggtttgatatcggctgggtgtagaaccccggcccacgatcccctacggcgtcatactggttacggacatatgacgttacgaaggctcccttttcaatcttacaccttcctacaacgttatttccctcagattggttaactgagaatctaacggatatcctatctgaattagccggcgtagtgaaggtaaagctgctcaaacctgcagtagtagacgcaatagtcttcagcactcctccagtggtattgcttcccttagcgtaccagaatacgtgacaacgaacttctacagcgttatcagtctcgaaagacatcgtatatgtggtgtttggaggaaggtaggtgaacatggaggcgggtccatctgatgggagggtatacgcatcggtaactcctgtacctgcgattatcctagcccttagtaactcgtagttcttacctatagatgagccactacccgcaactccagtaattgagtctaaccaggccttaaagtagaataggttctcgttaatactatccccgtctaggcgaataggatctgaccaattacccataatagcattagtttccccgttaaactcagccttaaccatccataga

SEQ ID NO: 6 - DNA, 48893 bp, unidentified
  source 1..48893: mol_type = genomic DNA
tttttgcgcgtcgtcttccggctcgccagtggtcatatcaaaatcgagttcatggtaagtgtagcaaataagatccgggcgtcgaatatgcttgcggctatcaccctcaaaggtcatgccgtcacgatgaaggcggacgacaaatacgttaagcgcctcatgcgctgctacgtgttccacctcctcatcgaagccgccgtcgctgacgatgcagttaaacggcgaggttagcgctgaatcgcaaagcaacttgccgaactggcttttgcccagggtcggcttgacgaaattttcgctaatgtgaatcatgaattcacgaggagaacggtcgcccaaaaaatcgcatttcacttctttgtgcttgcggtcgtggtatcgggcagtaaagcgtgcaaaatcagtagatcccagcacagcacgagcaatggcaaacatcggctgtttgaagctaaggttcttgtattgccacttccgcgagatgatttccgcgatagtgtcctttccgatgccaggcgctccgttgaggataattacatttttcatttgtctactccgtgagatttcaagtgctcgtgaagattgtcgccgtagtcgcagacctggtaagtagtaatgcccaggctgcgcaagtgcgcaataacattgggggaatcatcccatgccgcaacaatgcgatcaagtccgattttgcgtaactcctcctccttgattaccgtgtctttacggttatcgctggcgcggcgcatgattagactgtcatatttcaccccgtagcggtcaagccaaatcattgtttcggtcttcacctcatcggatcggccagtcaggatgataacggtcattccggatcgataaagcgcattcgccacgtcaatagtgctttggattgggctgtctccaattgaggcgccattaaattcgctccaactttctgtaaggtggagatcttttttcggcagcaggtgcaagcggtgggttccgtcggaaagcgtgccatcgagatcgaaaatgcagatatttctattcatcggttttccttgttggcccctcgcggggccgttgtggttacatgttcgggcggtagataaagcggcctacttcgccatattctttgctgtacagaatcaccgcagcctggcggtatgaacgccatccgccgcgtgcggcgtaggcatcttttgcgcctaactggccatgcacttcgtcaattcctaacgagtgttccgttacagtctggtgatgccagtggccggaatgcgtgtaaatgtagtcgcactggccgaactccttacggaagtcggtagccatcgcagcaaggcgcgtttccggctttttcatcgtgtggccatgcgtgtagcccagcatggttttgccccacaaggtgcgatgcaggatcgccggactaacatcaacgaaaacgcgaggttcattctcatagaacgccgccagcgccgcgcgtagccaaatcatcccggcctggtcgtggttgccttcaatcacctgcacttcaacttctgcatgattgttaagcagtagcgacacggcgcgacgcagggaacgaatggcaacataaacaagttttgcgtatcggctgtcctgatcgagaacgtgaccacttgccggggttactgcgtccaggccgtcgctgtgaaggaagtcaccaccaaccagcaaaacagccttttgggattgcggagccaccgacacggaataatcaaagaagcggtttagaaccttctctgccgtgctggtatcatagttctcgccgcattcatgcttatgcgccatagccccaatatgcaggtcgaagattgggtacagggcaagctgatcttcaatgtagaacttcgactcatccagcggttgcggttcggctcgcggaaggtcttcgcagaaagcagcctgcgccgcctccataagcgcgaccatgcgatcgcggtctacttccgacttgacccaccgaacgacctcggagccgtccgcgcgaatcatcgtcgacgtgcctttgacgccgaagccgtccgggatatgcttcgcaacgtgggcgtttccgtgtaggtgtccttgtcgtgccaggcgaacgccgcgacgttcaacgcttcgaatgttcatgccgaactcttccgcgatctcgcggtaggtcttaccttcctcgcgggcggctaaaaattcttcgtctgtgattttcggtaacataatttatcctaattgaattgcgtagttcatgattgcgatcgtgaacaggatcgccgtaaataggatcgcaatatatcgcattcttcacgcccccgctacttgtaatattttttctgctgcttagactcgtggatgaacatcttcagcgcgtctgcctccgctcgcgttgccactgctattcgcgtgcgcttcaccgggcgctcgtgtagataggtgagcttcccaccaaaaataattgatatatctttgatatcgaaatactttgcgatcttcacgatatcatcacttattccagcttcttttgcgtgctgccatacggcagcgcgaccagtctcgacaatcatcattcgtcaccgtaaatgcaaaaaccttcggccatttgctcatacatggccacgctttcaaggccgtacccggcgcgaaaataaatctcaccgacaacaccatcaaggccattatctgaagggttcgccgtgtagtcggccatgcacaggcgagaaaggttaaccaggtggcgagatacaacttgcgctttcgctggtacgatcttgatggtgtctgcgatggttttggttttcatggcgttagctcctgattggttgatggggtaataatacccgcacgcggcgggtattgtttagcaattagtgctgttttgcgaaatactccgcgccttcgtgcgacctgaattccagtagctcgcgttcaaggattgctggccagtcagccattgggattccgttatccatgaactcaatgtaagttccgtcaatagtatccgcaaaggctaacttctcctcgtctgttccgatgaagccatatttattaagcaactcaacaacgattcgaagatattcagcaaaagactcgatctgttccattttaaaccccacgtttgcgcatacgctttttagctaatgacgggcaaatctcgcttaccggaatgtaaagcgtcttttgctcctctcccggcttgagcttgcgcatgatgaaaataacacttcctttattgttgttgtcgactggcttcccgcttaatccattgatgaaggcgaggcgaccggatcggcttaactggttcccgtcatcatcctcttcaacatcggcaacaatccagataatctcggcggccatcttctgcgcgtcacggaaccaggcagtagaattgtcgccgggtagcagaatgtcgatctggttgtcgtgctccatttgctcaatagccttgagaataaacgggtctggaaacgagtaaggcggattcagccaaacgtgcttgtttttacccaaccagcgtttaagacaatccgttttttcgtcgtagaacttcgggcaaactgcgttgctttggtctgcggctgcgtcaagatcataagggccatagcgctcttccatgtacgcgatcagactgcgatcggtcgcccacttatcgcgcacgatatcaggcgttttgcttccggcgtatcggttgcctgttacctggtaaaacctgtcgggcctgacagcctgatagtgtccgccagtggcaagcgcgttgcctatgaacgtttcacgttcaagctgttcaaacgtcgtgaacgcgtcgtgagtgtctttatcttgggtgtcttttgccattttaccattccttacctgtggtggttacggttccgctgatctcgttaccgttcttctcaaggccagcgaagcgcacatctacttcaccagccggaacaactacgccgtttttccatttggcaacacagattccatgcgttgaggttgcgcaccagccatcggggcggggtgatgaagtgcaaccggacaaagtgattacagctacaattgcgactaataaagttttcatgatgtttctccgtgattcgtttcgatgggagaatattacccgactcgcgtcgggtagttttaacaaaaagtgctatttgatggcatcgcagaaagcgatcttgaattgctcgaagccataggccactgcggcgaatccgccgcgacgccggacggcagcaaggaattccctttgctccttgctcactggcgacgcctgcgccttaccctggcgttttagctcgatggccgcgaacgggtatttgccgccgaacccaatcaggatcagaatgtcgctaacgcccttcagcaaccccatttgatgatcgataaccgcgctcgccttgtgcttactcccttcgttaaccgtatgccagaacagataatcagggtattcgtgacgcagccacgaaacgctattcatctgatcgattttctcaagcggacaggccttcacaggcccgccgtagtattcgagataatcacctttatcagtaatcactattcgtctccaaaatctttgcgtgaaataatatcttccttctttccgttaacgcgatgagttacgcgcttcggcgctcggaagtaatgcgcattctcaaggatttttcgcgcattcttcattccgcccagcttgccgcgcattaccgcgtcgttaacgtgctggaagactgccttttgccgccacaacttgccgcaaatctgattctctgattccgggaagaacttttcccttgctgtgaatcgctcgccgtcatggttcagtaacacgtaattgaagatgatcccggactggttgcgagtcaaccctatatcgaacccgacaacatcataccagtcattttgcgtatagtgcttcccggtgagattgtcgttgggatctttaagctgcaccccgcagcatctgcactggcgagcaacaatatcgttttcagcgtaacacccttttaccttaatcttacctgttcgcgggtctttctggtcttcgcagcgctgcgagatccagaagtattcgcaacgattaccgttgctgtctttgtggatgcatcggcgggcgtactcgctattttctcccttgcataccgggcaaattttcgggccgttcttgctgctcttgcgtctttggtattgcgcctgctcaagaatcggatcgaaatatagctggcccaaatcgtccatagtcccggcgaagtcccaaaccaaatggtcttccttcacccacgagtaaggtggctgtttttgccagtccttcaggagtcgcataccgcgccccaaaagctgaataagcaacgtaagcgacccgatcttgcgcaatatcaccgaaaaatcccaaaacggaacgttaacgccagtggtaagggccatcacctggaagatgtatttgatctcaccgcgattcgccttatccaaaatctcgccgcgtttctttgagttcgtcttctcggtgatgatcgcgtatgttgcgtccggcggtagatagctcgccgcctccttgcaatgccgctggccagcgcaagttatcagaacgccgtttcgggttttcgcacgctccacgaccttttgcatgatcagcttcgtcatttcgccggattcatggattttcttttccatcttgcgcaattcttccgcgctaaaatcctgcgtaccgtcctgactggagccgtggaattctgaaagatcataacccaacccatctgcctcggtatcgccgaaaatggtgggaacgaccgatccgaactcgacaagatagtttgtgttaatgtcggtgatctgctcacgccagaatccaggctgcgtcttgtcttcctgcaagatgggaatcaccccgcgaaactccgaaccagtataaccgacgatgcgaagttctcgccctgtcttctcaaggcacctccgcattaactcgcaaatgacgatcgtgtactgcgtgcgaccgccgccgaattctacgtcgtcgaatttttcgtcgtattggtagtcggcatcgacaagttccccgttcacgcgatacggcttatccttcggtcggctcatgtactcgaacgattcattgttggcgatcgcctccgccaaatcttgccagtcaacctggtggcattcgtcaatggccagaactgaaggcacgtagtcgcccagcattttaaacaggccattaaccaccgtcccttcagatccgacgacgatcgggaagtatgccgccttcgtgcctaacccggcgcaataaacggagttgggaacatcgaggttactgatctcctcggaatcctgcttcacgatctcagcctggcgagcgagaaccatcattggcaggttcattgctttgcactgcgccgcgagcatggcgatcatgatggttttcccggcggaaaccgaagccttaatgtaaaacggatgttcatattttgcgatccgcttcgcggtctcaatatacgcaaccgcctgataagggtaaggaacgatatttccgacggtgaaccgcttttgtattaacgggatcttatctgcgtaggcttcaatttgttgttcaattgtgagcatgggcaatcctaatttgtcattcgcatagttgcgtgtataatacatggaacattttatcaggtttaacaaaaaatgctatgagggttaaattatggaacaaatggcaaaggtggataagcgaaccttgaacggcaacaacggaacatcgcgcgggaaagacaagaagaaacgcaagcgaccgactggttactacgtgctgaaagatgaggttcgcgccgggttgactgcgcggatggagctggttattgatgccttcggtggtatagcgggaacggcaaaagagttgggggttagcatccaggttgttcagcagtggcgtaagcgcggcatgatctcagccgatggcgcttatctcgtgcataagagctaccgacggaacaattgcaaaggtttccgcgcctcattctgccgaccagatttaagatttgacagcaacggcaagccagtgacgcgcagatgcgaccgccgcgaaatgctccgcgtagtccgatagcacaatttgtctaaacactaaacgcctgccgggttatgattctcgtgtaggcgttttttatttggaggttacgacgtggatttttacgatgaaaaagaggttttgccgtacatggctggcatgtggcgcgaagcgttgcagaacatttgcggtgttcactctcgatacttcaacggaaaacaccaggactgtccgaactgcggcggcaaagaccgattccgctggactgataagttagaaacgcgcggcgacggcggcgcatactgcggcggatgcggcgctgataaggggatcggctggttgatgaagttaagcggccagccgtatagtgaatgcatcaacattcttgggcgctatctcggaaaggttccgcaagaatacgtgatcaagagaaacaagcaggtaactcgtgataacgggtatgactacggcaagatggccgaccatgaaagagtgctggcagttctaaacagaacggaggccgtcgatagcacgcctgtaacgctttatgagggcatcgaaaacgaacatatcaaatcatatcaggtaggcataaaaacccacgagaacggcaggaaggagctaattcacgcgctaccaatgcaactcgtgcatgaggatgggccggattatgagtattgcaacatgctgttcattgatgaggaggggcgcgagaagatgttagctggcgatctgaccttcggatcggtgatagtgaccaatcagagcgacgacggtaacgggccgatttaccttgctcgatcctggattgaggctatgcacttcaatattgccagttcgttcaagtgcgacgtttgggcctgcatcatcccttccaatgtcgagatcgtggcgtacaggtataaaggcaagggcggagaagataagcgagaaatgcgggtagtttgccgtcgtggagatcgggatatgctggcggctgctgacgatcgggatcttaaagttatcgttccgaacggtgacaactttaagctcggctttgagcgtaagttatacaaggcatcatctcttctctgattaaatattgaccagaatttaggtaagattgagaaaatcagtcttacctttttttatgcctgaaattcagtggcttgcaactggtctaaccactttaggtaagatttagtaagatgaatcttacgtaaatttcgcgcaaaatttaaccaattacccgccatatatagatagtaagtatatgataaataataatattattattattactctatctctctatacttatcttggtaagatttctccggggtacgtgtcttttttcgctggatttcgcgccatatttttcatggatatttacctatagggatcttaccatcttaccgatttgcattaactcaatgaaatatatagaaaaaatcacgtaagatgcatcttactaaatcttacgtaaatttcgctcattttttgaccaactgcggatagcactttttgacttgcgccgggaatcgtcatgcgtatacttaacgcaacgaaaccacaaatggagcaatatcaatggctgaagcaattttcagggcatacaccagcagtgaattgactaacgagcaatatcacgatcctaactcatggtgcgcggagtacgttagcggctcaagcctcggcgagatttacgcaacatccccggcgcactggaaattcaaggtgcgtgaggaaaccgccgcgctggcgttcggaacctgttcgcatacatgtatgcttgagacggcaaaatttaatggcgagtacctgcgggcgacttctccgggtgaggttaaagatctgattacgtcgaagtcggcactgtctgcgaagctgaaagcgtgtggcctgattgggacgtccaacaaggattacccggaacttctggagatggcataccgcgccgggattgacgtaaatgtttggtgggccattgaactgtgcgacgaaagcgccgcgatgaactccgggcgcaagctggttaaggatgttgatttcgatgccgttgttcaaatgcgcagcgtgatgctggccaacccgcgacacgccgcctgtatcgaatcgccaaccgcacagcgtgaattgtcaatcttcggtgagatcttcggcgtcaaggttaaggttcgactcgatcatgttgacgtggtttccgatccggaactcatcaaagagtgggggtttaacccggatgaggttttcgaggtagtggtgattaccgactacaaaaccacgcaatcttccaagcctgacgatttcgggcgactcgctttcaatttgggatactatctcaagatggcattgcagcgtgatctgttcgtgaagacctacaacgaaaaacgcccggtagttgtcagactgctaacgcaggagaaaaaatcaccgtttgctccgctggcgttcaccctgaccagccagcagatcgagatcggtcgcaagcagtatcaaagcgtgattcatcagtatgcggaatgcgtgaagcacgattcatggccatcatatgagtcaaacgcggcggaagttgttttgcctactccgcagtttgtgaaatacatgttcccggacgtatacggcacaaatagctaaacactggtgcgcacttgtgatatagtgcgcattaccaatcaggaaaaggaaactttatcatgcgtacatctgaaaaatttaccaccatcgcagccgcattaatcaaggcaaaatctggcttcgtggccgcaaagaaaagcgggaagaataaccatcttgggaacacctatgcgaatcttggtgatatcctcgacgctatttccccggcgctggagaagaacaaaattatggtcattcaatccatgatggatacgagcaccgaaaaggtgatgcacctcgaaactatgtttttgcatgaaagcggcgagttcatggcgtttcagtacaatatgccgatcagtaaaaccgtcgagcaagcatatggttcaacaacatcttacgcccgccgttatgcgctggccgcagcgctcggtatcaagcaggcggatgatgatgcagaaattacgaaaatgacaccgaaagacttcaaaaaacgcattgacgcgtgcgaagatctcgaatcgcttcgggagatctataagatggcgaaacaaacgttaacgcctgcggaatggaaaatgacggaagacgatatcaccaaacgccaggcagaactgaaagtcaccccggcaaacggcttcaatcctggtaagccgcaagaggttgcgaaacgggagccggaaaaggtagaatcaaagcccgaaccagaagcgcaagatatttcatctttcaactaatttaaccgggcgggaaaccgccccataggaatgacaatgcatgttgtaacaggggtaatcagaaaagcgccttatgtcaaagagggcagcaacaataacggcccgtggaaaatgtacgccgtagacctgtcggagcggatgaagatccgcaatcgtgatggcgaggacgaaacaatttacacgaactaccgcgccgttttctttgcaaaagaaaacatgattaagtggtacgacgaagcgctgcaaatggataaggtgatcagcgtaacctgtcggacgcttcagatcgtgaaccgcgagcacaacggcacaatttacagccacaatgaaatgattatgccacaactcgaattcagccagcgcgagccttcgcaaagcggctgcggcaatcagcaatccgggtggggccaaccccaacaacccaagccgcagcaagcgcctaaaccgcaaaacagcggcgggaatccggggatggatttcgatgacgatatcccgttctaatttgacaactaaaggagccgaaaggctcctttttttatcggttcattgatgctattatctgcgttactcaaccaacataagaggcttttaaaatggcactatacagagaaggcaaggcggctatggccgcagacggaactgttaccgggactggcacaaagtggcaatcatcgctttcgctgattcgccccggcgcgacgattatgtttttgtcgtcaccgattcaaatggccgtagtaaacaaggtggttagcgatacagaaattaaagccatcaccacaaaaggcgctgtcgtagcgtctactgactacgcgatcctgttaagcgactcgctgaccgttgacggactggcgcaagatgttgcggaaactctgcgctactaccagtcgcaggaaactcaaattgcggatgctgtcgacttctttaagaacttcgatttcgaagctctgcaaagtcttgccgatcaggtgagggcagattccgaagcggcggacgcgagcgctgcggcggctgctgcgtcagaaggtgcggcgaaaacttcagaaacgaacgcaaaggcttcagagaacgcagccaactccgcgaagaatgacgcccaaacagcaaagagccagacagaaaacctctataaccagactgtcgatcttgtgactggcgttcaagcgccggataagctgcctacttcgccaggcggctcgcgggcatggatgaagatcgccaatattaagagcgccggttcgtcttacgcttttgctcagtttatcgtcggcggaggttctggttatggatccgcaaacgtcccggttgatatcttttcgctttctgggcgtggccttccagcttcacctttgacaagcgataatattgacacttggtttacgcagcgctctttggttgcggcaaggccaaatgctccgcgcattaatcttggggtagtgaagaacgcagacttctcatttgatgtttatctacatgctccgagtggatggattcctaacctgtggctgaatcgcgtaaacatccaggccgtaaactcatatattacagggccgattatcgatcgcactggttattcgtggattaccacggagccagccgggattgtatataattcaccatctgattatttgatggctaacgatagcacgatcccacgcaccaacgtagctaacacgttcagtaaaccacaagcgatctccgtccctggtggtaacgctacgctaaccctgaacggtgccgtagttcgggccaataacaacaacgagatcgtttactccatcccggaagacggtaaaggcatgtacttccgcccgaatggcgatattaacagcgcgaagcaggttgtttttgatgcggcaaactttaccgttaccgggttgaatgccactttcagcaatgcggttacgatgttaagcacgctccgcgtcaatggtgcatccaaccttcgcggcggtgttgatgttaccgcgtcgcagaaattgccactgaaggagacgaccgcgacaactggagttggcgttaactttatcggcgacaacgcaactgaatgctctttcgggattgagaatactgctggcggttccgccgtgttccataactatgcgcgaggggcgtccaatagcgtaacaaaaaacaatcagcttttaggtggttatggttctcgcccgtggttaggatctgaatacacggagcacagtaacgcggcgttgcatttcttgggcgctggcgatacatctggaaccaatcacggaggctggattcgcttacttgtcacccctaaaggtaagactattagcgataggattcctgcgttcaggctgtcggataatggagatctttggctggttccggacggcgttatgcacccggatcttgggcttgtgcgtagcattgaaacgttgaacgctgctgttcctacttttaacgctccaaccaaccaagatggacgcgggttgaaacttgttggttctccagcgccagaaattaacatgatcgcgccgcgagccgggttaacatcagcaccagctattcgtgccatgtggtgcgatggcaatctttcaggaacctcaagaagcgttggtgcaactcaggctggctcatctttctatgttggtgcgtctggtcatgatggcgagaagttcggctccatgagggttgcaatttcatttagtgccgttcagggttggggtacgaacaatacaccaactgatatctctttcgagacaaccgctgttgggtcgaatgctaggagggcggtatggagaatcggcgctagcggtgcatttgctccggccaccgataactccgttgatattggtggggcgactgttagggttaagcaaatgtacgccgtcaacgggtcaatcaacacctccgacgccaggttgaagaatgacgttagggccatgagcgatcctgaaacagaagcggcaaaagccattgcgaaggagattgggttctggacgtggaaagagcaagccgacatgaacgacgtgcgcgagcactgcggtttgaccgttcagcgagcgatcgagatcatggaaagttttgggcttgagccgttcaaatatggctttatctgttatgacaagtgggatgaacacacggttgtttcagaatacgggccagcaaatgaagacggaaccgaaaacccgatctacaaaaccatcccggctggcgaccgttattcgttccgccttgaggagttgaacctttttatcgcaaaaggatttgaagcgcggttatccgcacttgaggataaattagggatgtaaaaaaaggggccgcatggccccttttcttttaatacatgttttcaatgatgggaacgctcatgccgaccaatcgatcctggacgacgctatatcttgacgtccagttagattttgtgatgccgctggcacatcttacgctgttaccgctcatcattaacccggcaaattttgccctgcaccgatcaccacttacccggcttctgaatccatacctgccaagcaaaatcattccctcgccgatatcctgataatcccacgacgggttatagaatcggttcctgaagataaacggacggcgaaccgtggagaatgtgcattggccagccgcgttgaaaaagttcaatccggttcccgcctgtggagcaactccgctggcaaaaatagccaccctcattgtaaccgtagcgtcgccctcctcgccgttcgtttcattcctggcgtagatgttgtttccgtcatattctaccgtcacgccgtcggcgctccagcgagcaaacaccatatacttattgcggtcgtatccggtatctggagttcgccattgccctgtaaacgtgatcgttccggcccaaacgcaaaacccggcccttgttgagtcggggattgcggtaaagtcggtggaatctgcaataaacaacccttgccctgtggatgagggaaggatttgacagattgttaaatcataaagtcgatcgcgcccccaattatcagaccaccacgtagaaaaagtaagttgcgatccgttctgcgagtaaccactttgcatcccgatagttggtacaaggtttgtacccctattttggattgatacaggatcgcgagggataacgacaatttgagatccaggaacgtagccatcaatattgactattttttcatcccacgtgttacttaccaggttgcaaaaagacgggcaacgcatacccgccgtaatttgcatcaccggattaccatcattaagatcgattagtaaaccgcttgccatattagaacctccctaaaacaattcgcccgccaccgtctaagttaaccgtgacaccattaccattgattaccacaccgtttccgccatcaaatccgaatttaccagacgcagcaaacagtgcgccacgaacaacaacgttattgaattcagaaccaccattcttgttaatcatccacccttgctgcccggcgatgtagttgtttgactgaatgacgttaccgatcttagcgttggtgattgagccatcctgaatcagcgcgttattcatgaacacctggtcattctgtacaacgaacggcaacgtgtaagatcccgacgctgcattacggatgatagcaaatctatcagcaatgaacagtacctgcgaaacaacactactaccacgcgttgtaagctgtagggccatcccggaattgtattcctgtccgttgtacgtcaatcctaacttcatcgtgtacatggaaccgacgccattaacgtttgcccacgagtcgagtttctgatttagcgctgcggagttctgcccgattttggcatctagtgccgcctcggatgttgccctcgcatcgctctcgtttgcaatagcctgattaacctgcgtaaaaccagcgttcatggttgtttttacgccgtcaatatcagccgcaaaatctgcccgtaactggccgatctgcgtcgctcgcgcctcgctctcgtttacaatggcttcgttaagggtcgtgatctgcgacgtgatatcttcatcaatctgcgctttaagctgcgtaatttcagccgccctcgcctcagactcattcgcaatcagcacggtagtatgcgcgatctcagccttccgcttgccgttctccttgcgcataaccctgacgtccgcatcattcgccaaagcgttttgaatgatgctgttcgcgtagtcattgagttttgccgcgctatcctgtgcgttttcctgaagctccttcatcgcgtcgctatccaggatttcatccaggatcgcatctgtgatgatgttaacgtcagtagaagacataccgcgagcgtaatcagtccattctgaaacgttgccgatccggtctacgcttcgagccttatagaagttaacgtagccagcgggcaaaattgaatgccagtattcagccgccgggtaaggaatcagtgtaagcaggcttgcgtcctgatcggttccgctttgcgactggtaaagctcaatgtatgccgtgtcttccgccccttctggcatggcccacttaacgcgaatgccgaagatctcattgtccgacgcaaaaaggttaatcgggccttttggcgctccgactttcccggtcagtttggcggttgccaatgcagaccacggagacgctacattccctccgctaatgcacctcacgcgggcctgatactcgccagcatagatgccttcaatatcaacctgcgttgtcgcagtgcgaggaacgttgttccagttacctccatctttgcgccattgcacctcgtacagttttgcatactgcacggcagaccagccgatcaccatcgtctcgacgctcattccctgaacaatgcgagaaaacgagctaatcgttaagtctttcggagcgcccattgaatccgggtctacaaccgaagttggtcggccatcggtaattaccccattgtcgatcgcgtcatacttgttcggatcatactgcgtagccgtgatggcaaaggtgaattcgtcgtcatcactacccttttcaatcctggttactacatactgttccgctgcaagctgatcgctctcgatcaggaatacactgtcaggcgcaacgtcaaaattaaatcccacgtttagcgttagggttttaccgtccgccgaaacgctggcgattgtgcggcgcacaggctttccgtcgtcggtattcaggatcagagtgtcgccagccttcgcgtcgcagcggtaggccaggaacacctgcacgccagacacttccataacgcgtcctgatagcaccaggttaaaggccgattgccagtgcggatctgcaacgtaaattacatcgccgcaagaaggaatcataccttccagaccagtagaaaacgaaacggttgtggcgcttaggttcgtttgcagaatccaacgcccacggcggttcgcctccgtccttctggtgcatccgatcgctgtaatgctggtagggttgtggccaaatcgcatggctgcgtccgggttgaacactggttcaacatcctgttcgtactggttttcttcgtcgtcgaacatgacgttgcacgacgtatacatcgtcttttcgcttgggaacgtccgaacgaaaacgccatcaacgacgttatcagccgtaaacaggtacacaggatcgcgcggcttatcgacgatgatcgataggctttcaccgttgtagaacgtcattccacggaatgcggaacaaatatcccttaccaactggaacgcctcaacctgcgactgaacaattacatccattaaatagcgcggttccatcccgccgcgattgtccggaacaagttcatcacaatattgcgccacctcatacagcgaccacttgtcaaccgggatgccaagttcgcgctggtctaaaccatagcgctgattcatgatcaggtcataaagcacccatgccgggttattgctccacgcccacttaaaaacaccgtcccaccttccggagtacgtgcgattaatcggatcgtagttgctcggaacctggataatcttccatttctttttgagtgagatagtggggatctggttctggaacagatcgctatcgaactcaacgtaaagcatggccgttaacgggtagcggaattttgcatcaataacttcagcgtaggattcaacccggaaagcgtcgacaactttcaccccgtcagcgtccggcgttactcgactaacgcggataagcacctgcgacgtaaagttttgcggcaggttaacgcgaatgctccgatcgtaaccgccagtcgtgttcttaccgtcaatcttgccagttaggtaggtctgataacttgcaccatctaccgccatctcgatcttgtactcaacaaccgatccgaccatatcgccgttatctttttgagtcagcacgcgcggccataacaggcgaaagcgaatagcagaaagatttttgttcgatacggtaagcgtataaggcgtgttgtgagtgacttcacgagcaacctggaattcagcacttgactcgctgaagccctgaatgtagtcctgcgtttgcgtgccggggcggaactctgcaatcacgccctcatagttgaatgttccatcctcgttctgaaccgggacgccgccaaaatgcaactgcttcaggctgaagtcgttaaccacctcgccatctgaaacagcaagcaacaacttgatcttatcttttgagatcaggttatctggcatttctacgggagtgcgtggcttgcttgaaccgcccttgcgggccttgatattagtcatcgtttagcctcctgttaatagtatcgcaattgtacacgacaaaaagcccggaggctacgcccccaggctaaaaagcgaatggcttaattagttgttgtcttctgcgtaagatccagaaccgaacaatgcaccgccagccaatctgtaaccatatggcaactggattggataacccgccgccgttgtattaatcggcccgccgaacgcatacgatggtttattctcaggtgattcgctcgcccgcatgttgccgcccatctgcggtgcgatcatctgcattacgccacccaaaaccattgagccaccagccataaatgcagcagatgaaaaagcgcccatagccgccagcgagccgccaccagtaaagaaggccgcaaccataatcgccgctccgataacgacctgcaacaaccctccgttctttctggctcttgggatcgggatgattctaatctcccttgccacggagaaagtagcaaagtcatccgtgctgattggttttccgtccgcgatgatgccgaagcgcatgtttgaaccaactttgctctgcatgaacggcttaaacccttcaacctggtaagacagcgcccggatacactcagcgactgaatcaaccgcaagtttgtggaagacaccgaaccgacggcccagggaaccagatagtttaatcgtctttgtatgtgatgccatgttttagctccttatgcctgcaaattaaaaccttgtgctgctcgtaccatccagaatagatatccctgcgagacagcttgccatatgcgtgatgaaggatgttgttatttccaacgtaaatccccgcgtgattccacttctccgcctgaagctgaaaaatgatcatatcgccaacttcaggctcgccagtgttttcaatgaacccgtcctcttgccagtagtcctggtaaagattctctttgtattccggcttccaccattcgaacggaacccgccgatcttttagcgtgacgccgtagcgcttgtgaaaatccatgattaggccatagcaatcataagcgcccaaagcccaggggcgaccaatcagcgggcggcgcttcggctcaatgattcgcatatcgccttccgggatggagacgataacccacgacaagccagactcatcacagaagcataaatcagtggcgctcggaacggtggttgccccgtcgccagtgtgggagtgaacgaaggcgatcggctcgccatccattgccgccatcgcatactgcgtttcatccggcattgattcgttctcaggatctggagaaacgttgtctagtcggtgatatttctgcacgcgtgatttttgcgttaccagcccggcgcattcgtgcgggtagacttccttcgcgtgctgcatgatctgcattttaattttcggagtcaacatattagccaccactcttcaaagttgctgtcgcacaaccgccgaaactcaacggttcattaccaaaacgaagcctgcaagaagacaccaggccaccgcaaacatcccgcgacggatcgtcaaccctgtttcctaacttgtcgaaatatccgttctgcccgttgtagtcgcagcctttgccagacttgtaccacccacgctgcgcccaatagcaaacggtttgcgttaggcgtgccgggatcattaatccgtccatatcaaacacggatgttaattcgaacgttgccttttgcgggtcgacctgtttggggcgctcgatgtagtaaatgaatcgcctaaaatcgccgtctttaacgctgccgtcgacgtttaacaaatccttgaccaaaacccataccgtaactttggcttgcatgaggccgttgtaggcacgaataagagcactcgcttgcgcatcgatattgctaaccgtcagcgttggcttttccactgtgccatcgctcgacattgcgatcccgcccaggccgaacgggcgcgggccgtactgctcgccgcgaaacgttatcatctttggctgaagcgtcccgccgttaaccgctgccaaaagctcctcggttgtataggcgacgttctcgttatggaatcggtagacctgcccgccgaactttgtggcgtcgatatcgatcagcgttaggatctcgcctgggaaaagtttttgtaagcagttcgcaaactcttttgaaacattggctgtcatcgtaagccctcctctaattgactacagatcataggccaaaaaaaagcacccgtaaagggcgctttttgattatccggctgaagtgaagcgttcggcgaattcagccgttacctcaaacaccccgccaccctgcggcgcaaggttaacggagtcggcagttacgacgaatacgcccattcttccatccggtgccttccacacaaaaggctttgttacgtgatcctgacagaagttataaacctcctcccaatctgaaccgccataaacgatcggaaccgtcctacgctttgtgttaattccgctcgatgccgtttggatgtagccgtttccgaaaccaatcgatcgaatgttgttggagatggcgacctttgccgcccctccttgaatttgtgtgcaccatttaaaggaatccactactacctcctcgttttctcattgacgaacttcgcaatgcgcccgttttggctcaatgcctcggtgaacatatcgttgacgatctgccttacgccctgctctaaccccttgctatcctgaccggaacccatcgtgatgttaatatcaccaatggtaaacaccatagccgcagacgccgcgacgttgccgccgttggtgattccagatcctgaacttgcgttacccccaaccaggccgccacttgcatagccgcgcattagtcggtataggttttccgggcctaacctttgcgtcgcctccttcgtgaacacgaattcaccgccgtgaacaacgccttttggctcatacttcccgccgtcgccagtgtaaccaccgccggaaaatcccttactgaacatgttggcgaagctgaacgtgccaccaccaccaaacgcggcagaaagcgagttaaacagcgccatcttgataagcatgttggtaatgtcagtgatcacgctctttgcaaagtcgctaaagctggccttaccagtcatgacaaaatcagtcagcacgctcgccattccgctaaatgcgtttttggtgatatccccgatgttgccgtatacgttgttaacttcgtcgccaatgtcagcccacgcatgagtgaacccggccttccagttcatcatttgcgcatcttgctgtgcgtagaatttatcgcttgcggcctgcatcgctttaaatccagggtcacttaaagatccgccgctgtttttccagtcagccgccatctgcgcattggcccggtatctctcctgctccttgctacccattccggcggtatcctgtagcgctttggttttctccgccatctggttttgatacttggtcgacttgtcaagcaaggcgttcagtcgctgctgctgaacaatctgatctcccacaatggccttttgctctgccatgtacaggatattctttttgttcgccagcatctgctgttcgctttgggtcagttttcgcttctggcttgcctcttccaaaacctggaatttagcaaccgtctcgaagtagtctttgcgctgctggctgatcttgtcgtcaagccctttgtgctgctgcaaaacctttagctgcgcctgtagcgatagcagttcagcctgatactgctcatcaattttaacgcccgcgtctacctgctgcttcctggcgttgcggtttttcaggatatctttttcttcctgatttacgcgttccttcgttttgctgctgtacccaccggaaagggttttatccttcgcggcgtcaatgtaccccatctctcctttagcgatccttgcttgctgctccgcgatggtttttgcaagctctgcggatttggctttcgagtccttgattaactgttcctgctgcgccagaaagtcattcccgaagtctcccatgccgggaattttctgtagttgtcggccagcgtcaacgatgaactgcgcgatcatggcgtcgccgtcggcaatcagctttctgatcgtgttgatgattgcggacaccgtgtcaacgataaggtttagcgcccctaccgtgtgatcgcctacccatttccatgagtcagctgcccattttttgatatccgtccacattgtttcgagtggcgttgcgctgtccgcgatatctttaaggcgcttatccatcgtctcagcaaacagttttgtcgccgcatctgctgctgccgtctcgcctttggttttgcgcaaagattcgatgtaggttagctgcccttccttcaggaaattaaactgctcattcagatcggcaagccccttaacagggtcttttacgatggcatcaaaataccctgtgatcgtcttctcgctttcaccagtctgcgccgaccattccgccgtagtcttcgtgatctgcttaatctggttgatggtgtacttaccagaactggcgagcgatgttgcgatttcctgaatgctgccaatcgtggccgatgagtttttgttaatctcttcggttaaggctgtgatctgcccggtggtggtcgcagcatagccaccagtcagcaccagcgcattcgccagttctcgttgcgctttccaggagtcataaccagctttagcgattgctgccagcgcgatacccaacgacgcagcaccaaccgttagcgggttgatgtagctcaacaacaccttaaacgtattgctcaagccgccgaagctatccttgatttgcccgccctgctgcaccgcaaccagccagattggcatacctgaagcgagcgacgttacaatgtcagtgatctgcatcggtaactggcgcatggccattttatattgcccggcagaaatgccagccaggcccatagcgttttgctgtttctttaacgcctgctcttgctgtttcagcgcgttaatgaacggggccgcctccgcagatacacccaattgcgccgccttcatttccagcagttcggcgcgtgttttcccaatggagtcagcctgctgtttcaggctggcgacaaaatcacgcccggcgtttgccgccttctgctttgcctccgcctctgcgattgctgcgcgaccttcttcggttagcgccgcctgctgccgccggagttggttggttgttgattcaatgatagcgcccaggcggaaaaattccttatctggaacaagccccaaagcccatgctttatcaagttcttccgtcgctttgcgcaagttggccatttttgagatcgtgggatcgatggcgcttgcgatcctgctaaagctggtttttgatttatctgtctcttgcttctggcgctgcaacgcgcggttcatttcatcggtctgtgccgtggcccgcctttcagcgtccgcaagtgactgtaggccagcgcccgtttgctggctttggtttttcagttctgcgagtgatcgtacagctttgtcaacctgcgaaacgtcaacgccaaacgtcaacccagctactttatcagccatgtttatcccccatatgaaaaaagcgcccgtaggcgcttattttgatttcttgtaaatctccttcaggtattcaccctctaggatctgcaagtcaagtaatgccgcttctcgattgtcgattttatacaattcgaacagcataggcaacgtattatagtcaagccccgtcgggccattcatcccgattcgccactgcgtttgcatggcctggaatagctgccagctttgggcggtctgttcatcaaaatatatcgtttcaagatctgcttcatagtccgatcgccttaacccgtactccgcaagctggcgatcggttagctcaggctgaagcgtgagataaacagcccgccttaaacttttgcacggtggcccgcaagcgcggccatgtaagtttgtggcagtgccatgacgaacgccgggaagtgagcgcaaagccaggaaatgttttcatcgctgaattcgtcatccagatcccaaccttcagccatgaagcggataaactcggcgttaccctttggcgctttatcttcgctctcatagaagtctttcatctcatcggtggagcggtgttttacggtcatggtgatggttgcttctttgccgtctgggcaagtgaaggttacaggcagcttgaaagaagggagattgccgccgatttgaattttgaatttagccattttgttaactcctgattggtttgtgttattcgctattatgcacaaaaaaaggcgaggcacaagccccgccatttaattacacggcaaccggaaggaagacgtgagcacctttaagcgcaatgttaagcgttaccgtctccatctcgttaaccgctgtggatggaatgtcatcgaaagatgcaattccagaccagtagcgaacctcagaagctcgcggaatatacatgtacatcgctttcgcctgcttgctggcgtctgctgaacgcaaaaccgggtagatcgcgttatcgtaatcgtgagcaaacgtgtagttaagtgtcaccgccgacttgtaagtaggttcggattgttcgcgctcgtcgctcaagcactgatagttatagaactgctgttcgttgccgtctttgcctaaatcctgaatgcaaggcaattcgacccaatcagtgatcacgctcacgttaccagtagccgcgccgccaggatacttgttagtgttggaggtatcgaactcttccagcgttgccactcctgctgtcactgatttcacgcgagccaccttgttaacaaagtctccccaggtgcaatctgttaagatcacaatatcttttaccttcagcttgccatccgccactgtgatttttgggtttttcgcgtcgttggtcattgcggtaaacggaatggccgcaccgcgagccttctcaaagaagaccttagcaccgtttggtaaatgcatgttgaatactcctgtttgaatgaaagttttacaccgccattatgccctcatatttttatgctggcaagaaattataagcactgcgaagaaccgttaggcggattgataaccgctcgcctccacgctctcgcatcttactgcgaaccgaaccgggaagaaccaacccgcctcatgcttctgcacgccgtgtacctccgcccactcgctcacatataacttactttcagaatcaacaatcttgccttcagggaaggattttgcaacgcgttgggcgataatcctcgctcggtcggttccgataccaggcttaaagacaacgtcaatctgaaccatcgccagatagactcggcatttccttgacaggtcaaccgatcttgaatccgcctcgacgtaggagactttaaggtaggtttccccgcctttcggggggataaagtcaacgttatcccccgcgaccctcaacccgttctcggcggcaaatttagccactgccgccttgcattttaacgccatatcataatgcatttttcgccctcgcgcgcttgattgcctcagtaacataaacgcccaaccggatcgcaacaacgcccataacgccattgggagcctgccttgagtggccgtattccagcgcgttcgcatagattagcatgttactgaaccagatcgaagtgatcccagccccttttgcgtatagtgcaatgttggctttgccgttctggattgtcttttcgccagtttggtcgtatgcgttaatcgcgtaaagcggggcgcggttaaaggtgatttgccagttaccacggaagcgccctgtatcaaccggagaacgcatcacaaggtcgcggtgaatatcttcacacgtaaaccttacaacgtcctccagcgcatcaccagcggccttacaccacgcatcaatcgcacctgtaaactcccggatcgtataattagccataagtcgccaccctgcgtaaaactggacggtaggcgacaacggttcccgttggttttaccggacgggcattaaccacgcggtagcgctcgccgtctacttcgatttcgtcaccctccatgattggcacatcatgagtgaagaacccgcgcttgtcgccagcgaggatggtttcgccgttaatgtcacggtcatttacatccctgatcgcgcccttgattgtcgttaccacctcgccaggaatgatatcttccccggtttccggatcgattccgccgccagcgcctttcgtgtacttgttgaatacgccgtcagcgtcactgaaaaacttgatgcccgcgcttgcgcgtgcctggatttgtttgtagttcatagcgatcacctaccaattccgcagcggcgcacgttcccggcggtaagaaggccgaagcctccgccgcgcatcttgagcatacgccggtacatttttccccacggcgtagaaagcatttcgttgtcgcttgacgccgacacgcgatcgaaggtttgggaaaactccccagtcagggtgaatgatgccactcgctgcgtgtaagattccaggctttcgccttcttgcttcattgcgccatccaaaaacattaggtgcatggtcataagtgcgatcgctgtaacaatggaatccccgaaccttgatttgcaaacgaactcctcggcaagcacaacccacgcagacagcagttcatctggaacttctttaagcggaggtgcaaggctgcgcattttatcgatcacatcttgaattgtgtaactcatggtcgatctcctgatatgaaaaaggacgccgaagcgccctttgttggtttttgttattccgcgcttttaggctgcacgatctctttcgctttcgccttcactgctgcgatgtattcgcgcgtgcgtttcgggttgtcgtagaattcgacgcggcctttgaagatttcgtggcggaagcggtcgatttcgtcttccggcacttcaaaaacctgctcatagacgtaatttttgcctttatagcgaattgcacatgcaccaacgttttgtagttgaacaacctgcgacgcctgttcggcactggtggtttctacggtttcgacggtttctacggtttcttttttactggccattgttaatgctccattggtttactttaggtttcaaattaaagcacattgtataatgcaatgcaataaaaaagcgcccgaaggcgctttttgattaaatcccggtgagaatcgcaatagtcagcgggcggtacacgatgagaccagtgcatttggaggtgcacggaactttgaaatgcaggtctttcggctgcatcggcagcatgttgaaccgctcagggatctcgatgctcatgttcattgggtctttttcgtatgccagcacgcctttggttcctgcgccgtcaatatcttcaagctccgccatcgccgtgatggtgatgttctggtggttcttggtgaaccaggtcagataagagtcgccgctagtgtcaggcatctttttcgtcagaagacgacgcttagacggaggaattacgatgttggtcgcgtgatggcggcccagcgtagtttcttcgatcatgtttagcaggtcttccagatcttcgaatgccttttcagccgctgctgcgtcatcgccccaagccgcgctggcggtcatgcggttaatgttaggatggtcgaaaacgctcacgatgccgtgaggagcggagcctttgaacaccagatcattaacgagcgtctcatgaccttcgcgggccagagttgccttgcgatcgctcaggctggaacccagcgccgcgccagttttaatttcgtcgatggaaataaaccacgcgttacccaggcggaaaactttacctgacttctctttcgccatcgcttcaacggtcggcagatcgtcggtgtaatcggcgataattttcgcagaagttacgccatcgaattcgagccactcaaatcggctggcggtcggcgagatctcggtagttaccgggaaaagctcaagtgcgctggtctgcgggtatgcctgctcatactggcgattcagtaattgagtcatctgcttaacagtccagataccgtaagcatccagttttgcggcgtcgacgcccatgccctgcattgcgaccttaattgcactctgttcgaatgcatctaatttcatagtcatctgaaaactcctgtttgtgtatttagcttaacgagatgaagaatatcactaatcgttaatccgtcaaaggtttttttctggtgcaaaaatggggccgaagccccactacttattatacaccagcgccagacgccggagcaacggcgccctgaagcacctgaactttcaccagaactgtgccatctgcgttcttggtgtattcgccagtgtgtttgtagccagttttgataaccccggcaccacccttcgctacggtgccgtttgcggtaaaggtaacgaaagaaccgaacgcgcaatcttcttcagtaacagttgcgtctgcgacagcccaaatgcggccatgagtcataacgttaactgcgctctcatcgtcatacttgccttcaggcgagtaggcttgcgagaactgcgcgatgcctacaatgatgtcgctcgctgcggttgctggtttaacgaccttgtggccattggaaactgcgccagtggaagccaccagtacgccagctttgatatcgccttcagcaacgcaagtgccatcgatattataaatcgacgtatcagcgatctgccccgctacggcaatatcacgcttgcgggaataagaagctggaatctgtgccattttgaatctcctgtttatttggtctggtagcggcccgaaggccgcaaattattagcggcggaattttgcctgcggatcgatgatttcggtgccgtcaagtttcggtaagccgcctttgtctttttgctcgccatcttcttttttgccgaagactttgtagcgattgccagccatcttatcagagttggcgataaagtcaaaagaagcgtcgatgtacgaatcttctttgtcagacagatcacgaccgtctacctctttgatgtaagcaaccttcatcgccttaacatccaggccgtcgcacttgacgccagcggcagaaaccacagcgataactttctgttttgcgtcttcgtctgctttgattttagcaacgcgggcggcaacttcatcttcaatgccatcaactttggcctgaagcgcgtcacgctctgcggtgatgctagttacctgactggttgccgatgcaacttgcgcgtctagtttggcaatgtaagcgcctacgttatcggccacttcaacatctacgccgtcaattttaatgatcattgttttagctcctttgtggtttgagtcgtcatcataggggaattcttgttcgctatcaagatttaatttcgcaatcccggcacgaccacggaaaacaagcgcgacgtgattcacgcgaatcttcgtttgcaccgcatcaaagcgaacccaatcagagacggaatcatttttcatatcttcgaagttttccggtaggtcttcgtcgaaataatattcgccagttgcgttattgccccaacctttgcgatcgatatcgaccgaagtgtagcccacggataactcagccgctacgcgctttttggcttgctcgatcgactcaccatcgtaaatcatcaccggaacaagaacgccgatcccctcttcttttccagcgccggaacacgagccaacgacaaggccttttgcgttctgtgcgttcaccatcttatgacccaaagtgatcggcttgccctggtatgaagccagcgattcagcatcaaacacctctgaacgcggtcggaactcgacgcgcggcccggttggcgtctggtacgtctgcgcaccgatacgcgccacgatcggagtatcaaccagaaagccgttctcatcgaatcgggccttcatctttaccgtgtcgaacctttgaactcttttcatcatgatacctctacattgttaaaatctggaaccgcccaacaacggcaaccgtactcttcaccggggaaaatgccgtcaccattaacggggcgtcgcttaccttctagcttgatatggctctcgcgctcgcggtcgtccatcatcccgaaccaaaagtaatgcgatactttagcatcttttaggcgctgcatcatcaacatactgttaaaagttccgatgattccgcttgcccggttgcgcgaccagctaccataaatagcgtatcgaccttcgatgatttcatcgatctgcttgcgagacttgccgatgttgttggcggttctaactttcgtcgtccagtcagcaacgatatcgcttgctaacttcctgatcgacgcttcggcggcatcttcccacttcctcagcgcttcctgataccagtcttcatacccgccagcgccgaattctttcaggcgcataactgattcgttgttccgcccgccagccgcgatcgcaattgcaagccactgtttcgaattgaatctatagatggtcaacccaatggaggcaagagccgcaattacgaccgaaaagaacgtaatggctgattcgctgatatcgtcttccgcctggctgatttcctccgccgtggcatcgaacttcaggcggtctaagcgatcgcgcatttctaccacgagatcggttgttgcgtcctgcatggagcgggataaatcccgctcgcttgcttcaggataacgccagtttgggattctgccgttaactttcatcatccgcctccgtgttgtttaagatctctgcgctttgcgtgctgcctgaaccagcggcgcgatccggaagttttttctgcttcggagcgttgccttttagcttcagttcaggaatcaacgccgacagagtatcacgcgcttcgttggcgtcaataacctggtcggtaacgaggccgcgagccgcgttggcgttcttctggaagatatccgctttctccgcatcggtaggcagcgacaacggttcgaactcgacgctgtattcctcctccgttacgatgaactgtaacaggaattctaacagcggcttgtaatcgtcattgcgcttgcggtcaaccagtttgtagaacgtctgtagcgccgtgttctggcttgcacttacgccaccagtgtttttgttttttagcacgatctcgtgaatgcctgacagggcgacaatccgatccattttcgcggaaaggaattccgggatgcctgaaatatcggagttgataacggtgtactcttcgtcgtccgcatcaatgccgatcgtgtttccgacgccggaattagcatcaacctgcgccatgcgcaaccgggcggcgtactcgccttctttgtcgtcgcagattagcgccaggcctttcgccttccatacgccctgctgcttgcgcttcagtagctgcgttgccagatattccgaataatcgtagtcaagaatcgcttcaatgatcgacttattcagcaccgaaccaccagcgccattatttagctggcgcaccttgttggttactcgctcgccgtcgatgtagtgcatacgggtataatgcaccttgaacggttgcccgccgtttagcggcttcacctcgtacattttaggctttccgaatcgtgggcttcgtgggctggtttcctcctctgcgacggaaacggaatcatggtcgtaaacaacgatcgattcgagcggcttaccccgcttcgctgccgaagtcaacgcgcgaccatcgttaaccatcgccaggacgtaggagccaccatacagccgcgcccagcaaagagcatcggtgatttgcggctccagatttaacccgtcccattccgattgaaacttggtgttatctgaaatgccgtttagctggaagccgggagcgaccatctcttccgggatcacgtcaacgattttcttcgccatgccgttttcatgatagaactcttcaacctgcgacattgttccaaatcttgccgcgatagacgcgagtgttgacgcataaccagcgccaccgttgaagatctggttgtagtcatccattttaatgttgttcatatttcaaccttgtttaagtgtgggccgtcaggcccacattatgtattagcgacccagctttttcaatcccgcaaggcgtttcattcgctctaccggatcgtcgctcaggttcatttccaggtttgcggcgtcaaatacgttgtcgcaaatatcatcgtgtggatgagaatcgtcatatgtaaacgcgctcatctccgcctcaagctctgcaacgaatgggtgattgtccggcagcacgacacgcccacccttgatgattggttgtgcatccatagcgcgagtgactttatctttatcgcgctgcaccgggacgatctcgcccatgccgtttaccgccttcgttaaatcctggattagacccgtaccgctcgccttgtcttcgatgtagatccggcgaaggtttccgcactccttgttccgacgccagcactgcttgatgaatgcttcggcctgaacgcggagatctggcgcttcccattttccgcgaattccgtcaatgaagtagacgcgatcccgatacttgccccaatagcacattacagagtagtcgtttagctccttgaccttctgcgcggtgtccgccgtgatgaacgtatattcgaacttgtccgggcgaggctcgtgcgccttgtcggaatcgccgtaatagcgccaccactccgacttgaacacgttaccacccagggcgattggctcctgctgatactgcgaaaggaacgtataaagatcggcttcgcgtagcgcaaccaggttctcgattgattcgttctcctcccaaaatgaccagtattccacgccgtcaatgaccaccgacgggccggaaagcacgtcgcgttcgaactcaggtcgcaaccagtcagggagtgattcgccatattcccgcgttaccatcgccggaataacaatgcgatcgaagtcgatggccatccctccgctcatcatgaaccaggtggcatcctgcgcgtgcaatcgctgctgcacggaaaggattggcgtttcgtcgcccttcttcttcttcgctcgacgggatcgaatggtgttcttcagtagtacgtggtttttctcacgcttcaccttcgagaacatatcatccggcttgtcgatatcatccagcgcgataaggccgctaaaccccggcgtcatgtacccgccacgcttaccgacgatctggcctccggacgaacgggagaccatttccagccttacgcggtcgttatcgtccatgacctgaaattcatcgatctgcttgcgcccgaactttgatggccatagctcctgccactcgcttgatgagaagatcttaatcacgcgatccgagttgccttttgaaagcgcatcaccctgcgagatctgaaggttgcgaaccttccggcacttgagatacgcatacggcgcgaggtggattgaaaacacctccgtcttcgtggagcctggcgcaacgttaacgatcgtgctcttgcgcttcccggcgataatttcatcaaccgtgtggcaaaagtatgagtgatgccagttccacattagcttttctccctggatgatctggaaccaaatcttcaggaatagcgaaaagttgcgcgtactcagcgccttaattgccagcttatcggctggcgacaggtcttcccaaatgatcatttcgttcatatctgacccttatagcttatcaagaatattggtcactgcctgctctaaccgctcttcggtgatctcgttcttatccccggcgatagcgtcgatgttcagcactggcggcttatcgatccccatctctttaccgacgaaagaagcgttaatcatgccgacggcagcaagctgaaatttctgctcataaatcacggagtcgatgaactccataacgggagcatagttggggtcgtgacggtatcgcccaagcgttgactggttcacgccgcaaaacaggcttaaccctgtgatcgtaaaaatgcgaggcttgttcactccccactcgttaacgtcgccctgaaacgttgccgtttccgcagccttgattgcgttctcttcggcccactggaagtaacgctttgcgatatcaaaaaattgttccggcgtcatctctgctgtgcgccctagcaccacgccgaactccttttcatatagcgctttgaagttcccctcaaagtgcgatttcgttacgcgttttctacgttcttcagacattttgcaccctccttctatgttgatttgcgagtatatcagattgcgggcataaaaaaacccgccgaagcgggttcttgtgttatatcagtttgtttcgccgattcagcgtcttctggagtttcacgaaaggctcgcagtcaacatacggaagcggcgaaaaggctattcgttttgcgacaccttccgggtcgccaactttttcccaacgtgctgttttcttattgtagaacatggcagcaaaagtgccttcatgtacccgctttgaaaggcgctcgacaagatgagccgcgccaacgtgatagcctatgaacagcattaacagtgcaataaacagagttaacattgatttacttcccttatgtagttgatgttgattttatgcgtatccagattgacgccggattgcttttttgctttctccaccgcgtcggcggcgtcgttcgcctcaatcgtcatgctgaactcttgaatgcaggacttgcaaaatccgcccatttttcttgccgtgagtatgattttgtactgcatcataacccctttgtaaatgcccctaagaggggctagacttgcggatgtttaccgcctcttgtgtctacgtggttcacgttacccggtcagcgcgattgcgtcaatatgtcgctgaatcgtttggctgttttttattcatactcgccatccctgcgaccgaatcggccctcaaggtagccagctatccagataaactggccgcgagtaaccagcgtgttgatttgcgcccaatgtttatcgatcatcttcgcggcgacctgatcgtaggtcttcttgtccttcttgatggcgtcttttgtttctgcggccatctgctttgctatgcgcttcacggcgttgtactgcgcttcattcagtccgaacatttggccttctcccactccacccaggttccgcgagcaatgaacacttcaacacgcagcggactattgaaatttttgtagatgaagatgaacccttttctgctgtccgtctccacctgcgtaaccgggaacgccagcggcttgatggcgtcgaccgactcactcatacagatacccgtaatcgttgcgccaatcggcatatcttcgacttttgagtattcaggcatacaatcgcactccttaaatttgcgcccgccagaattgcttacaggcgctttaaactgtattcgatttcgttaattttttacgtggtggcaaggttcgccatctttgacctcgccccacgcccggcgcttgttcagttccagcttttccgccaccgcttcagccaactgctcatcgctgaatccggcgcggcgcgttgcgtcccataccaacatgaggatatcggcgaactcgctaatgtcatccggcgcttcggcggcctcgatagcctctttcgccaggtgcttgagcggcccgactggcccaacgttgccgaactggcgatccgaccactccgcgtgctgcgaccgaatattggtgaacgggtcggccttcacttccggctccgcccgcaggcattgaaagtcgctccacgtcttcgggttgtgctgcatctcacgcaggctcgctaaagcgccgttgatatccatgccttccggccagttcaccttgaacgcttccggcttgcggagatactctacaagttcaccaccaagaacggtttgctgcctaatcgcccgctcttttgtgtcgcagatgaggcggcgcgatttgcgcccctcgttggttccaatggtgtatgtcagtacccaaatcttgttgctcattcttccacgacctcgcattcgtctgcgctcacgctgatattgtcaccagcctggataaactcgctattgcgcggagcgattacacagtaggagccgtcgttgaagtggccgtcgacctcaagaacttcgccgattttgaggccgcattcttccagggtaattgagccgtcgccgttaagagtgtctactttggtgattttgattttcattgctgtaactccgtttcgtttcgatggggtaactataccagcttacccatgatcggttttagcaattcgtgctatttggcaggtaatccatttgggcacccaaaacgccatctcaccacttaaaattgcgggagataatcacgctgccaactgcggaaagagtaatccagggccagcaaagcacagggtaaagatcttctttgtcggtagaatccgccgatttcaggaaggcccgcatgaggaaacagccgcacgcatacagggccagaataagaaccaccagggcaataattgcgtaaatcatgatgttttcccttgtctttgattgagttgccatgcagcaaccccgattcgtgtttgtggttcgtgctattgctggagttttgcgaaagcgtcggccatcatgcgcaaagctcgcgcgtgatcttcaacgtcatagccaggttcggtgcgcatgatttcccgaaccttctcgatcgtggcgatagccgcctgaagttcaccagtcaggaacacaacctgcttttcaagctccgcgattcgtgagaacggctcacgcatgaatgattcgcacgaagcatcactaagcgcccaatcgatcccggcgcgaatgacggctgctaacagcgggtcggcgtcttctttggcgaagttgtctgacgggatcaggtgaattatttgtgtagtgttcattgtgtagctccttcgcttgttggtgtggggatagtatgcaccaccccagaacgttcgttttagcaattagtgctatcaaagggcgtctaattccgcctcaatgaattcgtaccactcgtggccgttaacgggatcgtgttccgtgccatgcagccagtccgtatgggtggaacagaattcgccggatttgttgaaatagaagtcggcccatgaccgcgcccaatcgccgacgcctgcgaacgtgccgaacttgcggatgtatgcgtcggtgtatccgcgctgcttcgctatgcgcttcagtgcgcgaaccagcaacttgcgctgcgacgccttcgacactttccgcaggtggaaaagcgcattttccggctcgccaccaacacggatggtcaagtcttcgtcggtgtccagcgggttgacgatgaattcgttcaggtatccgccctggattacgtgcactgtgcctagcggttcgtgcacctcgacggcatcgaatacgcagccgataaggtggcgctcacgctcgcgggccgcattgacaaccataagtttgacggttttcattatcggatctccttcacctggtgggattcgagaaggttggttacttcacggatgccgcagtcctcgaattcctcttcggcccctgccgccacccttaatctggtaaacccggcgtcatcgtcgattgcgacttcaataacctgctcgctcgaaagctcgatgtatgcacagccgtaggaattcagttcttccagcagtgcgattaaattatcgttcattgcgttgctcctgattggattgttcacttcagtaacgccactttatcaaatgacgttacggcagttttaacaaaaagtgctattctttttcgccgctgaacgctgcccgatacccacggcggaacccgttaatctcagacaggcggcatacgccaataatcatgcacagcattccgatcgtctgccagcccacgttgtcatgcatggccagaccagccaggaagaaggcccaatacagcgcgagtttctttttgcttactttcatactttcacctcaaacaaaacgttgttttcgtatggcctattggcgtacatggcgatcttttcgtccggcatacggcaggcgggccagaattcctcatcctcggtggttccctggtcgtcctgcaaaatccacacttcatcaaggccggggccgaacctggcgtcatactcgcggccaggtgtgaaataggtggatagcggcgaatagccagcgtgcgtgcaaattacttttaccgtttccattagtagatcccgttagtccaaacgtaaccgtgttcgattatctcgcgcagcataacccttttcggcgatgggccaaccccgtctccgccggtgtagaaccacgtcccatgagaaaaatgaacctgctgtgcgaacagtctgccgcgcacctggatgtaaagtcggttgcgcattgccaggcctttaagcgtattgacctgctcgacggggtcgccttttaccttagagatcttgcacatcactggcttttcgccaaattgcccggttaagcagtggcgatcgaagtctgataaacgtatcatccggccacctcaaagctgatttgcgaaaacatgccagacgtgatcttctggcgtgcgtttcattagtttgtgcgccttgcgtgccatgcgcttatagtcgcgggcggtaagtttcgtggggtcggcaacgaacgattctacaatcaatccctcgtaatggtattccggcagccattccagataggttcgccattcgttgaaagtggttagctggataacggaatgcaagtcactgtgaaggtgctccccgcgctcgccgtaatggaaagctccgcgtatttttccatcattgcctacgtgcaaaaggtgaatgcggcttttcttgccttcgaagttggttccgacgatggcgacaactgcgtttttgacgatctgtttcattgtgaatctccgttgtttggtgtatggccattatgcccgatctcctgaccgggcgtttagcaaaaagtgctattcagaaaccgaacgcctcatgctccagactatccagcgacgggaagctgaattttgctacatggcgcgactcgcccacatagccaaaaatgctgatactgtctgactcgatttcaatgctgataatcttcatgttcttgctgaaggcgtacattgcaagcgcacggtgcgcccgcgccaggaattcgagttggttcatttaaagatcgcccctttgattttattccaaaaaccgaaaggattgcgcttcttctccaattccacgatatcgtgatcgaagaatccgcgatgcttgccgcaaagtagcggctgcacgcaatccgtcataagatcgccaatgaagaaccacttgccgccatccatgaagtaaaggccgtggcatacgccgggcgcggcatgagttgcggtatctggcaggctgtataccctgcctcgagatttgaattgctgcattatcctgtctccttgcataatttggtcgttaatcgacttcgtgataattatgcccgatcctctaaccgggcgtttagctattcgtgctatttcaggccgcgaaggtcaatcttcgattttgcccaatcagggaagcgatccatttcgccaacctgaaccattttgtttccgcccggccccttgtccacccatgaatcaggcgagtagctcagtaggcgaacattttcaacggtcgactcgtaggcccaaattgagccgtcggcatcaatggcaaccgtgttggcccaaactggcacgtcaagcgaccgcatatcgaacgtgccagggatgttaatctggaaggctaaaacgtggcgctgcgtgatggtggccactacttgctcgccggatttgacttcgtgaatcattgcgttctccttacaggaacattccggccaggcgcaggcggttgatgatatcgtcacgcttgacgcggaggccgtcatagtagtcttcgagttggggttcccatgacggcagttcaagcattgctttcatctcatcgcaggctactttaagcgcattgaagttctgctcgacggcgcgacggtgggctgctgcgttcagttcgttgttgtggttgccaatcatgttttttgctcctctgtttcgatggggtaataataccgcattgccccgttcgagttttagcaaaaagtgctattcgtgccttttgaactcgtgaatctggttcccgccggaatggtcggcaatatctacgcgatcgcaggtcacgtaaaagccgcgaatgacggtgaagcgccacttgcctaaccagtggaagtatacgccgtgctcgctgccatggacggctttggttgatgagtgtgggatcggcatcccggcgaaggtgcgaagtttggttgttgctgaaaatcgtggcatggccattcctcctggcgtttgccgtgttggtggtgggaatatagcgccaccgaagcggcgctattgcgattatttgccctggcgtgcaaggtagcgctctttgagtttctgccagtgccagcgcatgacgtgttcgttatggtagttgctggttgaatatggattcttcttgctcatcttcacctcaaggttgcttacttgatacgaacttcaacttcaatgtcggactgcggcgcgaagagttgggcctttccattaacgcgaatagtgagaatgttcgccttgcgatctgctgcgagaaccaggcgaaacttgccagcaaacttgaccatcatacccggcttaacttcactcatcttgataaccttatccatcttcatcacctcagttcgttgtcgatgggtaaataataccggatctcgccatcggcgttttagcaaaaagtgctattgcggatagtcgaggctgatgatgttatccgactcatcggccatcatcgccaggacgttcgacgcgccgatgaattccggcttagtcaccgcctggcccgtctcggtgatgtgctgaatgtaggattcagattccggaagaaatgacattaacagcaagtcggctgtcacgcattccagggcggttggattttcttcgtccgatgccctggcaatggctgcgataacctcctgctcgctgattggcgtgtctcccaggcgcatcggtgccgccgggtcgttttggtctggatatagtttcatgattgtgctcctgtgattttggcgattagtgccagcttatagccttttagcatgatgcctcctggcattacttcgtcaatgatggcaaggattctttcccgctcagagatagcgccctgccgcctgtatgcctcagcctccaggtttgagccagtcattgcgtcgaactcggtaaagacggagattaaccccgctcccaggctcactcgcaacacttcgccaggctccaggagtttcagcaacggcctgcggaaatggttgtcgaccggattaacgccgaacttctccacgaactcctccgccgtcatctggatacgccgcccgccatccaggaacatgcgccggatctccttcgagcggttgccagtgaatgtgccttccgtcttcgctgcttcctggctccgtccggctggcctggtggcgtcaccaaacgtgatggattgcagccattcatggtaagcggcttgcttttctgcgtcgtaccgcatccactcggacacgtcgacttcttcgaactcatagcctttgtattgcatttgtgtttcccccacatttacggcgtttggtaatgtttcggaaggtgataatacaggccgcaggccttgccgtcaaagggtttcggcgtgtttggtaagatttgctgtcatcccctatatatccctatatacattttttcgcggcggaacatctaaaaattatggcttgcgcaaggagaatccataacctccccggagaaatcttaccaaacatatataaagataaagagtaataataataatattattatttatcatatacttactatctatatatgggcttatattggtcactttttgcgcaatttttaggtaagattattcctcccccacactcccacacggcgtaaatgttggcgaaacacaactccagctctgccagcttcgatcggcaaattgcgtgcatggtgcatacatttatgcaattcgttgcaaatcctgaaacactcccaaaaccgttgcacaggatgaaacaatcaaaagcaatcattattcgtcaaaactaatcaccagtgaatcaggtgcaatcactcactattccactattccgaatcggttgaataatcagcaatcgcaggaatagcattttttgtcaaaagccacccgatcgactttgccatgatgacttcaacgaaacgaattgagccaaaggggctaaagctatgaaacttcaacgcgaatcaatcaacctgggcagcgagtataacggcaagtggaacttcgttatcatggatagcgacgccgacaagatctaggcggttgaggaggcgttatgcgaaatggccactggcttctctgtcggcggagaagagaaaacctggggcgactactgcgaccaatgcccttgctatgaagatggctatggctccggcttctggattccggtcgaagatgttccggccttcaaagaggtgtacaaggcagcaaagaaagcggtgaaataagcacgaattgctaaacgccgggccgaaaggcctggtatagttaacccatcgaaaccagtcaggagattaaccatgaaagcatttgcggatgtagtcgtcggggataaaattcaatatggcgcaagcgatctgttccgtaccgtaaccgatatcgagaagggtcgcggcgtcaactggtttactgtcttcgtggtgctcgacggcgttgcacgctttgcggttgacgctcgtgattgggttttctgcatcgagaggggccaggtatgaggaaacggcgggcctgggaggtggtttgcacctgtgatgcttacccattccctcatcgaatgttcggcggttcatgcaacgggatcgccattgtcattgccagtgttggcggtgctgagtgccagcattaccagctactgaataacggtcgctgcgaggtgctcgcgggtatcgagaacccaatcgaatgccattacgtcgccgactttgtacaacgaaacgaggttaaaatataatgagaacagttaccatttcgaacagcttttcctacatcatcggatcgccggaagagcgtatcaaggccatccgcgacaaggcgaccaatgacgttactgacgccttcagctctgcggccaaagctgcgatcacgtattactacggtcgtggccaggaatagttcagcgcagaaagcgcgcctttcctggttgtcaaaaaggaaggtggtaatgtatggcaaatcaacgacaagcagactggcgagtttattttcggatctgttccgtgccgggtaggaagcaacgatgttaccattcaggaactcggcgaaaaagaacctcgcgtccagcgcacgatctacatcagccaggattacgcgacctgtgttccggcatagcacgttttgctaaaacaacatggcgggatagtggcatactatccccacaccaacaagcgaaggagctacacaatgaaccatccgaagactgattccattctcgcagtactgaacgcgcatggccgcgtcgttctccgcatgaaccgcgcctccggcttcactcagatcacgatcacgaagtcgaaaggccgctacatcatcgggacgattccgggcggtcgcctcattcagtcctccctggctggcgtcacgctgacgctggaatcgaacagaatgttcattgaggcgtggaaagcatgaaagacaaggttatttactgcatgttcgacggatcaggcatcatgggcctgccgtgggccatcaatggatgcaaggtgtattgcttcaatgccgactccggcgaccacggagaatatagcattcgaatggttcaccccaatatccagtatgttaacatttggattgacaaggattttgacgtgaagcgatcgattctcggcgttcccgatcctgacttcattttcgctttcccatcatgcacgctgttagcgcatagcggaatcaagcacgtaagggaagataatgacgttctatcagccgcagatgatgcgaagatggtcgagcaattaggcaataagtatggttgcccctggatggtcgaaaacccggtcgggaaattatcgtcactatggcgcaagcctgacttctattttcacccgcgcgacttcggcggctatgtttctccgaacgaacctgtgtggcatcccaaaatgccccactgtgacaattacacgaagaaaacgtgcatatggcacggaaacggttttgtcgaaccgaaacggctcccgccgccggatggagtagaaggcgtgaatttcttttgggcctggaagtttttgggcggaaggtcagaaaggactaaaatgctgcgctccattactccgcgaggttttgcccgcgccgtgttccaggcgaattatcgagaatagcacgaattgctaaagctacccggcgaaagtcgggtagcattaccccatagaaacgcaacggagtaaacggaaatgaaatttattatcttgatgatgttaactattttgtgtatgtccgggcctggtggttttatctttgccgtcatgctgttagttgttgcggggattattgatgttcgccatcatcacgtaatgaccgatttaagacttaaccgcctgattaatgatcttaaaattgcttgcgagaacatagaaataaaggtggtgaagaaatgatatctcaaaaactcgccgaagtatgccgcgaagttctcaggatgaataatggcggcgcaaccctggctgcgatgcaaaataaaattgagtcgcacgttggctttaaattgagttgcagaaataaagctgactttctggatctggttaatctgtatatcgagatgggagaaagaaaataaatggcgaagtcaatcaagattaaatgcacgtcaagccgtgccgttaacatcaatgaaaacaacctttattccgcccgcgtcgacgatgaaggcaacgtgtcaatgatggtatatgacagcatcgaactgaagaagaaacgcgttattttgtcggtaggcgttagcggcgagttgtttattgctggcgacggcggagcggcggttgcgacgttcatcgaactcaaaaccaaaacgctaaaatgcgtcggccttgaccatagcaacccgatgaaaaaatccttcagcgtcggcaagcgctaccaggtggaaagcggtcgtgcgctcggcgcggttgctggatacatcttcgaccgtgacggatgccgctggacgctgtaccgcgagggagttggcttcagtgtatcggacggaacgactttcgaagctaaatacctgtgactggttcggggccgtgcgccccgataatccaagcgcgtttttcaagcgtgtttagattatcactggatctcggatttaatacggcatatgattagccgaacgattaaccaatcaggagcaagggcatgtttttaaatgaccgcgtatcaccgcaagatattatcgccatcgcagaaagggaggggatcagccccctgcgtgttgcgattcgtgcgaacgggtatcgtgactccgtttcattctggccaaagcccaaagatatcgacgtaaacgcggataagtatccaacaatctcgatcgccaatgattacgatgtggtcggcaagctggcgctcaatgcagcgcgttctgttcagttcccggaatcatccgcttacatgcactttctcggaaccgtatccgccgcaatgatgggccgcttttgggtcgagtaccacggcagcgagcaaccgacaacgctttacgttatcacgtcgcagccgccttccgctggtaagtctgccattaactcgctggccatcgatcccattgtcgccgaagtcgaacgcattaacgagttacgcaagaaagagcgtaagaaaatcatggcgaagttgtccgccaacaagcaggcgcttaaaggggagttgtcgcaatctgatatggtgaaacttttcgaagatcgtgacgaactggaagagaaacttgaaaaattatgtgatctaactttcccggtatccgataccaccccggaaggtctggcgaagattaacaaccgccagggaaactttgccgttatttccgatgaggcgacggcggttaacagccttttggggatcacgtatggcaacgatggcggaaagaagactaacagcgaactggtgctcaaagcatgggataagggtcacgtatcgatcgctcgtgccgacgttagcaacaatatgtcattcgaggctttgggctgcatttgcgtaatcgcacaggatgagaccatcgacgccatcatgcaagctggttctcgcgggatcggtgtctcggaacgtttccttctggttcgtgagcaaacccgtttgggggaacgcgtgttcatcgacgaaaacgggaattcgacctatgagccgatcgaccagtcactgaaggcggattacttccggctgattcatgacattatgagcgaatcgaacattaagttgcaggttactgacgcggcaatgcggagactgaataaggcacgccaggagttagaaccggagctaggcgacggcggtaagtattcgcatacaatgcttcgcggcgcgatgggtaagtttgataagcaggttatgcgtctggcgtccgtgattcacacgatccggaactggcaacccggcggggagcgctcgaagaagatcgacacggcgaccattgacgaagcgatcatcatgttccatgaattgagcaaaacgtatttgtcgtcggctgactcttccggctttgctggtgagggagcggaaattaaagcgctgtatgacgttatcgccagtcgttgcaagcaggcaaaaggtgttattaccgtccagggcatttataacgcctgccgcaacctgaagatcttcaaaggccaggctggggtgagcaaaaagattaaggaacgcttattgccgaagatggaggaattaggctttatctgcgtgatggattccgaagtctttatcaacccgtcgttcatgaggtaattgatgttcattcttgacatttacaagttctgcgaatctcgccgggaattcacccggcaggattttgcgaagttcgtctacatgcaccgcgaagcgcctcgcctggcaaaagccgccaacgtgtcgcaacgtatgttagcctcaatggtctctaaggagtttttggcgcgaagctatacgaatggataccttgacggaaaaaacggcgttgtgtggtgtacggggccggataacagggagataggttttgatttcaggtcgttcgaagggatggataacagatatatgtgggagatgatgcaccttgaccaactcagtgatgaacagcttttcgggaaaccaggtggaagatctgataacggaagttcacaggcttgtttgcgtgaaacagatcacaccagaaaattacttgcgtgccgcgctcatcttgctctatcaaggaatggccgcaaccaacacggttgaacatggccttaacgatgaagatggagtagcgctattgcacgtcaagcggtacatatagaaaaaggggcattacgcccctttgtttttctttcttgccaaagacgaaaaaatcagttcgccagcataaagcataactaccgcaattccaccaatcagccacggaatcaggcttccgctttcatcattccggatctcgatcttgtccgccgtaatctggttggcgtgaatgctggaggtcgttacagatttcttgttcgacgtgtcaaccttacccacagccgactccttaaacgtggtctcctgcttgctcgacgtgtccgttttgttggtcacgccaaccgcttgtttcacgttctccgcgccgacttgcgccgtcatatccggcttgctaccaaccagatcggaaagtattgggacgcttgatgcacaaccggaaacgacggcagccgcccatacgataaagccgatggccagcgctcgttgaaagtttaatgtgctcatttcagatccttaatgcatagttgatattcctgaacccggcgattatacaagcctttcgacttctccatctttcccgttttcgggttgcggtagtacgtccagcgatatagctgctcgcacgcctcgcgcaatcggccctggttcgttaatttcagcatggtgctgccagaatatgcgccgccgccagcgttgaacgtaaagctgtacatcgacgccctgaaggtgtccggaacatcgactttgattttgctgtcaacggttcgctttgccacctggatatgcttggttaaaagcgcgtcgcactctgaccgggtataggttttccccttgataacgtccgggcctgtgatgccttcgcatacagttggaacgccagcgatatcggtataaaccgtgtatttcgtgtcctccacttttgggaggaacgcgaccgcgatcgccgtcgccgccgcgaaagtaagccgagttttcattcccattttatttgctcctgatcctcaatgcctctttaatgtcgccagaatcaatcgcctccctgatggctttggagtctttccacttcagccacgtgccgattgaaccaaataagatcatgaaaaataaaccaatgacagcgacgattaattgcccggttgcagatcccgcgagggcaacgccaccgctgctattggttgccgcgttgatgaattcacgcatgatatgcaacctctgttagttaaatggtaaggtgatgatatatgcattaggccaaattaagaacaaaaaaaagggaacccatcaaggttcccaatcgttaaggtggtgataataaaggcattaactttataattttaatgcaacatccgaaaccatatcaaggattttttgcgcgtcgtcttccggctcgccagtggtcatatcaaaatcgagttcatggtaagtgtagcaaataagat

SEQ ID NO: 7 - DNA, 50768 bp, unidentified
  source 1..50768: mol_type = genomic DNA
atgctgttcataggctatcacgttggcgcggctcatcttgtcgagcgcctttcaaagcgggtacatgaaggcacatttgcggccatgatgtacaataagaaaacggcacgttgggaaaaaattggcgatccggatggtatcgcaaagcgaattgccttttcgccgcttccgtatgttgactgcgagccgtttgtgaaactccagaagacgctaaatcggcgaaacaaactgatgtgaacataacccgcttcggcgggtttttttgtgcctgcaatctggtatactcgcaactcaacacagaaggaggattaacaatgtctgaagaacgcaaaaaacgcgtaacgaaatcgcacttcgaaggcaatttcaaggcgctgtacgaaaaagattttggcgtagtgctggggcgaaccgccgaaatgactccgcaacaattcttcgagatcgcgaagggttatttccagtgggccgaagagaacgccatcaaggctgcggaaaccgccactttccagggcgacgttaacgagtggggcgtgaacaagccgcgcattttcacgatcacagggttaagcctgttttgcggcgtgaaccagtcaacgcttgtacgctaccgccacgacccgaactatgccccggtcatggagttcatcgactctgtaatctatgagcagaaattccagcttgctgccgtcggcatgattaacgcttcgttcgtcggtaaggaaatggggatcgacaagcccgccgttctcaacattgacgccgtggcgggcaacaagaacgagatcaccgatgaagtattggagaaggctgttagtaacattctagacaagatttaagggccgatcatgaatgacgaaatgattatttgggaagacctgaagccagccgataagctggcaatcaaggcattgagcacgcgcaacttttcgctattcctgaagatctggtttcagattatccagggcgaaaagctgatgtggaactggcaccactcctacttttgccacacggtagatgaaatcatcgctgggaagcgcaaaagcacgatcgtaaacgttgcgccgggttcgacgaaaaccgaagcgttttctatccacctcgcgccgtatgcgtatctcaagtgccggaaggttcgcaaccttcagatctcgcagggtgacgcgctttcaaaaggcaactccgaccgcgtaatcaagatcttttcatctggcgaatggcaggagctatggccctcgaaattcgggcggaagcagatcgacgaattccaggttttggatgataacgatcgcgtaaggctggaaatggtgtcccgttcgtctggtggtcagattgtcggtaagcgtggcgggtacatgacgcctggtttcagcggcctaatcgcgctggatgatatcgacaagcctgatgatatgttctcaaaggtgaagcgcgaaaagagccacatcttgctgaagaacactattcgatcccgtcgtgcgaagaagaaacaaggcgacgaaacgccgatcctgtccgtacagcagcggctgcatgcacaggattccacctggttcatgatgagcggcgggatggctatcgaattcgatcgcattgttattccggcgatggtaacgagggaatacggcgaatcgctccctgactggttgcgtcctgaattcgaacgcgacgtgttatccgggccgtcggtggtcattgatggtgtcgaatactggtcattttgggaggataacgaatcgatcgagaacctggttgccttgcgcgatgccgatctttatacgttcctttcgcaatatcagcaggagccaatcgcattgggcggcaacgtgtttaagtcggaatggtggcgctattacggcgacagcgaaaaggcgcatgaaccgcgcccggacaagttcgaatacaccttcattacggcggataccgcgcagaagacgaacgaactaaacgactattccgtgctgtgctattggggcaagtaccgagatcgcgtctacttcattgatggaatccgtggcaagtgggaagcgccggatttgcgcgtgcaggccgaggcattcattaagcagtgctggcgcagaaacaaggaatgcgggaatctgcgaaagatttacatcgaagacaaggcgagcggtacaggtctaatccaggatctgaccaaagcagttaatggcatgggtgagatcgtcccggttcagcgtgacaaagataaggtgactcgcgcgatggatgcgcagccaattatcaagggtggccgcgtagtgctaccggacagccatccgttcattgcggagcttgtggcggaaatgagcgcgtttacctatgacgattcacatccccatgatgacatttgcgacaacgtatttgacgccgcgaacctggaaatgaacctgagcgatgacccggtagagcgaatgaaacgcctggcaggattgaaaaagctgggccgctaatacataatgtgggcttaacggcccacaaattacacaaggttaaaatatgaaagctatcaagatggatgactacaatcagatcttcaatggtggcgcggggtacgcgtcaaccgtggcgatgattgcaagcacgttcggtactatgtcgcaagtcgaggagttctatcacaataacggactggcgaaaaagattgttgacgtgatcccggaagaaatggtgtcgcccggcttccagcttaacggcgtctccgataacacgaaattccagtcagagtgggacggccttaaacttgagtcgcaaatcaccgatgccctctgctgggcgcgtctgtatggtggctcttacgtcctggcgatggtcaacgatggccgcatgctgacttcagcagcgaagcgcggtaagccgctggaatcaattgtcgtttacgactacgattccgtgtccgtagcggaggaggagaagaacccgcgaagcccgcgattcggcaagcctaagatgtacaccgtcaagccactaaacggcggtggcgactttaatgtgcattatacccgcatgcactacatcgacggcgagcgcgtaaccaacaaggtgcgaaaactcaacaatggtgctggcggcacggtgctgaacaagtcgatgattgaagcgattcttgattacgattattcggagtacctcgcaacgcagttgctgaagcgtaagcagcagggcgtgtggaaggcaaaaggtcttgctctaatctgcgacgacagggagggcgaatacgcggcccggttgcgcatggcccaagttgacgcgaattccggcgttggtaacacgatcggcattgatgcggatgatgaggattattccgtgattaactccgatatttcaggcatcccggaattcttgtccgccaaaatggatcggattgtcgcgctgtcaggtattcacgaaattgtactgaagaacaaaaacacaggtggcgttagtgccagccaaaacactgcgttgcagacgttttataagctggtggagcggaagcgcaacgacgactacaaaccactgttagaattcctgctacaattcatcgtcactgaggaagacttcagcgtagagttcgaaccgctgtcactgccgaccgattcagagaaggctgatatctttaagaagaacgccgaagcagtgcagggactagtatcggatcaggttattgacgctaacgaagcgcgtgacactctgtccgcgatggttcccgaactgaagttgaaaggcaatgcgccggaacagaaaaatttaccggatcgcacgccaggagcgagcaagactaaaacgcaaagcacgcagatcctgaacaacacggaggagagcggcgatgaaagttaacggcagaatcccaaactggcgttatcctgaagcaagcgagcgggatttatcccgcttgatgcaggacgcgacaaccgatctggtggtagaaatgcgagatcggttagaccgcctgaagttcgacgccacggcggaggaaatcaacgaggcggaagacgatatcaacgaggcggcgatcgcgttctttgctgccgtcattgcggcgctggcctccattggcctgactatctaccgtttcaactctaagcagtggctggttattgcgctggcggctggcgggcgcgataatgaagcggtcatgatgctgaaggaattcggtgctggtggttatgagcagtggtatcagcaggcgctgaagaaatggcaggataccgcaaaggcgtcaattgagaagttaacagccgatatcgtcgctgactggacaacgaaagttcgaaccgccaacaacattggcaagactcgcgagcagatcgatgaaatcatcgagggccgatatgccatttatggcagttggtcgcgcaaccgggcgagcggcattatcggaagttttaacagtatgttgatgatgcagcgactaaaagatgctaaagtatcgcattacttttggttcggcatgatggacgaccgcgaacgcgaaagccacatcaaactcgaaggtaagcgacgccgcgtaaatggtgacggcatttttcccggcgaggagtacggttgccgttgctgggcggttccagattttaataacgtagaggaattacaatgaaaagagttcaaagattcgacacggtaaaggtgaaggcccgatttgatgaaaacggctttctggtcgataccccgatcgttgcgcgtatcggcgcacagacctaccagaccccgaacggcccgcgcgttgagtttcgcccgcgctccgaagtgttcgacgctgaatcgctggcgtcataccaaggcaagccaattactttgggtcacaagatggtcaacgcccaaaacgcgaaagggctggtggtcggatcctgttccggtgctggcaaagaggacgggatcggggttctggttccggtgatgatttacgacggggagtcgatcgagcaggcgaaaaagcgcgtagcggctgaattgtccgttgggtacacctcgatcgatatcgacagaaaaggctggggcaacaacgcaacgggcgaatactacttcgatgaagacctaccggaaaacttcgaagaactgaaaaatgattccgtctctgattgggttcgctttgatgctgtgcaaacgaagattcgcgttaaccatgtggcgcttgtttttcgtggccgcgcaggaattgcgaaattaaatcttgatagtgagcaagaatttccctatgatgacgactcaaaccacaaaggagctaaaacgatgattatcaaaattgacggcgtagacgtcgaagtagccgataacgtaggcgcacatatcgctaaactggacgcgcagatcgcaaccgcaaccagtcaggtaacgagcatcaccgcagagcgcgacgcacttcaaaccaaagttgatggcattgaagatgaagtggcggcgcgtgttgccaaaatcaaagccgacgaagacgcgaagcagaaagttgtcgcgatcgtctccgccgctggcatcaagtgcgacggcctggacgttaaagcgatgaaagttgcttacatcaaagaagcggatggccgcgacttgtcagataaagaagattcgtatatcgacgcttcttttgactttatctccaattctgataagatggcaagcaatcgctctaaagtcttcgccaaaaaagaagatggtgagcagggagacaagaagggcgcgccgaaactcgatggttctaacatcatcgacccgcaagccaaattccgtaactaataccgtgcggccttcgggccgctacaaaatccaaatcaaggagatttaatcatggcaattcctgcaacctatacccgcaagcgcgatatttgcattccgggccagatcgcggatacttcgctgtacaacatcgacggcacctgtgccgcagcaaatgacattttaactggcgttctggtagcgttgtccggtggcgttgttgatggtcataaagtggtcgataccgctaaaactgctgatgctgttctggttggcgtaaccactcattcccattaccaatcgccggaattcaaatacgacaagttttccgccgtaaacgttatgacgcatggtcgcgtgtggtgtcgcgctgcatctaccgtaaccgcagccgattgtgcttttaagtcgctggtaactttcggcgctgacggcaccgtggcaaaaggcgatgctggcctaatcaaagccgggtacactcacactggcgagtggttcaaaaacaaagatggcgatatcctggtgaaaatccagctaacgcaggatgcaaccgcgccagccgctcccgccgctggtggagagtaaaaaaataggggcttcggcccctttttcatgcgttaaaaaaacctttgaccgtttagcaattcgtgctattcttcatctcgttaagtcaaaacacacaaacaggagtttcacatgactatgaaattagatgcattcgagcagaatgcaatcaaggttgcaatgcagggcatgggcatcgacgccaacaaactcgatgcgcacggtatctggactgtcaatcagcttacccaactcttaaatcgtcagtacgaacaggcttacccgcaaactggtgtgctggagcttttcccggttactaccgaactgagtccggtaacgaaaaactttgaatggctggagtttgacggcgtgacttctgcgaaaatcatcgcggattataccgacgacctgccgaccgttgaagcgatggcgtccgagaaaactggtaaagtgttccgcctgggtaacgcgtggtttatctccatcgacgaaatcaaagctggtcaggcgctgggttccagtcttagcgaccgcaaagcgtctcttgcacgcgaaggccatgaaaccctggttaacgatctggtgttcaaaggttccgcgccgcataacatcgttagcgtgttcgaccagccgaacattaaccgtctgacctccgcaggctggactacgccggaaatcgcattcagcgagttgcaggatctgatcgagacgatcgaagatgtaacgctgggccgtcaccatgttaccaacatcgtgatcccgccgtccaaacgccgcctgctgacgcagaaaatgccggacgttacggaaagttacctcgcgtggttcaaagagaactacccgaatgtcaccatcactgcgattgcggaactggaagatatcgacggcgcaggcaccaaaggcgtactggcatacgaaaaagatccgatgaatatgtcgatcgaaatcccggaacgcttcaacatgctgccgatgcagccgaaagacctgcatttcaaagtgccttgcacttccaaatgtactggcctgatcgtgtatcgtccgctgaccatcgccattctttctggcgtgtaattagaatggcccttcggggccattttttattgttgcgaaaaacctttcgttgtgtttaaatcaaacctcaccaaaacaggagagatataaaatggctaaaaaagatactgctaccatcgaaccggaaatcaacgaaaagccgaaaacctcacagccggaaaccgcaaagccggatatggtaacaatggaaaacgtgggcgcttgcctgattaagttcgacggcaagaaagtgctacctggagaaaccttcgagatcgaagagtctcaagttaaccgcttccgccacgatatcttcaaaggccgcgtagaattccacgatgatattcgccgcactcgcgactacatcgcagcagtgaaagcgaaagcaaaaaccatcgtgcagcctacgagcgccgaataaaaaaccaataagggcgctacggcgtcctttttcatatctggagaaaaaccatgaattatacgattcaagatgtgatcgacaagatgcgcagcctagcgccgccgcttaaagaagtaccggaagaactgttaaccgcatgggtggtgctggctgaggaattcgtatgcgcttcaaagttcggagattcgatcattacagcgttggcgctgatgaccatgcacctgatgtttctggacggcgcaatgaagcaggaaggcgaaagcgtggaatcatactcgcagcgtgtagcgtcattcaccctgaccggggagttttcccaaacgttcgatcgcgtgtcttcggcgagtgataacgaaatgctatcaactccgtggggtaaaatgtactggcgcatgctgaaaatgcgcggcggcggcttcggccttatgaccgctggcggtctgcatcgttgcggcatgggaggttaaacgccatgaactacaaagcaattcatgcccgcgcgagtgcgggcattaagtttttcagcgatgccgatggcgtatttaacaagtacaccaaaggcgctggcggcggcatcgaccccgaaaccggggaggatatcatccctggcgaggttgtgaccacaatcaaaggtgcggtgcgggatatcaaagatcgcgatatcaatggcgaaaccatccttgctggcgacaagcgcggcttctttactcacgacgtaccaatcatggaaggtgacgaaatcgacgttgacggcgagcgttaccgcgtagtgaatgcccgcccggtgaaacctaccggaaccgttgttgcctaccgccctgttttgcgaagggtggcgacttatggctaactacaccatccgggagttcactggtgctattgatgcatggtgcaaggctgctggggacgcgctggaggatgttgtacgcatgacgtgcgaggatatcctaaaggatcttgtgatgcgctctccggtcgatacaggccgcttccgtggaaactggcaaatcacttttaaccgtgcgccgctttacgccatcaacgcatacgaccagacagggacgaagactatccagaacggcaacgcgaacattgcgctgttcacaaagggagccgggattacttcgatctggttcagtaacatgctaatctatgcgaacgcgctagaatacggacactcaaagcaagcgccgaatggcgtcatgggagtcgtcgcgatccgattgggcgtatacgtgactgaagcaatcaaacgagcgagggcgaaaaatgcactatgatattgcgttaaaatgtaagacagcagcggccaaatttgccgccgataacgggattatgatcgcgagcgataacgttgactttaagccgccatccaacggcgacacgtatcttaaattttcatacgtcgaagcggattcccgatctgttagcctctccagggagtgtcgcgtttaccttgggctggttcaggtcgatgtgatctttaaacctggaactggcaccgacgccgcaaggttaatcgcgcaaaatgttacaaaatacttccctgaaggtaaaatcttgggcgatgacaaaattaacctttacgtaagtgaatgggcggaaattcacgcggtgcagaaggcgcaaacagggtggttcttccccgttcgttttactgtaaggtgcgagaaagttgagagcgtcggttatccatccgcctaacggatcttcgcagtgcttataatttcttgccatccagctaactagcgggcataatggctaggttaatcaaacatcaaacaggagtattgaacatgcatttaccaaacggtgctaaagtcttctttgagaaggcacgcggagcggcgatcccattcaccgcaatgaccaatgacgcgttaaacccgaaaatcacagttgctgacggaaagctgaaggtgaaagatattgttatctttaccgattgcacttggggcgactttgttaacaaggtggctcgcgttaaagcggtagcggcaggcgtcgcaacgctggaggagttcaacacctccgatactaacaagtatcctaccgccgcaaccggaagcgtgagcgtaatctctgactggatcgaaatgccatgcattcaggatttaggcaaagacggcaacgagcagcagtattataactaccagtgcctgagcgacgaacgcgagcagtccgaaccgacctacaaatcggcggtaacgctcaactaccaatttgcgcatgagtacaacaacgcgatctacccgatcctgcgtgctgccgatgccagcaaagaggcaaaagcgatgtacatgtacgtaccgcgagcaagcgaagttcgttattggtctggtgtcgcctcctttgacgatatcccgtctacggctgtgaacgaaatggaaaccgtcacccttgacattgcgctgaagggttcgcacgtcttcctgcctgcgtaactggaaaataataactggcggggcttgtgcctcgcctttttttatgcataatagcattcaatacataccaatcaggagattacaaaatggctaagtttaaaattcgtattggcggcgaactcccatccttcaaacttccggtaactttcacttgccccgatggcaaggatgcaaccatcaacatgacggtaaaacatcactccaccgatgaaatgaaggagttttatgaaagcgaagaaaaagcgccgaaaggtaacgtggattttatccgcttcatggccgaaggctgggatctggacgaagaatttacggatgaaaacatttcctggctgtgctcgcattacccttcctttgtcatggcattgcctcaaacgtacatggccgcgcttgccgggcatcgtgcaaaagtctaaggcgggctgtttatctaacgcttcagcctgagttaaccgatcgccagcttgctgagtatggtttacggcgatcggattacgaggctgatttagaggaaattttcttcgatgagcagaccgcccaaagttggcaactattccaggccatgcaaacgcaatggcgcattgggatgaatggcccaacggggctggactataatacattgcctatgttctttgaattgtataaaatcgacaatcgagaagcggcattgcttgacttgcagatcctggagggtgaatacctcaagcagatctacaaaaaatcacaataagcgcctacgggcgcttttttcatatggggggctaacatggctgataaagtagctggcttgacgttcggcgttgacgtgtcgcaggttgacagagcggtgcgatcacttgccgaactgaagaaccaaagccaacaaaccggggcgggtcttcagtcgctggcggacgctgagaagcgcgcgacggcgcagactgaggaaatgaaccgcgcgttgcagaaccaaaagaaaaccacggaaaaggccaagaccaatttcaacaacatcgcgggcgctatcgatcccacgatctcgaaaatggctaacttgcgcaaggcttcggaagaactggataaggcctggcaattgggccttgtgccggacaaggaattcttccgcctgggcgctgtcattgagtcgaccaccaacaagctgagacagcagcagttggcgctaaccgaagaaggccgcgcggcaattgctgaggccgaggcgaagcagaaggcgaccaacgccgggcgtgattttgtcgccagcctgaaacagcaagcagattcgatcggcaagactcgcgccgaactactggaaatgaaggcggcacaattaggcgtttcaactgaagcggcaccgttcattaacgccctaaagcaacaagagcaggcgttaaagaaacagcagaatgctatggggcttgctggaatttcagcgggtcaatataaaatggcgatgcgccaacttccggcgcagatcacggacgtagtaacgtctcttgcttccgggatgccagtatggttagtggctattcagcaaggcgggcaaatcaaggatagcttcggcggtatcgggaacacgttcaaagttttgttgagctacattaacccgctaacagttggcgcggttgctttgggtgttgctcttgcggctatcgccaaagctgggtacgactcctggaagtcacagcgagatctagcgaatgcattggtgctgactggtggctatgctgcaacaactaccgggcaaatcacctccctaaccgatgaaatcaataaaacatcatcggctactgtcggaagcattcaggcgatcgcaacgtcactggctcaatctggaaaatacagcatcaaccagattaaggcgatcacgaagactacggcggaatgggcggcgcagaccggggagagcgaaaagaccattactggttactttgactctatcgcaaaggatccggttaaggggcttgccgatctgaatgatcagtttaatttcctgaaggaagggcagttaacctacatcgaatctttgcgaaaaaccaaaggtgagacggcagcagcggaagcggcaacgaaactctttgctgacacgatggataaacgcctgaaggatatcgcagacagcgcaacgccgcttgaaacgatgtggactgacattaaaaagtgggccgcagactcctggaagtgggtaggcgatcacaccgtcggcgcgttaaaccttatcgttgacacggtttcatccatcatcaacgttatcaggaaactgattgcggatggcgacgccatgatcgcacaattcatcgttgatgctggtcggcagttgcagaaagtgcctggcatgggtgactttgggaatgattttcttgcacagcaagaacagctaatcaaggattccaaagccaaatcagcggaactggcgaagaccattgcggagcagcaggcaaggatcgcaaaaggcgagatgggttacatcgacgccgcaaagaacaggacgttatctggtggttacagcagcgctacaaaggacaaggtaaatcaggaagaaaaggatatcctgaagaaccgaaacgccaggaaggagcaggcagacgccggggttaagatcgatgaacagtatcagtccgaattactgtcattgcaggcgcagttgaaagtattgcagcagcacaaagggcttgacgacaaaatcagccagcagcgaaaagactactttaccactgtcgccaaattccaggtgctggaagaagcgagcgccaagcgcaaactgacgcagagcgaaaagcagatgttagccaataagcaaagtatcatcgctatggcggaacagaaagcgatcgtgggcgatcagattgtccggcagcaacgcctgaacgccctgcttgacaagtcggtgaagtatcagaaccagatggctgagaagactaaagcgcttcaggataccgcagggatggggagtaagcagcaggagcgctatagagcgaatgcgcaaatgtcggcagactggattaatagcggcggctcgcttgacgacgcccaatttaagcagatgcaggcagcaagcgacaagttctatgcgcagcaggatgcgcagatgcttgactggaaggctggcttcacgcacgcgtgggctgacattggcgatgaagttaataacgtgtatggcaatatcggggatatcaccaaaaacgcatttaacggaatggctactgtgctaactgattttgtcatgacgggtaaggccagcttcagcgacttcgcaaaaagcgttattaatgacattaccagcatgctaatcaaaatggcgctgttcaatgcaatgtctgctgcgttcggcggcggcggtacgttcagcttcgccagcatgttcagcaaagggttcgctaacggcggctatactggcaatggtggcaagtacgaacctaaaggcgttgtgcatggcggcgaattcgtctttaccaaagaggcgaccagccgattagggccggaaaatttatacaggctgatgcgtggctatgcttccggcggtctggtaggctctaacggttcgtcaggatctggtgtgacgaatggcgggaatgttgcggcatcggcagcaatggtgtttagcatgggtgacgtgaacatcacgatgggttccggtcaggatggcaaggggttagagcagggagtaaggcagatcgtgaatgatatgttcacggaggcactaagccaaaacggacgcatttcgaaatacgtaaacgagaaaacgaggggttaacagtggattctttttcatggtgtactcaaattcaaggaggggcggcgaaagtcgccgtttccaacaacgtgcgagcggttagtttcggtaatggatacatccagactgcatcgagtggcatcaacacaaagcgccggacggttccgatcgtttatggcgggagggattgggaggcggtttatgatttttgccagaatcacgtgacgaagccatttatctggaaggcaccagatggaagaatgggtgtattcgtcgtaacggcagactctgttaatctctcgccgatgggtggcggggtgtatgaggtaactgcggagtttgcggaacgattctcttcagccggatagcacaaagcgccctttacgggtgcttttttttggcctatgatctggagtcgataagaggaggaaatttatatgacaactaacgtttcaaaagagtttgcgaactgcttgcaaaagctgttccctggcgagatcttaacgctgattgacattgacgccacgaagttcggcgggcaggtctaccgattccataacgagaatatcgcctactcaaccgaagaacttttggcagcggttaacggtggcacgctgacgccaaaggcgatcacgtttcgcggcgagcaatacggcccgcgcccgttcgggatcggtggtatcgcaatgtcaagtgacggcacggtagaaaagccaacgctgacggttagcaatattgatgcgcaagcgagtgctcttattcgcgcctacaacggcctcatgcaagcgaaagttacggtatgggttttggtcaaggatttactgaaagaagatggtagcgtcgctgatggcgattttcggcggttcgtttactatatcgaaaggcctaagcaggttgacccgcagaaggctacatttgaactaacgtccgtcttcgatatggatggcttgatgattccggcccgccaaactcaaaccgtttgttattgggcgcaacgcggctggtacaaaaccgggaagggatgcggctacaacgggcaaaacggatactttgacaaattaggaaatagggttgatgatcccagccaggatgtttgcggaggtcttgtttcgtcgtgccgattgcggttcggcaatgaggctttggattttggcggttgcgctactgcaaccttgaaaagcggacggtaatatgttaactccaaaaatcaaaatgcagatcatgcagcatgcgaaggaagtttacccgcatgagtgcgcagggctggtaacgcagaaatcacgcgtgcaaaaatatcaccgactcgataacgtttcgccggatcctgagaacgaatcaatgcctgacgaaacacagtacgcgctggcgtcactggaaggtgagccgatcgccttcgttcactcccacactggcgacggggcaaccaccgttccgagcgctacagatttatgcttctgtgatgaatctggcttgtcgtgggttattgtgtcgattccagaaggcgatatgcggattatcgaaccgaagcgcaggccgctgattggtcgcccctgggctttgggcgcgtatgattgctacggcctggtgatggattttcacaagcgacacggcgtaacgctgactgaccgccgccttccgttcgaatggtggaagccggaatacaaagaggatctttaccgcgactactggcgcgaagatggattcatcgaaaacactggcgatcccgaagtcggcgatatgattatcttccagcttcaggctgacaagtggaaccacgctgggatttacgttggaaacaataacatccttcaccacgccttcggcaagctatcgcgccgggatatctattccgggtggtatgagcagcacaaggttttaatttgcagacataaggatcttaaacatggcatcacatacaaagacgattaaactttccggctccctggggcgtcggttcggtgtcttccataacctcgcggtcgattcagtcggcgaatgcatccgggcgctatcctaccaggtggaagggtttaaagccttcatgcaaagcaaggttggttctaacatgcgctttggtatcgtcgcggacggaaaaccaatcagcacgaatgactttgcaacgttcgccgtagcgaaggagattcgaatcatccccatcccgaaggccagaaagaacggcggattgttgcagattgttatcggcgctgcgattatggttgcggccttcttcactggcggtgcatcgctggcggcgatgggggcgttttcatcggcggcgtttatggctggtggcgcaatggtcttgggtggcgtaatgcagatgattgcaccgcagatgggcggaaacatgcgagcgagcgagtcgccggaaaacaaaccatcgtatgctttcggcgggccgattaacaccacggcagcgggttatccaatccagttgccatacggttacagattggctggtggcgcgctgttcggttctggatcttacgccgaagacaacaactaattaagcgattcgctttttagcctgggggcatagcctccgggctttttgtcgtgtacaattgcaaaactattaacaggaggctaaacgatgactaatatcaaggcccgcaagggcggttcaagcaaaacgcgcactccagtagaaatgccagacaacctgatctcgaaagacaagatcaagttattgctggccgtttctgacggcgaagtagtggatgacttcagcctgaagcagttgcatttcggcggcgttccggttcagaacgaagacgggagctataactatgagggcgtaattgcagaatttcgccccggtacgcaaacgcagaactacatccagggcttcagtgaatcaagcgctgaattccaggttgcacgcgacgttacctttaacactccgtactcgctgacggtatcgaacaagaatctttctgctatccgcttccgcctgttatggccccgcgtgctgacgcaaaaagataatggcgatatggtcggttcggtcgttgagtacaagatcgaaatggcggttgacggtgcgagctatcaaacctacttgaccgacaaaatcgacggtaaaaacacgactggcggttacgatcgcagcattcgcgtcaacttgccgcaagacttcacgtcgcaggtgcttatccgcgtaagccgaattacgccggacgctgacggggtgaaggtagtcgatgccttccaggttcagtcctacgctgaggtgattgatgcaaaattccgctacccgttgacggcaatgctttacgtcgagtttgatagcgatctgttccagaaccagattccgacaatctcgctcaagaagaagtggaagattgtccaggttccgcgcaactacgaccctgttaacaggacatacgccgggacgtgggacggaactttcaaatgggcgtggagcaacaacccggcttgggttctttacgacctgatcatgaatcagcgttatgggttagaccagcgcgagttagggatcccggtcgacaagtggtcgctctatgaggtggcgcaatattgtgatgagcttgtgccggataatcgaggcgggatggaaccgcgttacctgatggatgtggttgtgcagtctcaggttgaggccttccagttggtaagggatgtttgttcagccttccgtggaatgacgttctacaacggggaaagcctttcgattatcgtcgacaagccacgcgatccggtttacctgttcactgctgataacgtcgttgacggcgtattcgtgcgaacatttccgagcgaaaaaacgatgtacacatcgtgcaacgtaatgttcgacgacgaagaaaaccagtacgagcaggacgttgaaccagtgtttaaccctgacgctgccatgcggttcggtcacaacccgacaagcatcacagcgatcggttgcaccagacggacagaagctaaccgccgcgggcgctggattctgcaaacgaacctaagcgcaaccaccgtttcgttttctactggcctggaaggtatgatcccttcgtgcggcgatgtgatttacgttgcagatccgcattggcaatcggcctttaacctggttttgtcaggtcgcattatggaagtaacgggaacgcaggttttcttggctttccgctgcgacgcgaaggcgggcgatacgctgattctgaacactgacgacggtaagccattacgtcgaaccattgccagcgtatcagcagacggaaaaacactgacgctaaacgtgggatataacttcgacgttgcgccggacagcgtattcctgatcgaaagtgaccaactggcggctgaacagtacgttgttaccaggattgagaaggggagcgatgacgacgaatttactttcgcaatcacagccacccaatacaacccgaacaagtacgacgcgatcgacaacggcgtaatcactgacgaccgcccaacgtcggttgttgacccggattcaatgggagcgccggaaaacgtgtcgattagttcattctcacgcattgtgcaggggatgagcgtcgagacgatggtaatcggctggtctgccgtgcagtacgcaaaactttacgaggtgcaatggcgtaaggatggcggcaactggaacaacgtgccgcgcacagcgacaacgcaggttgatattgaggggatttatgctggcgaataccaggcgcgcgtaaggtgcattagcggcggcaatatcgcgtctccgtggtctgctttggcaaccgccacactgaccgggaaagtaggagcgccaaaaggaccgattaacctttttgcgtcggacgatgagatctttggcattcgcgttaagtgggccatgccggaaggtgcggaagacacggcatacattgagctttaccagtcgcaaagcggaaccgatcaggatgcaagcctgcttaccctgattccttacccggcttctgaatactggcattcaattctgcccgctggctacgtgaacttctacaaagcaagaagcgtagaccgtatcggcaacgtttcagcatggactgattacgctcgcggtatgtcgtctactgacgttagccttatcactaatcagatcctggatgaaattctggatagcgatgcgtttaaggagctagaggataatgcagttgatagtgcaggtaaacttagtgactacgctaacagcataattcataacgctttagcaaatgactctgacgtaagagttatgagaaaggagaatggaaagaggaaggctgagtaccagcatgcagttgttctcattgctgacgaaagtcaggcaagagttgacgcaatagaaacactgagcgctgaatttgatgaaaaaatagacgctaactatacggaggtaattactgctttagctaatgaaacagaggcaaggacaactgcggaaacggcattatcagcaaggattgatgacaatgaatctgcgatagaccaaaaacttgattcatgggctaatgttaacggtgttggctctatgtacaccatgaagttaggtctgaagtacaacggacaggaatatagttcaggtatggccctacagcttaccgctagtggtggaagcgttgtttcccaggtgctatttattgctgatagattcgctatcatccgaaatgcggagtctggagcgtacacgttgccttttgttgtgcagaatgaccaggttttcatgaataacgcgctcattcaggacggttcgattaccaatgcgaagatcggtaacgtcattcagtccaacaactacatcgccgggcagcaagggtggatgattaacaagaatggaggttctgaattccagaacactactgttcgagggactatctacgctaccgacggcgtatttaaaggtactgtacaggctgaatcgtttataggagatatcgccgtagccaaacgctatgacggcatgacgctccgccgcaaccagacagtgcagcgcaacggcttctatcagaatcgcgggtatggcatgaccgtcgtgcttgcctgtacgctggtgtgtgagacttacggaagcggaagttcacagcttggttatacagttgacgttacgtttaacatcggtggtcagcaggtggtgcgacgcatttatgttgatgctggtaacattgtgcagggtacaactgccgttgagcttcgcttcgctgccgaccttgctgctgataacaacaatgttagcttcttcatcaaggccaccgggcgcgacgcagtaaccgactataccgtgacggtcgacaacatcacagccaccgcgttccgtacaaacagcaactcattcagctaacagaggccccgcgaggggcctttattttggacaaaagaaaagggcctttcggccctttttttatataaataacacttcacaatagatcactacaatttaaatcatattgattgtaattcctgagctaaccgccgcaggccgtagttagtgccaattgtttcgtatgccattatttggaatcttaatcatgaccaggctttacatcctccgaacctgcgaacattggcagggtctttatgtattcatacccttgtttaatgatgtttttactttcctcccaatctggtgtaaatgcaaatgattgaaaaacaccatccacaagttcatcattgatattgttgcaaaggaatacatccagattaactgagtaacggccccccctaaaggtggagattaccgcgtaattaaaagttatcgtgtcggtggtcccgtctaacttaatagacgggcgctcaataagaaaattacctttaagtgccatttttagttctccagaatatatcgccactgcggcattgatgttactacagtgccggttgttataattaaaacttgctcctgtaaacgcaagtcaagcgcaagcgtgtgaagtccatcagaagtataacggtgtcttacttgtccgttaactgttactgatactgaaccgccggaaatcgtaaaaccaacggtgtgccttcctggcctgcggtatgggtatgaaaacatcgaccccgctgtaaacgttgtcccttccagtggatgagacgcttcacgcatcgcaaatgacgattgagatgtgtctccgtatctaaccctaacaaagtttgttgcccttgtgtttaccggcccaagctggtttttatcttgcaagtaaataaagtagttagacgtgtttccatccagttttgcagcttcgccaaaagacactaatccagtattactggtcgatttgcattcaatgaaatatagttcagcttcggttttgtctgcgtatccagcatgggcgttattcgtccataagttccagtgaaactggaagtctccgccaactgtttcgtcaatcttaacgattggtgcgcatggccaaccaaactgtgacgcgttcagattttgagcaaaaccaccattgaaaaacaccctgcttggatctagaaccgcaagaactctctggccgcggtatttcagcctgctgaggttgtttgtcatttcaacaagcgttgatacatcccaagctgtcatatgctggaaagttacctgcgaattgaagccaacacgcataaatctaccagagttctgaacgtgagcgccagaaatatttacctcagagttacaaacttctagagcatacagatcatcagcagtgttagacgctgcatatgttgtatttccgcatatggctatatttctgtttatatggacgtttcgactatcccaaatacacaaatgaccaacgccgccagcaccaataagaatattttttagtgacatagtgccacattcgctgaatatcagtccgccagaagtttcgttgtgtggcacgtaatcttcataggtcatcgttaaatcgtagcaattcgatatgtaacccggcactctgttgttctgcgtccatactgagttccaatgccccatccccgcaccggtatttgtgaaataaaaatcacgcccacaggttttaatgttaagaacaacatcgccaacggcctgaattgacggaagaacactaacaagatcgggccactgagcagttacagcgctatagtctttctttccggtactatacaacaccgtgccagggtaattggccgcatggatatgcaaatccggggcgttaaccatcgactccattctaagaatgtagttattttgaacaagtgtggcgatttgttcatcagtgtaattggtcgtactgaaagcaacctgcgagttgtccacgcgtagcctcactgatgggttgttcgcctgaaccaagaaaaacccagccccttcgccaattgcgcatgtcatatcaaagccgaatctgtcaccaccacctgtagtagggtacttccatgaaagtgattccgggaagtttccgcagcgtatatagtgcctttgagcaagatacactacgccacgcggcacgccggcgatgattgattgcggatatccactatctgacaattgcgcagcagcaagcaggcagttttcaaatgctgcatcctgtggcgctgatgtttctgccatacttttagcgccagcccagcgcatgcgaattgtatttcctaaaaatcttcgcttccatagcctaccaagtgcatctcgaaggtgtacgcagttatcatcaataatcgtatggtcatcatcgtcgattaggtcgaaaacaccatgaccgccatcgccagcaacagcaaatcctgatacctttatcttttctgcgttgccagtatagcttctgatataagagtaattggcttcgccaatatgtttaaacccgtcaggctgtgtcaatgctaccagcgttgactgttcgccagaatcatcaatgatctgctgaatttcatcgcgcactgctttggcgttagatgctgcctcctggcttgctgccgctgcctgctggcttgctgctgctgcaccctggctttccgccgctgcatcttggcttgctgctgcatccccttttatctgttccaccaatgcttgcaaagtggctaaatcaaagtctttaaagaaatctaccgcttcagcaataacagtttcctgtgattgatagtaacgaagagtttcagccacatcttgcgccagtccgtcgacggtcagtgagtcgcttaacaggatcgcgtaatcactggacggaacaaccgcgccgtttgtggtgattgcattaatttgcgtgtcactgacaaccttgttaactaccgccatttgaattggtgacgataaaaacaggatcgtagagccggggcgaataagcgttagcgctgattgccagttagttccagtcccggtaacgatgccgcttgaatccatcgcggctttgccttgtctgtatagtgccattttaagacctcttttcgtttgttgaatagcgcagagataatagcatcaatgaagcaataaaaaaagggggcttttcagcccccccccacccttggttgtcaaatcagaacgggatatcatcatcgaaatccatgccatgattaccaccaccgctttgcggcttcggttgttgttgcggcttcggttgctgaggctggccccatccaccctgctgattaccgccgccctgcgttggttcgcgctggctgaattccagttgcggcataatcatttcattgtggctgtaagtcgcgccgttgtgctcgcggtttacgatctgaagtgtccggcaggtgacgctaataaccttgtccacctgcaacgcttcatcgtaccacgcaatcatgctttccttcgcgaagaagacggcgcgatagttggtgtatacagtttcgtcctggccgtcgcgattgcggatcttcattcgctccgacaggtcgaccgcatacatcttccacggcccgttattgttgctgccatcttttacgtaaggcgcttttcggattacccctgttacaacatgcattgtttttcctatggggcggtttcccgcccggttaaattagttgaaagatgagatatcttgtgcttcaggttcaggctttgattctacctgttccggctcacgtttcgcaacctcttgcggcttaccgggattaaatccgttcgctggcgtcactttcagttgcgcctggcgcttcgtgatatcgtcttccgtaaccttccattccgcaggcgtcaacgtctgtttagccagcttgtaaatctcgcggagagattcgaggtcttcgcacgcatcaatgcgttttttgaagtcttgcggcttcatcttcgcgatctctgcgtcatcgtctgcctgcttgatgcccagcgcggcggctaacgcataacggcgagcgtatgaggttgtcgagccatatgcttgctcaacggttttgctgatcggcatgttgaactgaaacgccatccactcgccagattcgtgcaggaacatcgtttcaaggtgcataaccttgtcggtgctggtatccatcattgattgaatgaccataattttgttcttttccagcgaaggcccgatggcgtccaggatatcgccgagattggcataggtgtttccaaggtggctattcttcccgcttttcttcgcagcgacgaagccagacttcgctttgattaatgcaacggcgatctctttgaaactttcagatgtacgcatgacaaactttccttttcctgattggtggagcgcactatatcacaagtgcgccgcagtgtttagctatttgtgccgtatacttccgggaacatgtatttcacgaattgcggcgtgggcaacttcacttccgctgcgttcgattcgtatgacggccaaacgtcatgcttgacgcattcggcgtactggtgaatcacgctttgatactgcttccgcccgatctcaatctgctgatccgttaacgtgaacgcgagaggcgcgaacggtgattttttctcctgagtcagcaggcggacaaccaccgggcgtttttcgttgtacgtcttaacgaacagatcgcgctgcaatgccattttgagatagtagcccaggttgaacgccagccgcccgaagtcatccggtttagaggtctgagtagttttgtagtcggtaatcacaaccacttcgaaaacttcatccgggttaaacccccactctttgatgagttcgggatccgaaacgacgtcaacatgatcgagtcgaacctttaccggaacgccgaaaatttcgccgaagattgacaactcgcgttgcgctgtatccgattcaatgcacgccgcgtgccgtgggttagccagcatcacgtttcgcatttgcacgaccgcatcgaaatcagaatccttgaccagcttccggcctgagttgatggcggcgctttcgtcgcagagttcgatcgcccaccacacgttaacatcaatcccggcgcggtatgccatttccagcaattcggggtagtccttgttggacgtcccaatcaggccacacgctttcaatttcgcagacaatgccgacttcgaagtaatcagatccttaacgtcgccaggcgcggtcgctcgcaggtactcgccattaaatttggacgtctcaagcatgcaggtatgggagcaggtgccgaatgaaagcgcggctgtctcctcacgatccttgtatttccagtgggccggggatgttgcgtaaatctcgccgaggcttgagccgctaacgtatctggcgcaccaggagttaggatcgtggtaatcatcgttggataattccgcgttggtgtatgccttaaaaattgcttcagccattggtatcactccgtttgttgtttcgttgcgttaagtatacgcatcacgattccaggtgcaaggcaaaaagtgctattcgccaactggtcaaaaaatgagcgaaatttacgtaagatttagtaagatgcatcttacgtgattttctttatatatttcattgagttaacacaaatcggtaagatggtaagatgcctataggtaaatattcacagaaaaattggagcggaatcgcaaagcaaaatacatatacccggagaaaatcttacctacacagatagatagagagagggtaataataataatatagttagatatcatatacttatatatattctatggtgcgatattggttaaaaaatgagcgaaatttacgtaagattcatcttacctaatcttacttaaagtggtcgaccagtttgtaagttgctgaattttgggcataaaaaaaggtaagactgaaattatcaatcttacctaaaatttgttcacgtttaaatcagagaagggatgatgccacgtagagctttcgttcgaatccgcctttgaagttgtcattgttcggcacgataactttcatatcgcgttcttcagccgccgccagcatatcccgatctttcctgctgcatacgactcgcaattctcgcttaccttcgccaccacccttccctttatatcggtaggccacgatctcaacgttggacgggatgatgcatgcccacacgtcacacttaaacgagcttgcgatattgaagtgcatcgcttccacccaagagcgagccaggtaaattggcccgttaccgccttcgctctgattggttacgatcaccgatccgaaagtcaggtcgccagctaacatcttctcgcggccctcctcatcaatgaataagatgttgcagtattcatcgtccggcccgtcttcatgtaccagttgcatcgggagtgcatgaaatagctcttgcctgccgttctcgtgggtttttactccaacccggtatgattcaacgaactcattttcaatgccctcatagagcgttacaggcgtgctatcgacggcctctgttctgttcattatcgccacgacgcgatcgtgatctgccatttttccgtagtcgtacccgttatcgcgagtaacctgcttgttgcgcttaactacgtactcttgcggaactttgcccaggtatcgcccaagaatgttgatgcactcgctatacggctcgccgctcaacttcattaaccatccgatccccttatcagcaccgcagccgctgcaatacgctcctccgtcgccgcgattctctaatttatccgtccagcggaagcgatccttgccgccgcagttcggacagtcctggtgtttgccgttgaagtatcgggagtggatgccgcaaatgttttgtagcgcatcgcgccacatccccggcatgtatggcaaaacctctttttcgtcgtaaaaatccacgtcataacctccaaataaaaaacgcccacgcgagaatcataacccggtaggcgtttagtagttagtcaaattgtgctatcggactactcgaagcatttcgcggcggtcgcagcggcgcgtaattggcttgccgttgctgtcgaatctgagatccgggcggcaaaatgaagccctaaagcctttgcagtcattgcggcggtaactcttatgaaccaagtaagcaccatcggctgaaatcatgccgcgcttaatccactgctgaacaacctggatgctaacgcccaactcctttgctgttttggcgatgccgccgtatgcctcgatcaccaattccatcctggtagtcaggcccgcccttacttcatccttcaggacgtaatagcctgtcggcttcttgcggggcttcttatctttcccgcgtgaagtcccgttattgccgttcaaagttcgcttgtctacctttgccatttgttccataatttaacctcacagcactttttgttaaacacgataaaatttgctatgtattatacacgcaaccatgcgaatgacaaatcaggattaaacatgctgacaattgaacaacaaattgaagcctacgcagacaagatcccatctattcaaaagcggttcacggtcgggaatatcgttccgtacccgtaccaggctgtcgcgtacatcgagacggcgaagcggatcgcgaactatgagcacccgttctacattaaggcgtccgtatccgcaggcaagacaatcatgatcgccatgctcgcggcgcagtgcaaaacaatgaacttgcctatgatggttctcgcccggcaggctgagatcgtgaagcaggattccgaagaaatcagcaaccttgacgtgccaaactccgtttattgcgccgggttaggcacaaaggcggcttacttcccgatcgtcgtcggctccgaagggacggtggttaacggcctgtttaagatgctgggcgattacgtgccttcagtcctggcaatcgacgaatgccatcaggttgactggcaagacctcgccgaagcgatcgcgaacgatgaatccttcgagtacatgagccgcgctaaggataagccgtatcgcgtgaatggtgaaatcgtcgatgccgattacccgtacaacgaaaagttcgaaacggttgaatttggtggcgggcgcactcaatacaccatcgtaatcattgagttaatgcgccgttgccttcagaagacagggcgagaacttcgcatcgttggctatacgggttcggagtttcgcggcgtcattccgatcttacaggaagacaagagccaacctggtttctggcgcgagcagatcacggacattaacacaaactaccttgtcgaattcggttcggtggttccgacaatctttggtgacactgaggccgacggcctgggctatgacctgtcagagtttcacggctccagtcaggacggcacgcaggattttagcgctgaagacttgcgcaagatggagaagaaaatccacgattccggcgaaatgactaagctgattatgcagaaggtggtcgagcgtgcgcagacgcgaaacggcgtgcttatcacttgcgcgggccagcgccactgtaaggaggcggcgagctacttaccgccggacgccacatacgcgatcatcacggagaagaccaactcgaagaaacgcggtgaaattctggacaaggcgaacaggggcgagattaagtacatcttccaggtaatggccctaacgactggcgttaacgttccgttttgggatttttctgtaatccttcgcaagatcggttctctgacgttgctgattcagcttttggggcgaggaatgcgattgctcaaagactggcagaaggaagcgccctattcgtgggtgaaagaagatcaccttgtctgggattttgccggaacaatggatgacctgggccagttgtatttcgatccgattttggagcaggcgcagtatcagaagcgcaagagcagcaagaacggcccgaaaatctgcccggtctgcaaaggagaaaatagcgagtacgcccgccgctgcatccacaaggatagtaacggcaatcggtgcgagtatttttggacgtcccagcgctgcgaagaccaaaaggatccgaggacggggaaaatcaaggtcaaggggtgccacgctgaaaacgacattgtggcgcgccagtgcagatgttgtggcgtgcagttaaaggatcctaacgacaacctcaccgggaagcactacacgcaaaatgactggtatcaggttgtaggctttgatttgggattgacacgaaaccaaagcgggatcatctttaattacgtgttgctcaaccatgacggcgagaggttcacggccagggaaaaattcttccctgagtcagaaagcgcgatttgcggtaagttgtggcgacaaaaggcagtcttccagcatgttgatgatgctgtaatgcgtggcaagttgggcggcatgaaaagcgcccgcaagatcctggagtatgcggaatacttccgcgctccgaaacgcgtaactcatcgcatcaacggcaagaaggaggacattatttcccgcaaagactttggaggcgaggagtgattacagacaaaggggattacctcgaatattacggcgggcctgtaaaggcttgtccgcttgaaaaaatcgaccagatgaacagcgtttcgtggttgcgttacgaacaccccgattatttgttctggcatacggtcaacgagggcagcaagcacaaggcgagcgccgttgcagatcatcaaatgggattgcttaaaggcgtaagcgatatccttgtgctgattgggctgggcggcaaatacccgttcgccgccattgagctaaagcgccagggtaaatcccaggcgtcgccagtgagcaaggagcaacgggaattcctcgcagcagtccgaagccgtggcgggttcgctgccgtggcctatggattcgagcagtttaagatcgctttctgcgatgcaatcaaatagcactttttgttaaaacttcccggcgaaagtcgggtagtattactgcatagaaacgaagaacggagtattgaaagatgaaaaagatgcttgctttaattgttctgtctattggtcttattggttgcagcgaaaaaccaaaaacatatatttgcggtaacgaagcatttgaggttacgagcgattatattaaggtagttagcggcaagagcgctggcgttttaattgatggcattggtgaaaaccagtataagctgtttacgccacttggaacggctttttatactgttaacaaaaacaccattgatattaaagttagcgtttatcataacactctaacttgcgaggttaagtaataatggcaaaagatatcacagacaaagacactcacgacgcgttcacgacgtttgaacagcttgaacgtgaaacgttcataggcaacgcgcttgccactggcggacactatcaggccgtcaagcctgataagttctaccaggtaacgggcaaccgctacgccgggagcaagacaccggatatcgtccgcgacaagtggtcaaccgatcgcagccttattgcttacatggaggagcgttacgggccatacgacctggacgccgccgccgagaaaagcaacaccgtatgcccgaagttttacgacgaaaagaccgattgcctcaagcgctggtgggggaaaaataagcacgtctggcttaacccgccttactcgttcccggatccctttgtgctgaaagccattgagcagatggagcatgacaaccagatcgatattttgcttccaggcgataactctacggcgtggtttcgcgacgcacagaaggcagcggctgagatcatttggattgtcgcagacgtcgcggaggacgaagacggaacgcaactaagccgatccggtcgactggcattcatcaatggcctaagcgggaaaccagtcgacaacaacaacaagggcagcgtgattttcatcatgcgcaaactcaagccgggcgaggagcaaaaaactttctacgtcccggtaagcgaaatctgcccgtcattaactaaaaagcgcatgcgcaaacgtgggatctgaaaaatggaacagcttgaatctttcaccgaatacctacacatcatcgttactcttctggacaagtacggcttcatcggtacggatgaagaaaagatggccttcgccgatattatcgacggcacttatcaagagttcatggataacggcactccgcttgctgactggcccgcgattcttgagcgcgaattgctggattttcgggcgcgtgaaggtgcggaatatttcgcgaaacagcactaattgctaaacaatgcccgccgcgagcgggtattattgttccatcacccaatcaggagctaacgccatgaacaccaaaaccattgccgataccatcaagatcgcacaagttaagccgcacatcgtatcgcgccacctgattaacctttctcgcctgtgcatggccgactacgtggcgaagcctttagagaatggtcttgatggtgaaatcggcgcgatctacttccgagccgcccacggcatcgaagaaattcacatgtatgagcagatggcggaatgcttctgcatttacggtgacgaataatgattgtcgaatctggccgcgctgccgtctggcagcatgccaaagaggctggcattagtgacgatatcgtgatgatcgcaaagtatttcgatatcaaggatatctccattgtgttcaatgggaaatttacctatcttcatgagcgcccactgaagcgcacgcgtatagcggttgcgacgcgagcggaggccgacgcgctgaagatgttcattaatgagtcgaagcagaccaaaaaatattacaagtagcgggagtgttgagaatgcgatatattgcgatcctgattacggcggtggttctcactatcgcaatctttaactacgcaattcaattgggataaattatgcaacctaaaatcacagacgaagaatttttagccgcccgcgaagagggtaagacctaccgcgagatcgccgaagagttcggcatgaacgttcgcagtgtggaacgtcgcggcgttcgacttgcccgccaggggcatttgcacggtaacaaccacgtagcgaagcacatcccggacgggttcggggtcaaaggcacatcgaccatgattcgcgcgaatggtgacgaagttgtgcgctgggtcaagtcagaagtagaccgcgaccgcatgatcgctttgatggaggcggcgcaagcatcattctgcgaagacctaccgcgcgctgaaccgcagccgaaggatgaatcgaagtttttcattgaagatcagctcgccctgtatccgatcttcgatttgcacatcggcgcgatggcccacaagcacgaatgcggcgagaactacgacaccagcacagccgaaagggttcttaaccgcttctttgactattccgtttcggttgccccgcagtcgaaaaaggcggtcttgctggtcggcggtgacttccttcacagtgacggcctggatgcagtaaccccggcaagtggtcacgttctcgatcaggatagccgttacgcgaaacttgtctatgtggctattcgctccttgcgccgcgccgtgtcgctactgctgagtaatcacgcggaagtagaggtgcaggtaatcgaagggaaccacgatcaggctggcatgatctggttgcgtgcagcgctcgcagcgttctatgaaaatgagcctcgcgtattcgttgacgtcagccctgcaattctgcatcgcaccgtgtggggcaaaacgatgctgggctacactcacggccacacgatgaagaaggcagaaacgcgcctcgccgcaatggctactgacttccgcaaggaatttgggcaatgcgactacatctacacgcattcgggccattggcatcaccagaccgtcacggagcactcgttagggattgacgaagtacacggccagttaggggccaaagacgcttacgccgctcgcggtggttggcgctcctatcgccaggcggcggttattctgtacagcaaagaatatggcgaagtaggccgctttatctaccgcccgaacatgtaatcacaacggccccgcgaggggccaacaaggaaaaccgatgaatagaaatatctgcattttcgatctcgatggcacgttgtcaaatggcaaccaccgtttgcacctgctgccgaaaaaagatctccacctaaccgaaagctggacggcgttcaacatggcggctggcggtgacgctcccattacggacacgatccgggtaatgaaggccatgcgcacagcgggatttatcgtcatcatcctgaccgggcgaagtgatgaggcgcgcgagatcactgaaaaatggctggtgcaaaatggcgcatcgcattacgacctgctgattatgcgctccgcctccgacaaccggaaagatacggttatcaaagaggaaattttacgcaagattggcattgagcgaatcgttgcggcgtgggatgatagccccactgttattgcgcacttccgtagcttgggtattacaacttaccaggtctgcgactacggcgaaaaccttcacgatcatctgaaatctcatggagtagacaaatgaaaaatgtaatcatcctcaacggagcgcctggaatcggaaaagacaccatcgcggaaatcatcgcccgcaaatgggagtatcggatcctgagtttcaaatcaccgatgtttgacattgcgcgcgccatcctgggtgcaaccgactttgcccgcttcgccgtccgttaccacgaccgcagccggaaagaagtaaagtgcgactttttaggcgaccgctcgccgcgtgaattcctgattcacattagcgaaaatttcgtaaagccgacgttaggcaaaaagcagttcggcaagttgctttgcgattcatcgctggtttcgccgtttaattgcgttgtcagcgatggcggcttcgatgaggaggtggagcacgtcgcattgcatgaggcgcttaacgtgtttgtcgtccgcctccatcgtgacggcatgactttcgagggtgatagccgcaagcatattagccgcccggatctgatttgcgaaacttatcacgaattcgattttgatatgacgactggcgagccggaagacgacgcgcaaaaaatccttgatatggttttcgaagggtattaatattctctacgtaatgcctttattatcaccgccttaaactttgggagccttaacaggttcccttttttttgttctttatttggcccaacgcatatatcatcgcattatcacttaactaacagaggttgcatatcatgcgggaattcatcaacgcggcaaccaatggtagcggcggtgttaccctcgcaggctctgcgaccgggcaacttatcattgcggccattggtttatttttcatgattctattcggctcattcggcgcgtggttgcgctggcgagattcaaaggcgctgcgtgaagcgctggaagccggggatatcaaaacggcggtgaagatcaggagtaaataacatggggattaaaacgcgggttacattcgcggcggcgatggcgatcgctgtcgccttcctcccgaaagtggaggacacgaaatacaaagtttataccgatatcgctggcgtttcgacggtctgcgaaggcatcacagggccggacgtaatcaaggggaaaacctatacccggtcagagtgtgatgcacttttggagaagcacatccaggtcgcaaagcgtgtggttgacagcaaaatcaaagtggccgtgccggacaccttccgggcgtcgatgtacagcttcactttcaacgcgggcggtggcgcatactccggcagcactatgctgaagttgacgaaccaggggcggctatatgaggcatgcgaacagctttaccgctggacgtactatcgaaacccgaaaacgggtaagatggaaaaatcgcgcggcctgcataatcgccgggatcaggaattcaatctatgcattaaggatctaaaatgattaaggtaattggtgtggctcttacggttgttcttctgtccggttgcgcttccagcgtcccgatcctttccgatctggtgggcagcaagccggatatgacggcgcaagtcggcgcggagaacgtcaaacaggcggttggcgtgacgaacaaaacggacacgtcgagcaagcaggaaaccaccttcaaagaatcggcagttggcaaggttgatacttccaacaaaaaggcggtgacgacctccagcattcacgcgaaccagattacggcggagaagatcgagatccgaaacgacgatggcggaagcatgattccgtggctgattggtgccgttggggtcatcatgttcgcggtcggtgttttcggtatgtggcgagagcgaaaaaataaaggggcgtaagccccttttttcatatgtaccgtttgacgtgcagcagtgccacgccatcttcatcattcaacccatgttcaaccgtgtttgtcgcggccatgccttgatatagcaaggtgagcgcggcacgcaagtaattttctggtgtgatctgattcacgcaaacaagcctgtgaacctccgttatcagatcttccacctgctttcccgaatagggcttcatcgtcgagttgctcaatgtgcatcatctcccacatgtatttgttgtccatcccttcaaacgaccggaagttaaatccaatctccctgttatccgggccagtacaccacaccacgccgttttttccgtcaaggtatccattcgtatagcttcgcgctaaaaactccttagaaaccattgaggcgaacatacggtgtgacacgttggcagcttttgccatgcgtggcgattcgcggtgcatgtaaacgaactttgcaaaatcttgccgggtgaattcccggcgagactcgcagaatcggtaaatgtcaaggataaacattcatcacctcatgaacgaaggattaacgaacacttccgaatcaatcacgcagacgaaacctaattcctccatcttcggcagcaatttttccttaatccttttgctcaccccggactgacctttgaagatcttcagattgcggcacgcgttatagatgctctgaacagtcatcacgcctttcgactgcttgcaacggctggcgataacatcgtacacggccttaatctccgcaccctcaccagcaaagccggacgaatcagccgacgacaaatacgttttgctcaactcatgaaacatgatgatggcttcgtcgatcgtttcggttccgatcttcttcgagcgtttgccgccaggttgccagtttcggatcgtgtggattaccgacgccaggcgcatcacctgcttatcgaatttacccatcgcaccgcgcagcatcgtatgcgaatacttcccgccgtcgcctaattccggctctaactcctggcgtgccttgttcagccgacgcatgcctgcttcagtcacttccagcttgatataagattccgtcataatgtcatgaatgaggcggaagtaatcagcgcgtaaagacttgtcgatcggctcataggtcgaattcccgttttcgtcaatgaacacacgctcacctaaacgcgtttgctcgcgaaccaaaaggaaacgctctgatacaccgataccgcgagaaccagcctgcatgatggcgtcgatggtttcatcctgggcgattacgcaaatacagcccagcgcgacgaatgacatattgttacttacgtcggaacgtgcgatcgatacgtggcccttatcccacgccttcaacaccagttcgctgttcgtcttcttgccgccgtcgttgccatacgtgatccctaacaggctattaaccgccgtcgcttcatcggagataaccgcaaagttgccttgccgattgttgattttcgccaggccttccggcgtggtatcggaaacggggaacgtcagatcgcacatgctttctaacttctcctcaagttcgtctttgtcttcgaacagtttcgccatatcggactgcgacaactcgcctttcatggcctgcttgttggcggacaacttcgccatgattttcttgcgctccttcttgcgcgcctcgttgattcgctcaacctctgcaacgatcggatcgatagccagcgagttaatcgcagacttaccagcggaaggcggctgcgacgtaatgacgtaaagcgtcgtcggttgctcgctgccgtggtactccacccaaaagcgacccatcatcgcggcggacactgttccgaggaaatgcatataagccgatgattccgggaattgaacggagcgagcggcattgagcgccagcttgccgacgatatcgtaatcattcgcgatcgagatcgtgggatacttgtccgcgtttacgtcgatatctttcggcttgggccagaaagaaacggagtcgcgatacccgttcgcacggatggctacgcgcaaagggctgatgccttccttctctgcgatggcaataatatcttgtggggacacgcggtcatttaaaaacatgccttgctcctgattggttaatcgtgcggctaatgataagccgtcttaaatccgagatccagtgataatctaaacgcacttgcaaaatgtgcttaggttatcggggcgcatggccccgaatccgttacaggtatttcgcctcaaacgttgtgccgtccgacacgctgaaaccgacttcctcacggtagagcgtccagcggcaaccgtcacggtcgaagatgtatccggcgacgccgcccagcgcacgaccgctttccacctggtaacgcttgccgacggtgaaggattttttcaccgggtttttgtggtcgaggccaacgcatttcagggttttcgttttcagttcgataaacgtcgccaccaccacgccgccaacaccagcaataaacaactcaccactaatgccgaccgacaagtaaacgcgcttcttcttcagttcggcgctgttatataccatcattgacacgttgccttcgtcgtcaatgcgagcggaataaaggttgttttcctggatattaacagcacggcttgaggtgcatttaattttgattgactttgccattttatttcctttctcccatttcgatatagaggtttaccagatccagaaagtcggatttgtttctgcaactcaatttaaagccaacgtgcgattcgatcttattttgcatcgcctccatcgttgcgccgccgttattcatcttcagaacttcgcggcatacgtcagcaagttttttagatatcatatttcaccaccgtaaatttagtgtttttgcaagcgccttcgatatcgctaattaggcgattcactctgatattaatcatcgttttgtggtgcatgacgtcaacaatcccacaaacccacaagatcatgattgaaaagataagagcaccaggcccatgcatagaaaatagtgcggtcattactgcgatcgtgaatttcattctggttttctccgttgcgtttcgatggaataactatacccgcaattaagcgggtacgtttagcaattcgtgctattcattaaagttcgcctggaacacggcgcgagcgaatccgcgaggagtgatagagcgaagcatctttgttctttcagacttgccgcccaggaatttccacgcccaaaagaaatcgacgccttccacaccttccggcggtaataaacgtttcggctccacgaatccgttaccgtgccagatgcacgttttcttcgtgtaattgtcgcagtgcggcatttttgggtgccaaacttcctcatgcggcgcaacatacccgccgaagtcgcgagggtggaaataaaaatccggcttgcgccaaagcgtcgataatttgccaaccgggttttctaccatccaggggcaattatattggtcgcccaattgctcgatcatcttcgcatcatcggcggctgatagaacatcctgagtctgccgggcgtgcttaaccccgctatgcgctaacagcgtgcaggacgggaaagcgaaaataatgtcaggatccgggatgcccaggatcgtgcgcttcacgtcgaaatctttgtcaatccacatgttgacatactggattttggcatgctccatgcggattttgtactcgccgtggtcgccggaatcggcattgaagcaatacacatcgcaaccgcgaattgcccacggcagacccataatcccggaaccgtcaaacatgcaccacacaacgcgctttttcatcgtcacctcaccagaaagggatacattcgcggcaaccttcttcaccagtgcagccgcaactattttcttcttgctctgccagatcgtcacgcatcggcagactttcggcatccatatccatactgcccagggcatccgatagcgtcatttcctgattggctactttgatgcaatattcgcggttaagacccgcgtcctgggcggttaagaaacggtgccagtaggcatcgtcgtaattatcagccattgcttttcctccggttaaattctcgcaaactggcggcgcatgacttcgaacaggttttaccccagccacgtttaagatcagccgccttgaccttatagacggccccgcatcctggagcctcgcagcacttcatgctttccttcgccacaatgtgatccggtcgaccagtcagggagctatcgccgggattcttcgtcgaccagaacagttgcactttcgcgacctcctcgccgaattcattaacgaacatgtaaacgcccttgcttttcagaagcacggtgcaatgatgcatttcgccgttgacttccaggtatgcgcgatcgccttctttcattagcttctccacgactcaataaacatgctgttcgtttccagcgtcagcgtgacgccagccagcgaggatggaaccaggcgagcgcccggaaaggtgccgacaatatagcgaccattcgatttggtgatcgtgatctgagtaaagccggattcgcgattcatgcggagaacaacgcgaccgtgcgcatgcaggacagccaggatcgaatcagtctttggatggttcatgttttatttcctcgttttgttggtgtggggatagtatgccaccatcccccaatgatgttttagcaattcgtgctattcgggaacgcaggtcgtgtaatcctggcagatgtagattgtgcgctgagtgcgcggcgcggcatcctccaggctctgaatctcgatatcgttgctgtcgacccggcagggtgttgcaccgaagatgaaataccccgtctgcttgtcgttgatttgccacgccttgcttgcgggatccgtattgacgacaaacggcgtatcgtcggctttgaagtcttcagggtgacgcccgtaatagtggatgattgcagccgttgccgctgccttaaacttttccgtcacgtcacgcgctgcgatatcacgcgagatctggatatcaacatccggcgcgccaaccatgtaggaaaagctatttgaaatggtaagtgttctcatttagattttaacctcgtttcggtggatgaagtcggcgacgtaatggcactcgatcgggttttcgatcccggcgagaacctcacagcgcccgttgttcagtaactggcagtgctggcaatccacaccgccaacattggctatgacgatggcgatcccgttgcatgaaccgccgaacattcggtgagggaaggggtaagcctcgcaggtgcaaaccacctccccggccctccgctttctcatgcgctccccttctcgatgcagaaaacccaatcgcgagcatcaaccgcgaagcgcgccacgccgtcgagcacgatgaaaacggtctgcccgttaacacctcgccccttctcgatatcggtgacggtgcggaacaggtcgcttgcgccatattgaattttgtcaccgattacgacgtcgccaaatgctttcatgttgattctcctgattggtttcgatggggtaatgataccaggcctcgcggcccggtgtttagcaattcgtgcttatttgatgccttgagcaattttatccattttgcggaaccaaattgccagttcttcgagcatctcgaacaggtcagcttttttgctttccatgatggcatcacagatcaggttgatatcgcaagccatgactccgaggtattcaccgtaagcgcgtacacctgcaatgttagaagacttgctatcacggcggcatttctgcgctttgtaaatcaggctcatgattttggaagtttctttggtcaggatatgtacgttgctcatgatgttttcctttttgcttgcttcgtttcgatgaagtaataatagcaaaagcccacgcggggcttttaacaaaaagtgctatttacaccaggcggtaccgaacttcatcaccgtaaatcacggcctgaatgtgatcgccaaatgtgacggtcgcgcgagtggtttcgtactccgtatgaccgtatcgccatatccctcgctggggataatgcgccgcgctttcgtgccaaatgttcatagtgaactctccagactccccgaactccaggcactggcctaccatcgctttgacggcctggtagtcatgccaacgctgagtagcacggtcggtaacgcgctccacatgcttgcgctctttgtgctccgccgcagcctcaaccacggcccacttactacgggtaaatattctcatttgcattttcctcaaagtcggcgcggaattgcgcagcgcccttaaaatggaaccagtcacggtggcatcgtctccgttaatagccctacttcacctcgaaaacgattccgtcgcaaacgcacatatcaaccagaaattcagttgcagcgctgaacgtccattcgtcagatcccggcgtgcgcttcctgatcacgccgtcctcgttcttcatccattgcacgccagattgacggctttcatatgcaacaccagttttcatgattattcctcaacggtgaatttaatcggttctttccctgtcgccttgcgatgggagttgaccagcgtttcgaacttgccgatgcactcacgcaaatctgtgaacgtgctggcgctccccatgacacgccatgattctacattctgcccgcgaacatagttgatgacgtgcttcatgattttgtactggtcgccatcctttttggtgtacacgtgcagcactgcgatcctggttgatttgtaggcgaatgctttggtgatgtatttgcaagtttgcatcgtgttcgctcctgactggttgatgtgatgactatacccgatcccaccagcacgtttttgattatttgtgctattcctccgattgtcgattattccaccgattcggaatagtggaataggctgtgattgcatctgattacctggtgattacttttgacgattcatgattgattgtgattgtttcattctgtgcaatgggatgatggagtgtttcatgatgtgcaacgaattgcatagatgcatgcactatgcacataatttgccgttcgaatcctgccaaaacggttgccagttcacagtaacctaatccagttcacgcgcagttcagtaagataatcttacgtaaaggttgatcaaaaagtgcgcagcataagcacataaatatacatataagtatatgataaacttaatattattattattattctattattctctctatctgaatattccagttcacgtaagatagtaaggagatgcgctaccattttcgcttgcgacagcctccaaaaaattcagtgttccgcgccgccagggtatataggagggtaggggtatatcttactttcttacgcaaactgacttgacgccttgatacgcctggcttagtatgcttactgaattgtaacgtaagtggagagaattacagtgaacaaaagcgaaactgaacaaaaatgggagtttgaacaggtcgatcccgaagtgtggatgacctatccgccggataaacaggccgcttatcatgcctggctcgctggcgatatcttcggcgatgatgatgaaccggagccggagcgcgagcggaaacaggtcggcggtaagcgggaagggccaaccatccaaagcctgattgagcaggattttattgatggcggtctatccggtaaggtcgacgtcgaggcgttcagcgccacgcatggcaagcagatcacatcgcacgccatccggtcggcactgaagcatcacatcggcaaacatggcaagttcagaaccaggacgcgcgacggcgtgatcgaatactggatcgaacgcgatgaatcggcgattagcagcgatgagcaaatccaggcagaccgggaacgggttatcggaatcatccacgcgctgaccggaaacgatcttgatgtgcgtatcgaaccaatcacggcccgcgtgcttatccaggctatcaaactgaacgtcaaagcaggagatatcaagtgaaactctatcaagaccagtccgacccggcggcaccaatgcgcctgtgaagcgagccagtaagcgagcaggacgttatcgacgcggtaatcaatgcatcacaggccgaaaatatgagcgccttagaatgcgttacaggtgacttgcttttgatgtcatttcttccagattctgagtcatacatccagcacgttaccgaaacgggccaggcagtgacgcgaccggagttcatcggagcaccaaacgtgcttcagatgatgcttgacagcgccgacaatatcgttagcctggactatccatcatgattacgattatcagctacgtgattatagggattgtggttggattgctcgccgcagcagccatcattgcaatgtcgatgaaatagcactttttggtaaaacccggtcagagggatcgggcattatcaccacatcaacaacgaaaggagcatcaaccatgccacgatttaacagaacgcttcagcttcgcaacttcgctgggcttcagatcccgaaggagtcgacgaaggcagtgccgggccgtgaattcggcgtgtacttccactggcagggcaaatggcgctttaccgtcattcgcggcttttacgtcacctgcgacggcgttgacattgacgaccacagcggcgggaaccaggttcacaacttcaaatagcactttttgttaaaacacgatcggggtggcttgctatagttaccccatcgaaacgaacaacggagcaccacaatgaaatctcgcgaatacctcaacacccttaatggcctgatttactggctggaagatgaagcagtgatgatgcgcaagcgcgaaggtacgatctcgaagaagtcgaacatgacggctgaaatcttcttcgcgatggtctgcaacgatacactgattctggttgagccggagccggagcaaaagagcatgaccatgaacgaattcactaacttcctggctggcatcgacaaaagcaccacgaccgcaaccgcacaggcggcaatccagggcggggccacccacattgccatcgacggtaacggcgacgtcttcgcattcaagatgcgcccgcgccactgcctgccggatgacggcgacgcgaatgactacctgggcgaatggcttcgcgggtcggagcagtacggccacattgcgcgaacagtctgcttcctgggcaacactggccgcgagcatcgcaactggcgggaactctgcttccagatcccacggcaatagcactttttgttaaaacgcagtcggggtgatgcgctatcattaccccatcgaaacagaggagcataaacatgatcggcaaccaaaacaacccactcaatgcagcctttcaccgtcgcgcggtcgaacaacacttccacgcgctgaaggtggtgtgcaacgagatgaatcttatgcttgacctgccgtcatgggatgcgcaactggaagattactatgatggcctgcgcgctaaacgggatggcatcattacccgcctgcgcctggctggtatgttcttataggagaaacaaaaatgcaacaattcgaatctcgcggcaagacctacaacctgccggacactgctacccacgccgcacctggcgcatgcgtcggcctgtactttaaggatggcgatagctggtacttcatgggtgatgtgattggggacgtcccgccgaagaaatgcggcttgctcctgggcttctacgatcacgacgtggtggagttgaagccaaagcgcgtaccgttcgccttctggaataaaatcaaaggggcgctgttcaaatgagcgacccgaaactgcaaacggtatgctaccgcgattcggatggcgatgaattggtcgtgtcgccgttcagtggtggcgctgctggcgtagaacttatggcgacccacgatagcggttgctgcgtatttgacgacccgaaggtaatccgtgatctggctaatcagttgctggccgtcgccgatgccgtcgagaacgcacaaggagcggaagaatgaaccagttcgaatatatgcatcgcgcacataaagcgcttgccatgttagcctttcacctgaatatgaaagttatatccgtgaccattaaggtcgggagcattgagatctgcggattcgtgggcaattactcattcaccagaacttacacgttctcatcgctcgcctccctggagagtcaggcttatggcttctaaacgcaaattcaggatcgtgcgcgtggcgacgtttgacgccttcgggcgtccggcggagtggtatgcagcgcaacggcgtgttgccttcttctggtgggtgacggtcgagcacttcggccagttgacgcaggccagctactggctacacaaatccggcgcacccaatcgaccggagcgcgtaatcaaggtgattgaatagcacgaattgctaaaactcgatcggggtaggctggtatagttaccccacaccaacaaacgaggcagtcaccatgaaattacgttgcaccgattccaacactatcaactacacccctggctttgagtacagcgcggagctgggcgttaccgtccgcacccctcatggctcgatcggctgcgatgtggttcatggtaacaatacctggttctttttcaacaaatcaaccctcaccgccgaacgccgtaatggttcggttgtggcaacctttaaggtgatcgaataatgaccaacgaaatcaaatcaggcggcaaggttattgccaccatcacgcagcgccaggcgatcgcgtttcagttacatatcccaggcgctgaagaacccatctacgtaccagcctgggccaacacggttgccattgatgaagatggcgcgatttgggcttatgagtcgatggccgaagatgtgcgcatcgtctgcgaggagcataaggcctggagcgattggggcaaggtcgaagcgaacatgcaggaaatcggagaaatgccctgcgtccctgactggacagaagcgaaaatcgaccttcgcgccatgaaatagcacttttcggtaaatgcccggtcaacggatcgggcataatcatcccacaccaacaacggagatttaccatgaaacactttatcaaaaacgcagtcgtcgccatcgtcggcaccaacttcgaaggaaagaaaagccgcattcaccttttgcactttggaaatgatggcgaaatgcgcggagctttctattacggcgagcgcggggatcgccttcacagtgacgcgtattctgttcgccagttaacagttttccgagaatgccgaactcatcaagagtgggatgctgaatacctctgcgaagggctggtggtcgaatcgttcgttgccgatccggttaagctgacctcgcgcgactataagcgcatggcccgtaaggcgcacaaactcatgaagcgcacgccgaaaagccacgtgtggcacatcttcgccaaccaactgtgagatctgacgcgatggaaaccgtaacagtaatttgcactcatgctggctacgggccactggccccgctgttcaccgttggcaaggagtatcaagccagcttcggccccggcctggatgaagtctggattttgcaggacgacaagaaaacaacggagttgggcgaaaactggctggcgtgccgcatgccggatgagaagatcgcaatgtttcttaaccgaccatatgaaaacaacgttttatttgaggtgaaactatgagcaagaaaatgattgcactgtattgggttcttttcttgggtggcctggtggttgccaaagaggacggctggcaaatgatcggaatgatgatggttatcatcggggtaagtcgcctctctgagattaacggcttccgccgtggtcgccgggccgcattcactggcgaaaaagaatagcactttttgttaaacctgccgtaacgtcatttggtaaagtggcgttactgaagtgaaacaatccaatcaggagcaacgcaatgaacgataatttaatcgcactgctggaagagctgaattcctacggctgcgcatacatcgagctttcgagcgaacacgttatcgaagtcatgattgacgatgacgccgggttcaccaagttaagggtggctaccggggccgaagaggaattcgaagactgcggcatccgtgaagtaaccaaccttctcgaagttcaccaggtgaaggagatccgctaatgaacaccgtcaaacttatggttgtcaatgcggcccgcgaacgtgagcgccagctaatcggctgtgtattcgatgccgtcgaggtgcacgaaccactaggtacggtgcacgtaatcaagggcggataccttaacgaatttatcgtcaatccgctggatactgacgaagatttgaccatccgtgttggtggcgagccggaaaacgcgcttttccatctgcggaaagtatcgaaggcgtcgcagcgcaagttgctggttcgtgcactgaagcgcatagcgaagcagcgcggctacaccgatgcatacatccgcaagttcggcacgttcgcgggcgcaggcgattgggcgcggtcatgggccgactattatttcaacaaatccggcgaattttgttccacccatacggactggctgcatggaacggaacacgatcccgtaaacggccacgagtggtacgaattcattgaggcggaattagacgccctatagcacgaattgctaaaaccgccgtccggggatggtgcatactatccccacaccaaccaaagaggaaaaatcatgagcacctacaaattcatccttaccccgaacgccgattcccccgctggcgtgggcgcgaaattcaccaaaggcaagcgctatgatgccgagcatttcaccaactacaatggtgcgtcgctgtacaaaatcaccgacgacgaaggcaacatgtacgcggtaaacccgcgcaactcgcactacatcggcggcggtcagttcagcatcgagttgcaaatcaacaactgtttcgctggcggcgaactatccttcggagggttagttagcgatgcgctgaaataccccttccacacttcggcgtcaatgttcggcggcgtaacctccactgagtcgccaatgttctttgccgacctgaaggcccacgaacgcgacagagatcgggatctggaatccctggccgaccgcgtgctgaacatgttcgggcgggatgagtcgcggggcgttgtgcgtggatttaagatcggcgctgaaaaatccgcgcacttcaaagagggcgtgaagtcggcaagcgatgcggttgcagacctgggcatgctgtcacggtcggttatcgtcgggagcgcgaaagaagcctcgctcgctgaccgggttaaagagcttgaatcagaactcaacgccgcccacaacacgatcgagaaaatccgcgaagccatgcgcacgccggaaggtgaagacgcgcagacccatgcgaaagttctccgccagatggccgacgccctggttagtttgtggcgcgacggcaaatagcactttttgctaaaacttccgcaaggccatttgatatagtggccttattgaagcgaaccaatcaggagctaaacaaatgagcattccgtatccgaccaaagacaaatcattcctgggcctggccgttgttgagattatcaacccggacgtgaccaactcaccggatgagcctacccttgcacagtgggccggattcaaagcaggtgatcgactgaccgtcgaatgctatagcgacggcgagaagtgggcgcaggtggggcgagactaccacaccgaagaattcggccaggtactccctaccgactggttcaaacttaacaaaggtgaatacaaggtgatcgaagaatgaacaacaaaatttgggtgctaacctatactatcgggactaacgaggggcgcaaatcgcgccgcctcacctgcgacacgaaagcgcaggcggaaatgcagcagcgcgtgctgggcggcgaggtggtcgaatacatccgccagccggaatccttccaggtcaattggcctgagaagatggacgttgacgccgtgctgcatgaagtgcgccagatgcaaaacgacccggcggcgtggaaagacctgtacctttgcggcgacactgagtcagtccgtgatcccttccgctttgttcggcaggcgcacgcggaatggtctgatcgccagttcggcaacgttggcccggtcggcccgctgaaacacctggctaaagaggccaacgaagccgctgaagcgccggatgacattagcgagttcgccgatatcatcatgctggtgtgggacgcgacccgccgcgccggaatcaccgatgagcagttggcaatggcggtggcggaaaagctggagcggaacaaacgtcgccagtggggagccgttaaagatggcgagccgtgccaccacttgaaaaattaacgaattcgtataccatttaaagcgcctgtaagcgattctggcgggcgcaaattttactaaggtgattctatgtctgagttctcaaaagtcgaagatatgccgattggcgcaacggtaacgggtatccagatgagtgagtcggtcgatacgattactccgctggcatttccggttacacaggttgaaacagacagcaagaaaggtttcatcttcatctacaaaaatttcaacgcccctctgcgtgtcgagatcttcattgctcgcggaacatgggtcgaatgggagaaggcttaaatgttcggactgaatgaggcgcagtacaacgccgtgaagcgcgtggctaaacgaatgacggcggaaactaaagacgccatacggaaagacaaaaagacttacgatcaggttgccgcccggatgatcgataagcattgggccgaagtcaacacgctgttaactcgcggtcagtttatctggctggctggctatctcgaaggtcgtttcggtcgccgtgatggagagtatgagtaaaaaataagcgaacgaatcaaccgcctattgacgcattcacgctgaccgggtatcgttaaagcgtagacacaagaggcggtaaacatccgcaagtctcgccccgcttcggggcatttattggagggtaatgatgcagtacaaggtcatactcacagcaaggaaaatgggcggcttttgcaagtcctgcattcaagagttcagcatgacgattgaagcgaacgataccgccgacgcggtggagaaagcaaagaagcgttcaggcgtcaacctggatacgcataaaatcaacatcaactacataagggaagtcaatcaatgttaactctgattattgcattgttaatgctgttcataggctatcacgttggcgcggctcatcttgtcgagcgcctttcaaagcgggtacatgaa

SEQ ID NO: 8 - DNA, 48360 bp, unidentified
  source 1..48360: mol_type = genomic DNA
atatggaagatatcgacggccctgttaccccacgaccgaagcacgatccccatatcgttaaaaatatcggatgccgtcgtctttaacgccttccaagcctgcccgacattgtcagtcctctcgatcacctcatcggcgcgcttgttcatggcagcggagtagatatccagcgcctccgctgctgcggcctgctcgcctttctccttctgcgtttgaatgaggtgcttcatctgcgcctcagtcatgaagccatattgctcgttgaggttggcgattgacttgatcggattcttcaccagcgagtcgaagtccttcatcacgtcgctggcatccattccggcgtctgacaacttcgacgtggagatcgcgatcttctccatcatttcagcagtaagcccgcctttgttgttcagctcgatcaggcggtcggtgatgctgctaatgctgtcgccagtcacctgctgaatgcgaacggctgcctggttcagctgatcggcagacttgaagcctgcgccacccatgagcgtcaccgacgccgtgagcctgtcggcctggtctgcgctggtgtaggcggcataccccatcgcggcaatggcagcggtagcgccagccagcccaaggaatgacggtgagatgaactgtttaagagcctggaaggtatttttcagaccgccgaacgagtctttgatttgcccgccctgctggatcatgatcaggaatggattctgaccacctgccagctgggtgacgatatcagtcatctgtgccggtagcatccccatggccgcgcgatattgcccggtcgtgatggttagcccctgctgtagcgtcttctgcttctcagacgtgacattcagcccgcgcatggccgcatccgcgcgatcaatgatcccggcgcggttggcgagaattgcgttgtattcctccgcctccttcgcaccaagaaggccgttagcctgcgcctttgccagcgcttcctgctgctgcgccaggtcgcgcaattgcgttcttgtcggccggatacggtcgagtaagttctgtagctcctggttttggcggtacagaccaacggccgcatcaccagcggcctcctgtgtctgcttcgcctcgttgttgaagttatcgaccgccccggcggccgcgtccgccgacggcttgatctcgtcgaacttatcccctaatccatcggccgcccggccagcgttctgcgctgcgtcgacaaggtcgttaagtgacctggcccccgcattaaccccgctggcgtcgacgtcgacaattaggcgttcggtgttgtcgctcatgctgcctttactccttcctcatgagaacattgatcgcgaccgcttccatgacggagatatcatccataagcaggcggtcaaacttaacgccgtacagctccgccatagtcgggatcacgttgtagtcgaggccgattaaaccgcccggccccgtgcgccattgagtgtctatccgctgataaaaacaaaagctatcaacgatctccgctgatagctcaacttctggacggtaatcttccagttctcccccaaaattgtcgactaactgctgcggcggatcggggaaatacagaccctcaatcgcggcggttaaggcttttggcggagtctccacagctcggcctgatagcctacgctgatcgccgtaaacgccgttgggtagttgtcgaacagggtgatcaggttttcccgattaaactcgtgctgtaactcccacccggaggcgatctccatcacgaagtcagccatgatcggatattgcagaacgctatcttcgaccgtcgatagcttttgcgctttatattgttcgtccagagcctgcacgcgctttaccatctcgtcctgcttatctttcagctcggttagcggcatacgcttgaaggtgaatttaagcggagtgggtttttcctgccctacggtggtgatcaggatcggaagttcgaatgttccagccggtactaacttaaattttgcagccattttattgtctccagatatgaaaaaaggcggcctaagccgccccgataatagcacgctttacgcggcagggtagatgaccatctcgctaaccaggctcagaacaaggctgttagtttcgacgttgttcacctcggacgccgggatctcgttaaaggagacctggcaaccataaacgcgagtttcgcgcgcgcgcttgttgtagaacttgaacgcggtaacgtcctgcgtgcgatccagctgtttcagcacttcacgcaccggtaggctggcgtcgtgcgccatggtgaaggtctgcgttgccgccgacttgtaggtgttgatgttcaccgcccgctcatgctgaatagcctggaaggtggttgtctgctgctcgttacccgagttcgcaatggtcggggtaagcggcaggtcgatccacgactggatcttaaccatagttcccgctccgccgccttccgggtacatctcagtatcggaggtgtcgaccagctccagcgtgatcttgccagccgcagcggacttaacgcggcagaccagaccggacatattcacccagctggtgaacagctgaacgtaatcgcccgttgcgatgctggaatcttcggaagagatcgaggctacggcctcttttgcgttggtgatccccgttacggccacgcttgcgcccatggtctgcgcaatttgaagggtcgagccgttcgggatgttatacgaaagtttcgttgccatgtttagcctcttgcgttgttgatccggtagttcatggtcacagccacatgcagcccggcgtcgtcttcatagtcagccccgatctcggccggtgatgttagatacagctgctgattgtcgtcgccgatgctaacataatttccttcgtagaacatcgcttcattgaatgcctccaccagcgcgtcagcccggtcgtagatctccgccgtccctgtcaggcgcggggcgcgcaacatgacttgatagatcccgcgcttcgcaaggtctgactgctggaatcccatagagatggatggcgcggggatgtgctgcgggaatgcgaccaccgtgctcaccgcctgctcgttcatgtcgttgttggcgctattgcgccagatcagtgcaatgttattgttttgaccccatttcatggcgattaagtcaaattttgcctggatctgcgaagtgctgatcatactttttgagcctcagatgttgccgccgcgaatgcctcctcaaactggatgcaggagatcctcaccattccggcgggtgcctgccgggagtgaccctcatactccagtgggtagccatacggcgaattgttaacgaaatagatatgttctgccattccgacgcggaatcgctcgacggcgttcaccattttgttgatggttggcgtgccggacttgtcccgctcatccagccattcagtcggcaggaagtcgatcccgacctgccagttagcccggaaccggccgccaacgtaccccttgcccacagggttaacgccctgctcgttctggcgaaggcggggaatgcgcgggccgactggtccgacaggggaagagaaccgcgccggggccgccgtgatattcgcgcccggttttagtcggcgggtgccgcgcttggtcgtatagccgaaggtgtcgctttcacgcatagccgttcgtaagtcgctcatccggttacgctctctcacggcctgctgattgcggttccacaggtcagggttgccgacaggtgagcgctgaatgatcatggcgaaaaccttcatagccgccagctgaacgatctcttcgtggcgctccacgacgccgcccgcccacttctcgacgttagcggcgaatgttgccccgttgcgctttctcgccattacagccccttgatcctcagcttgtaaacgatgccgtagccgccgtccgggatcaccggcctgatctcggtgatgctatacgtgcgtgagccgccggagatggtcatattcatctttggcgtccactcctggccggtggtgtcagtccatgccatgacgatctgctgctcacccggcgggatggtcgccagcccccaaaatttgagatctacgccagtgatgacccccagcaccttacacaccactcccggcggcgtcacgatctccgcgccggtgttagggtcgcgcccgattccgcccggggtgttcacggtgataaccgcgccgaactccttaaacagcttgcgggcctccgcccgcatctcacggtatagcttattcattatccgcgctccagcttgatgttgcagccgcgcccgttgccgtcgagccagtggccgatcatgcccgtcatatatggcgcttcgaatccggcgttgtacaggctttgttcgctgtattccacgtcaatagccccatcgatccccacgcgctttttgaacgcgccagccgatgcggtgttgaactcggttccagagtcgacggcatcgcatacgacggtataaacgaagcggataacctccggcggggtgtcatagtcgagacagttgtagtcgtcacagatagtgcggggccaaatgtcaggttggccgggttccacctgctcacccttccacggtagagaccatgcccacaagttcgcctgtcgtagcgacacggaaagctcttcatcggtcatgccgacatagccgtttgcagccgcgaatgctttcaggtcttccagattgccaatcattttcatctccaaaagaaaaggggccgaagcccctttattaaatcacggcggattatgcaccaccagtgccagcgtcgccgccagtgctcggaagcacggtaggcgtcagcttcataatgatccccagggtctcgcggacgttgcgagttggaaccacaggatcggtggtgttgtccactggcttacggtcggtctcgcctttctcggcttcccaattctctttcttgaccaggtcggccatagtcggagttttcttaccttcggtttcggtgcggaaggccagggtcgggcgcatacctttaagggcgatgccatagttaaattcaccctgccaccagctttcaatgttctcaccgcccagcttggctgggtcagctgccattttcaggccggaggtggtgatctggatggcgtttgcagccaggccaacaatcgcagtatccggcgcgtaaatcgcttcgccgccggaggtggcagcggaaataccagcgcttgccgcgtcggacaccaggaaggaacgaccgaagccgtcggtgaagatcttcatgttgcccagctcgaacaccagcttcgcggacttgaccgcctcgcgtgcggagaacttcgcccactgcgtgccggacatgaaccaggtgcggatcaggtcagcctgatcgccgaagatggacgccgccagcgggaagtcttcgacagtcgggtacagctcgccagccttgttagtaacgttcgcgtcctgggtgtagatgccctggccgaaggattcaatcgccgctacgcccgcgcccatggcaacggtaatatagcgtttgatcatcgcttcggatgcgatggttgcgatctcagccgcagcgcggttaacgtcggtctcgatcaggcgcatttggccggaggtgatcgccaccgggcctaagcgacctgcggagttgatggaaccgcccaggatgcgagccagaaccttcggttcaactttggtgttaacgggtgcgtgctcgttgcgatcctggaccagaccatcaatgataccgatggtcattttctccatggtctccttgatgacctcgccgctgccgatggtcatggtgccgccggacgccgcattgaacacgttcagattttcggtgagaagctgaacggtagtaccgatcagttttcgctggaagatagtaaagctcatcgcgcgatatcctttgagtgattaaacgtctggatgataactgctgactaccggacaagcaagaaaaagcccggcagtgccgggccttgtgcttactcgccagcgtcaatacttgcggcgatctgttcagcgcgtgacagctgcttgccgcgcacatcgtcaacgcttgccgacggcgacggggtcggggtcggggtaggtgcatgatgacggccggtgccggaggatgcaggcgcaacgcagaccggtttataggtcgggttctcacggaactcgccgatcaggtcgttaaccgacatggccgacggcttgccgtctttgagcacgcgggcgatgaactcgccgccatcctcgccaccttcaacggcgattcgctgctgcaacgccggtttgaacagcgcggcatattccttaccgccaagctctgcggccagcttgtcgatctgcgcgttaaggaagtcatcgcggcgctgcttgccgaagccctcgatcttgccgttcagctcggcgatctggcgcttgtagtcttcctcaatggttttgaagtcgccgttctttttcgccagctcaagcgcggcctgtcgtgccttctcagcttcggcggccttctccgcgtcgatagtgcccaggcgcgcctgcatgtcagcgatctgctgctgcatggcttcggtgtcaggcatcccttcaatgttcagcacatagttgccggtggtgcctgcggccttgtatgcggcctgctgttctggcggaagggcgtcgaatgcttctttgttaatcaggtatttccacatgtgttattcctcggttgttaacgccacgatgttagtcgtcgtcagggatgcggtcaagcgcccggagttgggcaagtgttaaatactcccccttgtcgctgaacaggtcaggcggggagatcttgccgtcgcggattagctgggcacgctccacgccgaacacttgcgttaatgtgctcatcggctggcgttctacccagcttgaataatccatgtagatcggcacctgcccgttcatgctggcgcgcgatgcacccttgatcttgactcccggaatcccgagttcctcccagctcttgaagacgaaggtggacgtgctgcggcaattgaagtgcaagcgccccggcccggccccgtatggcacgctatgcccgataggggtatgcttcttatcccgcatgtacagcagttgatcgcggataatgcacagcttggaagtcttattgtccagcgtcgatagccactgttcggacttgatgagcggtgcattcgcctccccgatcttgtccctggcctcagccgctacgtgagacacggcgctacgggtcacgtttgcaaggttgcgctcgctggtgccaatcaccccatccttgtagcctgctgctgcgctgccgcgcacccggcgagtgatctggtcatacgtctcgccctgtaggatgccctgctgaacagcgcggccgatggcatcggttagcccgtcaccaagcagcgacgggatatcacgcagcaggacaccctggaacgggcggctgttcgccgctgcccatacctgcgtctccgggatctccaccagtccgcctacgaagttcagcaccggcttagggatgatctccctccagatctgatactgatacgccagctcgccattgctcaacgcctcaaggtcggcttttagctggccgtaaatgcttttgtagatccgctggatggtcgggttaatggcggccttgatcgcctccagccgcttaaccgtgtagttgtctgcggttatgcgtgactcttccagtgcatacggcaggcgaccgacaacgtctaccgccatgcggcggagtagttgggtcatccggcgagcctgcccctcgccgtagcggaataggtaaaggcggtgtctcaccgcctccgacgccatccgcgagttaacggacgccattaatcagtctccttgttggtgcgcttcttccgtggtgcgctggccttcttcttggagatgggctgatcctgctcgggatcttcgtcttcgtcctgctggtcgtccgggttgtcaagcccctgctgcgcctgccgtgctgcggcgttaaagatcagctgggtatcctcagcgctatctctcagctcctgctcgacgtcttccagatcggcgtcgttcgggatcaggccaatgcgctgctgccacgccaggaagtcgatcatgcgcatcatgccggactgcacagccgccatgtaggaggtcagctcggacgggttcagaacgacgtcttcatatcgcttgttgatatggacgtttccaccagttgcgccggtgaatgcagcgataaattccatcgcctggttaaatgccgcctcgacgttgccgacgcactgcgaaaggatcgagttgtcggttttctcatccgccccggcctgggtggcggtcttcgtcgccccgttgcgctccaccagcttcgcacccagcatagccagctgcttctctcgcttctccagcagcgccgacgccggggtattcggtggtgctacgaccatgctggcgctcggcgtgccggttcccatggattgcaggatgatcgcctcatcaccgcctaccttgatgttcgggttgtccttcttgaagttctgcggaaccccggcgataacgaaggtcggctggccgcagataaacgagctgtcggtgttgtcagcgtcggcgttgtagtgcgcgatgttggtgttggcaatgtccgacagcggggccgggtcgatctcgctgtcgttgcgttcgctgccgaaccagcagaacggcagatagtcgagatgttttccgcgcgccttgatggggcgtagctgcggctcttcccggttcatgtcaccgccctggccttgcatcaccgaagcgggcaggccgccagccccctgtaattcgtcagtccatagtcgtgagtaggcgcggccatcgatcagtcgaagctcaaggtagcggacgacctggtaatgctcgaagccgtcatagtcgacgtcgtccaggtagcgcaggacgatcagagtgtatttgcctttgctcttgcgccagttgatgatctgccggtggtcgaacatgcggacagtcgcccggccgctgttcgccagagtcgtcacctgcccggagtcctccggcgcgtcatagtccaccagcaggccgccacgaccgaaggtgatgttctgcgatacgcacattcgcaccagctgatccatgtccagcccttcgccgtcgatatcggtcgacaggtattcgacaccggcgggaagggtgtaggtagcaggcttggcaaaggcgatgccaaccatgcccatctgtgtgcggtaggtggcgtttaggaagtgggcgcggcgcttgtaagcgttgtagcgcttcatcgtccacgcttccggtttcgggaggtacaggacaccggcgcgcttgatgacagattgcccagcaatgcaatcctcgattgtccggtattcctgggtaaaccgcttgtaaagcgggtgttcggtagataccgttcccgcctgcggcaatgttgagatcgtcatactatcgcacccattcaatgttattagccgtgatcgtgccattatgcacgacagggaacttatagaccaccggataggtgccagcgtcgttcatgtgatccttcccgccttccttgtccggcttgcccttgtcatcgtagatctgctgctccagacattcgacaaattgcggacagcgcttactgctcacgaacagccgacggcggccgctggcgttgcagaacagggtgttcgcgctgatcaccctatctttcaccgcggggttggcctgcccacagtacacgtcaaaccctgcgctcatgagcatcgacaggtctgacatgctggcgttcttgctgctggtgttgccaccggacgcatccgggtagatctcgatggggtggatgtacccattgcccgcgttctggtacttctccacaagccaggcgatgacgtcgggagtgtcgatcccgttgtggcgttcatccacagcgtggagttcggccagcccatcctcgccatagcgctcgacgtagacgacggtcgccatcttgttaacgttgaagtcctggccgacgatcagcgtctcgcccgggatgatctccacgtctgtgtcattcagctcgcgcttgaagttcttatagaccgtgcccgatttcaggttgacgaactggcccttcgcgtaggcttcgaagcgctgcgggtcgtagctggcgcgcagggcgtccaggtagtcaacgggcaggaatgggttggatgaggtggcggcctggatcatgagataaccggcctttcggctgcgctccttgtccttcgcccagcggccatacaggaagttgaatccctccggcgtacagtacgcgcttacgcggttgagcgggcgatcatccggcaggaagtcaaacggctggtagtcctttggcatttgtcggcagcggccgatggcggctcgccatactgccttcgcagcctctttcttgagggtatcgatctcatcgcaatggatgcggaatgcctcccacccaaccaggcgcgctgggttgtccattgagcgaaacaggaagtcaccgatcccgctgtgagaggtgaagatctccttgttccctacggtcttaaagcggatgcccagctcggacaggatctgctcgatacgagggacggcgatcagcttgcacaggtcgaaggtcggctccaggatggcgacggtaacatccgccccgccttccgcagcgtcgaggacagatgatacagccatcgtctgactcttgccggtgccgaagcctgccacaaatgccgggtgtttgcaggacagctgcaaaaaatcattttgtggcggcgttaaggttagatcgataaattgactggcgtcactctgaattgacataaaaaaagccccgttgttgtaacggggccatgatagcagcagtgagcctaagagagtacgcggatgaatccagcataacgggtggcgatgtgggcgacaccgaccaggaggaacacagccagggccagcttgatgatctggctcgcgggattacttctcatccgctccctatccattgcggccatatggatcgcaaccattgcgatagctgttaccagcgccaaccacacactcatcacgatccccatacagcagccctctgactcaacacttccagcagggtagcaaccggacacgctcggcggcaaccgtgcttatgcaggatcagaacaatccgaaggcttttaggaagcctgcggcgatgaacagccagcaggcgcagtgaaacacgtcgccagcgatgccgatggttcgcgccagcttgagcatacgcttgtcggtcttcgatgctccgatgttcagggccattgaccatcctttgcagcagaggaagcaggacaagcacagaacggcgctgatgattaggtagtaggtttccattggttggcctcattggcccccgtaggggccggtaggttgattatttgagtagctttttgatttcgttatgaatggattgtttgagcgcttcatccatcacggcctgaaccacttcgcggatggcggccttcatctcatcgctaaatgtcaccttgctggccttaacactgccgctcatcactaccgcgttctcgatcatggccccagctcgggcagcgacgccgcctacctttaccgtgccattcatgaccgcaggcccgtcggttttaatgctccaggtatcatggctttttggtttgctcgttgcgatcttgccagccaggtagccgttgttatagaacgccttctcgcggctggatacttctgccttgaccagttctaacagctccgaacagctggccttgtcggtgccggtgaactgcttcgcccactgcaaccatgagtcgcgctggtaggagatcgccctgatggctgaatcctgcccgtcaatgcgtgcctgccgcttcttcatcgcctcactgatcgcggtgcgctgcgcttcgacgcccatggatgacggactgccgataacgtctgtcgcccaatcgtgccagtcgttgagcatcccatacaggcgttgaatggtttcttcctggcgcttcaccgtatcgcggtcaacggctgtacctgctttcaggtcttcaaccaggcgctggtagttggcgatttccgactttgcgctgttcaggaggttgaatgcttcatcgcgctcaccttcgagtaccgcgatacgtttcaggaagttttcgcgctcggcctcgctatgggtgcgcatgttttcgtaaacgtcggccgactgcttcacttccccatctaagcggcgtttaaggtctgcgatctccagccttgcattacccagcttgctgcacagctcatcacgctggcgcaccacaccgtcgactgttttattgatgctctcattagccttgttcagcaaggcgatctcatctgctgcgttgcggttgagatgcaccacttcgtcgttctgcttttgcaggttggcgaccgatgtatgcagatcgtcaatgacccgctgcatattgcgaatgatcgcatccttatcggctacacagttcgtcgcttcttcaagctgccgcatggcctcagcaatgttgaactcaattcgctggcgcttctcttccggctttaagttgacgaccggcaggcttttaaattgatgttccagcatatccaggccgaatacttcccactcactaagtttcacgatcagctcctggcgagcttcatcgacctgctgctttgccctggacaggtcgtcgtagtcgttcagcgcctgcgttaacttcctggcctggtattcatgatccgccacgacggcaaacagtgagccagccttgattttgacgtgctgatcggctctcaggagtgcaatctcttttttgatctcgcgggagatctccagaccactaacgcagccggaatccaggaggccgcaggcgaggcgctcgctgactggcgcggctgctacggaggtgaaatttagtaccttggtcatgagtatttccttacgttaaaaaggccggtattagcccggccctatattcgttctgaattatatgctgtgtcaagcagtatttaccgccgttaatcatcaccccaatctacggcctcggcctcatccttcggcttctcctgctccttcgggcgctctgacacgattttcaagcgcaccggcttgttggcgtcaccggtaaccacgatctcggtgttgtcacggtagccgaagttcgctttcagcatgaaggtggcgaaagtgctgttcgtggcgaagccaatattcagaatcatctgctcgtaaagctcgcgcgcgtgcgtgtaagcgtcattgaactctttgtgttcagctctccaccgatggaacgtctgtttcgatacgccgatttcattacagaagttgatgatagacggcatgtacttcgggttgatgcgaatgttgctcttaccggctgtcgtgagtgtgtgctgaatgtagtcgtcgatatcgacgttgaagtaattcagcaacttctcgggcaagtcttccgtgtaacttgtcggcctgcctccaggattacgcggcgtcgtcaccttcaccttatcgctcatggtcttctcctttgttcagggactatcacccgtatgttaaaccaaaatcatggggggtaataataaaagcgcgacatacaaggagtcgcttttttattactcccctattgattggtctaaacgtgttttctttatttatgtaataaatatatataagcctattgtccgtagtccgtgaatttacaccttatatttcaaccgcttacgatttcgcggaaactcgcggaaaggggtgtttttgaacagtgaatcgttgtaaatcaatgagttagcatttttgggtgctgttcgcggacaatgaaggctatccgtgaacataaaaaactactgtatggtttacaggtgagcaaatattgtgcagcgataagtgcatgataacattgaataaaatgatggtgttacacaacgatatttacacctgtataagcactgcttagtttacaagttttcgcggaattttggcggaaaacgacctgctttctggtcaatgatgttgacagggtattatccgctgtgaataatggccggactcaccacaggagggacaaatgaccgaagacaataaagcgccgttgacccccgacgactggaaagcgttgttaggggatcaggacagacagcacgaagcggcggacatactcaatcagccaatgacccgcgaggaagaggaagaggcttactcccaggaaatggcggacatgcaagcctacttcgaccaggtggcgcgtgctgaggaagccagcgcacccgagccggtgatggcagaagacaccacgccatccgaaccagagcagccgaagccgaagaagaaagacgcaggccagcgccatcttgagctacagcgcatcgtccgcgaagagaacgagtcgcagaatcttggcatggacttgtcagcccagcgcgtggaggttgcgaagcgcctggccgaagagatcgagcaggggcttgttgaggatccagcgctcaaggactacgacccgggcgaatacgtgctgaacacttcgccggacttctacgacccggtgatcgaggggttgctgaaccgccgaaccatcaacgagatcaacggtgacgcaggcgcgggtaaaacgacgctgctggtgcaaatggcggttagccttgccatgggtcgcccgctgtttaactgcttccgggtatgcaatccgggcgtgagtgtcttctttaccgaagaccccgacagcgtcgagttgcaggttgccgcctggtcgctgcgcactggcgtcaatttgcgcgactggatcaaggtgtttaagcgcccagccgacctcatggaaccgggcaagctgaggatccagaagagccgggtgatgcagttcgccaacggccgcccggttaacctggtgatcttcgacagcaagatgttccacctggcggcggccaacaataacggcgtgagcatggacgaaaacagcaacaccgaccagcagttgatcaccacggccgggcaccgtttcgctgagtcgcttaattgcgccgggatcttcatcccccacgtcagcaagggcagtctgctatccggccagtacgaccttgagtctcgcggcgggtcggcagcgaagggcgcggtgtataagactttcagcctggtacgcgagaagacgcagaccggcaagggactgaacgcccgccagaaggaaacaggctatacgatcctgaacgtagggaagagccgacagggcggattgaaaggccggttcaagctgaaaggctttcaggtgtcggtgttcgcaaaggatatcgaagcgaagaagaaagcggtctatgagcgcaagttcgccccagggcaggaggtcgaccggccggactttatctatatcgacgacgcgagcaaggtgtggatcttcgaggatcgggtgtatgacatggacgcaggcacggaagatgagcatttcgagccggaagagaagcgccaggcacatttctacaccccattgcaggaagaggtctaccgctacgttcgcgcacagcagaacgggacggcacgctaccgggagatcatcgacgccatcaccggcaacgtgtaccgcgaggacggcgagccgtactcaaaagatgccgttcgcaaggccatagcgaagatgacggaattacagcacctgagcaaagaggttaaccccgacgccatccgcgatccgtattacacagtaagagacgcagtcccgccattgatgggaagctgtcgagaaaatcattaaggagaagaccatgagcctgatttgtcacgttaccagcattccagcaatgctcgaaaaagctggcggcagtatgcgcaagctgtcgtcgaagaccggcattaacacaatgacgatcctaaaattccgcgaggactacaactgtgaacggcacgccatcgtaaacggccgactcatgacctggcgtgagacgtcgtccgcagatttcaaagattttatcagagacgtgtaaatactattgactatattagacccctataatatatttatcgaacaggcagtaactaaccgataaaatttaaggggtctaaaatgtcaaaatcagctatcaaatctctgaaccgcgctaacgaaattctggcagtccttggtctggttgttaaagtcgacatgatcaacgatgccgatatccgtaaaaactggcgcaacgccgacgtgctggcctgcctgatcatcaactccgctgcaaacgccctgcaatctgagaacgcggaaaccttcgaagagaacatgttcgacgacatgcaggacgccatcgactgctacatccaggccaaccttgaaagctggaaccagaaagagtgggccgcgcgtgacgttaaagccgaactggcccgcctggctgagatggttaatggtcagctggcctacaatgcccgcgagaaagaccacgccgaagcgctgaaagtaaacgacatcgttgacggtgccgttatggtggctcgttgctactcccacaacgacaacctgtcacacatcggcattcagcgcgccgttgactgcgcccgccaggaactgcttgccctggaacgttacccggcccgcttcatcgttaagatgatggtcagcgtgcgccgcctggccggtgaggcgcgggagaaggcccggaaggaatacatcgagatgctgtcctgcccggcggtaacaggcatcgatcatgagctgccgttctgataaatactattgacactattagtcggtgcatatatagtatttatgcaccgaccaaatgaggaacagacaatgaacttagaacgcatcgccaccgaaaacactatcctgagcatcattaaagctatcggcgaaggcaagcgcactctgaaaagcatcgccgcagaatgccgcattttcgaagagcaatcccacgacgattacagcaaggccgctttcgcccgcctgtcagactgtaagaccagcgcggagttctggtcagttctgaaaaccatctaaccaatccggccccgcaaggggccagctggaggaaaacatgatcactattcaggccgctattgatatggcaactgaggaaggattcaccatcacgacagacagaaagattcgcggacttagcaggccgccaaagagcttgttctacgttaagcacaaaaagagcgggttcatccggcccgtaaaacaggcttattacggttctaagacgtgggaagtcgacggggaacgagggacgcgggcgcagatgatcgtcgaggccatgcgccagatcaaacgtgaacttaacgaggcatggggtgcatgatggacgccagaaagagaccaccgctatcaatgaaattctcgttttgggacgccgggcagcgcaagcacgaaggggccggcagtgtgacgctttgcgtccgaatgatcatgcgtgagatgccagcccgccagcgtgtcgcgtttctcctgtcgctgaacagctaccatcacgcgcttgccgctgccgaaggtaagccgctgccgctgaacctcacgttctcgcagtgggtcaacgcagacgaagaccgcaagataacgatgaaatgtgagcttacgcgctcaatcgcttacgccgcttggcttgccgcaggaggacgcccggaatgattgatcaggtcaaagagattgccacccgcgaagaagcccgggaacttggggcgcacatctgctcgatgatcctggacggtgcgaagttttccgtactggaagccgtcaacaataagacaaaggaaacgacctatcgtgtcctcgtcgagttcggccgcctgcgctgcattgcctacagccataaccgattcaaggcggcttacaccgattcgcgcaaccacgttacagaggtggacgcaaagacagcagccggggcgctgaaagcacttcgagtcgagctactcacgatcagcacggtctaccagcacggcgctgggatgattaaatagtattgacactattattatcagctaataatatgcagttcccggcatggggccgggactgaaaggagaaaatcatgagcttattaattatttggggtgttatggctttactggtcgggatcgtggctgaccgtcgcgggcgtagtgggcttggctgggcgctgctggcgctggtgttctccccgctgctggcgatccttttcctgctggtgatgcgcaacgttgccgcagacgaagagcgccgccgccaggaagagcgccgccaccttgaaacactggccgccattcgtggaagcaaggagtaagccatgaaacgcatcactgccattgccatcgccgccgctgctgtgctgggttgctcttatgtcggggaagcgggcgctgttagctgcgcggtcggcattaagaacatccagaaccagcgcaatctcgggatgtacgacagccttccgttcgacgcatcaatgagccagatcatgaaagacgcctgcaagctgggcaaccggtataagaccggcggaatgagccaggcggcctatgactcaatgcgtgccggtgtcctgcaagccgttgccagcaacgaacgcgccgacgacgtggcgaaagcgcaacttgtctccatcgtctccgaccttctcgacgtcgggtacttcggccaggtggtggatcgcaaatgagcaagataccggcattcccaacgaagctcgtagacgtcgaggacgtgaagcccgggcaatgggtatggcactatggccgctttattcgcgctgagttcatcgaccgcccgcaagttcgctgggacgacgtcggcaccctgaaaggcttctggcgtcgaatgaactacagcgaaatcaaccagtgcagcacgctgatccaccggttcagcctgagcttccttcgtgtgggaaacatggtcatgacccccgacttcataaacgtagaggacttttgcaaatgaaaaatattgagccagtttttgaacagcatttaccggcaacgtggacgctcggcgatgcgccggatcttgagcatgggcacgaaatggagttttgggttgttgtccgcctacgcaacggcgcgcgccttatccgccggttttggtatgtgaacttttacgacggcggatacaccgacgaagagctggaagcgtgggacggccgcaccgacagcggcggcgaaccgtttctttatgtcggctggtgccgtgaaggaatccaccccgagtttgaatcctactatgagccggtcggagaggttgagatcctggcctacgcgccggtgacgactccacgcgtaccatactttgaaggtgatgaatgattcagataacgaacggcccatttaaggcattcaattaccacggcatggtgatgaccgcaccatgctgggcgaagtggatcgcggtcgatatggatggcgcggtctacgtctacgacgcagaaccgttcatttgtggaagtaatgaatattggagtgtagaaggcaccccacatctgttatgttacgtcgaccttgaaggcgcagactggcgcaaaacattaatgcaatgctgaggaatgagatatgaccaccaagaagaaaaaaacagccgatgttaccgaccgcttcaccccgggcgacattctgcgattcagctatgaagtgagcgaaggcggccagccactgcgcggaagcaatatcccgggccgtggttcgctggtggagttcatcacctattcagagatcaacggcgtcgagacgataatcgcccgctggatctgcatggatgaaagcggagaaagctatatgccgaacgtgatcgagttcccgacgaacttcttcacccatcacggcgtcgcagatgagtcggcgctgactgccgctaacattgcgaccgtcaaccatgacctcgcgcgcgatggcgagacggcggcttatctcaatgctggcaaccaccaggaagagataggccctgatagcgcacaggaagcgctggacgccgcccaagttctggataaggtaaagggtcatcttgaggccagaggtcgccgctacggcgcggagaatgggaaagagcgccagtttgaccgcgtggccgacgcattcaatatcgtgcgcgcatccgccaaccgccagaacatgccactgaccgccctggacgtggtgacgctgcaagccattttaaagatctgccgcgcccagaccgacgaagacactgactcgttcgaagatctcgcagggtacgcggctatcggcgctgagatcgcgggcgggatgaagtgatggacgatttaaaactggcctgcatcattgcagatgagatcgcggactggttcgccaacgtggaagatatcacgatgagcatcggcggccccgagactgtcgaagatgcacagcgcgaactaacagaaagagtccttgccttgattgacatggacgcataacaagaaggggccagcggcccctttttttacaccttcgcgtttcggccaacggcctccgcatcctgccagctcataccctttgccagcgcctgccgcgccagcgcgcgacgaaccagaccgggaacaatcttccctttctgcttgcggaagaactccagctgtacgatcagctcatcccatcgcccctgcgtcaccagatcgtcaaagtcgccaactttcttgtccggccggatcggctcttcaccggcattgatcaccagatcaaccagcgcgtcgaaaataggttgggtgatggacttgtgcgcccactggttaacctttttctccgcataggcgacgtcatcccgcaggatagccagcgccgcctcgcgggtgatgttgatgcgcggagggttgcggccggtgtggccgaagccccaggtgtagatcccgtccttgcgctcttcttcggtggcgaagtatggcgcgcttcggaattgctcccatgctgcggtgaattgcagcccgttatcactcatcctcatttgttactcctttgttgcagtagtcggttgtattggacgttgcatcgctgcccggcgatgtagtatcgatcagcttcttctgccagctcgttacccgctcgcactgactgatagaacagctcggagagcagatcggcgagcgtggcggcatcaccgctaactccgacagcggcggcgtgttgtcttgcgatggtagtggcggctgtgagttgctggcgcaaccggtcagcagcataaacagcactagcagcgtcagcgcgtgcttcgttaatccggcgattcgtgtcccggtcatcttcttctttctcccgctggcgcttcacggccagctcacggtctaattgttccctgcgttcagcctcctttttcttcccagctgtaacgccgtcgttatatcttgcttcgccatactgcgaaaggacataagcgccgccctgccatagcagaaaggcggcaagcgccgccagcaggtaaatcttgagattgccgatcatttttttcctctcaagttcatggatggaaagtatttttcagagatcttgatcgccttatcgatcccgacatagcccagcaggcaggcaacaatccagccagcgtcccggtcggcgatccagcccatgccggggatcgagtcggcgatgatggtgatgataaaggtgataccctttgcaaacattgccgccatgatcgcgttagtccagacctgtcgcctgtcgtggcctaactggatatgccgcaatgtagccatgacggccgcagccaatgggtagtctagatcggtcttatacatccgataaatatcggtgatgccgtggaagaagtcgcccaaaagaaaagcccccgtattattgatgggggccataatagactcaaaacatgtttagttgaaagcgtagcactcctgcccgtagcgattgcgcatcggtcgccagcgttccaccacctcaatcggagacacttgatggagtatccgacactccgccttcgccttgttgatatggacagcgaccagaatgatcgagtcaacgccgttggcaatatagctttccgcgttgtcctgccggatagtcggtagctgcttgccggtgccctcggtggacttcacctcgtagatgtgaatctgccggtggcgcactccgacgcgggataccgtcattatgtcaccttgaccaaatgcattgacggaaacgccggttcgcgcattaacacccatggggataacgatcctgttacgaccgtgaatgttatttaagtgcttcgctgctgcgatctcccctaacaggccgaccaaccgctttctgaactccacgttctgattccagttatagatcttctcttcgcgccccaggatgtaaacggcgttgtgaaactccgccgtgtcgatgtgaataacgttatgctttttcattttgtggtagggatcccgaagcgatagcacgcattataaaagccgctttccgtcaggttgtgcttctccaggatctgcgccttcgtcatgcggcggattgtcacgtcctcggtcacttcctgaatgcgtgagtcagtccagaacttcccattccgtgggcctatgtgcttgttctcacgatcaacgcctttcccaatcttgagatctcgcccctcgcttgctgcctttaaaatcgcctgtgctaatgtcatgatcttctccttctggaagccgggagagtgtcccggcgatgtattttgtaataacccttgtcactttgtcccggtgcatcctgcgcagcctgtcagctctcgacatgttgcgcgcccggtgacgctggtatgtcttccccactggtgttacctctcttctttatcccctttgtaccgcatagtaacaccagttttcgcccttatctctttgacctgctgttttgtgagcgtgacccctggcttaaccctaacgagacggcgaagcatccgttcatccgtcgccagcacgccacacccttttgccgatatcgccacgccatcaatagcgccgggaaacgccttcgacacggcggtaatgaactcgtcgaggccgcaatccttcgcggcctgccacacctgcgccttactgtgcatcgtccagcaatccgaggtcgcgtaacatctgatcctgatcgatgtaaagagtctcgacccctgcccgacgcttacgcccgcgcaagatgaagatcacggtgcctttgttgttctgcttgccagccttcccggtgccagcgtgctcgaatgccagccgcccggagtttttgccgttgctgacaatgttgataatggtgtatgcctgttccaccatattgcggaaccacactgtgctgttatcgttcggcagcaccaccgccagcaccgatcccggcttgatctcgcggctcttctccgtccatggcgtgatgttgtcatatggcgggttgaggaacatcgcatcaaactggctccaatcctgcgccaggctgttctcttccttgcaaaagtagaagtcgcatttcgtcgacttctcgcaggccgcaaggtcaacctcgaacgggccgaaggtgagatccagccacgcaaagacgtgttcaggggtacgccagttcgggcggacgttatccggggtcttgctgccgttgaaccggcggccggttactttctgagggagaacggcctgatagtgtccgccagtcgccagcgccttggttgcccacatgcgattgctgaacagttgccacggcgtaagtccctttgctgcggcttccgcgtgcagcgccgggttgtggtcttcgttgaatgcgtcgatagtaactttgtctgcttcgtctttcatttctcacccttaactgaaaatgtgcggtactcaatgcggctaatgtgaaacgtgttcccgttcagatacagcggcgcaaccttgcgaatggtcacgcgaatatctggcttcccttcacagctaatgatggccgggccgatctccggcatctcgacggtgatcatcctcgtctcttcgcgggatgcgaaaacgttgtaatcttccagcggcatgatgaatttattcatggtggttagcctcgaagacagccagagcgaagccgcgcggcgtggcgctgcggatgtttttggtgcgcgtgctcttcccgccgaccttgaccacccggttaaagtccttgcccaccggcataaccggcttcggttctggcatcacgaacgaatcgctacaccagatcccggttagcttggtataggcatcacggtcggggatgatccccgggtaatccgggtgcatctcttcactttccgggatgtatccgccatagtcgcaagggttgaaggtgtgatcgtaattgcgccacagcttcggaaggaatgagcgcgccgggttctcaagcatccaggggataggcccggtggaaaaatcactgttaacgatatggcagtaagcctccaccaactcgacgaacttcgccagcttgacagcgtcatccatatcccggcggcggttagggtatgccggatgcggtcggcgctcatcaatcggcagatccttgtcatcgggatggtacagccaacgcgcgccggtggtggttaggtatgtgcattccgcgaacgaggcgatgaacttcacaccaccgcctacgatcctggctacgtcgctggcgtgtacactggtagctgaggcgtcgaaccacatgccgacctcatacagcccaggttctggatttttcaccccatccggtagctggccgtcgaacgtccagcactcatagccagcttcaagccacggctgcaacatgtaccgcgagcggttaaacaggaatattgctttcttcacttctttgctcctttttccataatttgtaacagcgtttgcacaccaccacgttgtcgataacgtgccatctcccggaacgattgcccgagtggaagtatgtcccgcagccgaccatttttccgcgctcgctgcccttgatcatcttcccgcagcctgtcgccatagaatcagtcctcaccgaccagcaggttagccacactgcctacggtgatgaacagccgcttagagatgatcttcacgaagtgcttgccgctgaacgtcccggcaccggccttgtctgccttcatgatcaggatatggccgactttgcggtgagtgtttttgtgcgccgccgcctcgacaagtgccttcatcacggcgctgtcggtgtacacggaattaatcgtcaccgggtcgtcggtggcgtggtctgcgatgatgtgcgccaatgctggctgatcggcaacgataaccgggattcgcccgcgattaatggcttcgacgatctgctttgccatttctactgcggttttcggtgcaagtgtggtctgttctaacattttgcgtctcctttgttggtgtcaggggatattattctgtactaataccccgtgtcaactgtatttcacatgtgatatttccgcatcgtctcgatcaggtcgaacgcctcccaaaagcggcgatcataatccggcgcggcttgctgcttttggatgtacttctgcgaggccgtgggcttccggtcttcaaaccgtattctcggtgccttcgggaatgactcgcgggcctcgaccggcggacttgatagatcttcgtccggctcgactttgaggaagttcgccccgatctcattcagcgcagccgggaagtcgaggccggttgtctgcatgaaccaccacagcccaagatgtgagccgcactggttgcaaattgcagcaccgcgccccttcatggtgacgtcctgtttcgactcaccccaccggaaccggtcattccctccgcatagcgggcaaggttggtgcctgccgttgaatgcgcgcttgttccagtattgagatagaagtaactcccaatgccccaccatgaggcgctcgatctgttctaccggataaaacttcattggcgattcaatagccgcaggtagcgggcgttcagattagacatgatcccccaatcatatttcggatcgagcttacgcttgtgaagcatcggcccaaccttatcctcctgtaccgtaccgcgctgattgaacacgtaaagcccggcataatccggcaggatctcccgcgccttgtcggcgatagtccacggcaccaggaagtagaaccggttggctatcagttctccggcttccagacagtcatgtttcatcttcaccgggtaaggcttgtgtcgcccgctatcgtcaatccaatactgcttgtaatcttcgacggtcttggggtagaccgtgtgagccttgcggaagtccgcgcgcatgtcagcgatggagatcttcacctccacctccaccgtgtagcggctcttgcgtatgcagaacatgtccgcctcataacccaggttatccggggtgtagtagttcgggatcatgatctgaaacgagttacccatacagcgaatgaaggcccgttgcagcgcactctcggttatttctggatcgggttgcttgccgatattcatcattttaaaagtccttgtgttttggtattcgttgtgcagaatatatcaacgttattgacacgtcaacgaggcggcaaatggaaaagataaaaagcattaagcaaatgatcgaggaaacggacattgattcgctgcgcggccagcttcttaaaggtctgcgcggtatgccttatgagccttacccgttccagtacgcggcgcacttcgccacgtcgcaggcgattaacaattacagcaagatcggccccttcatcgtgaaggcggcagtgtcggcaggaaagaccaccctgatcagcctggtggcgcgccggttaacccaactgaacaagcccgcgctggtcatctcccgccagggcgggatcatcaaacagaacgccgtggaaatacggaactttggggtggagaacagcgtgttcagcgctggcctgcgcatgaagtccaccacctttcctatcatctgcgggagtgagaagacggtggtcaacgcccttgagaagcaactggctaacttcgtgccgcgcttcctgctgatcgatgaatgccagcacgtcaacgttgatgacattgtcgccagcgaattgacttgccagctggcggatgagaatccagaaaatgaactcttgcagtccaaggcagagcgcacattgcagcaaatggtcgccgccgggcgaaccggttacacgttgctgatccgcgaattgcagcgccgctgccgcgagatgcatggccgcgacttggtggttatcgggtataccggcacagactatcgcggggtgcagccgatcatcaatgaagacaccagcacgccgggattctggcgtcgcgcggtctgcgacatatccacggaatacctcgttgaagttggcgcggtggtgccgacccattacggggcgattgagggagatcttacttaccagctggattccttcgtcagccgtggcgaggaaggtgacgacgaatttagtgacgcagatctgatcgagatggagaggcagatcctttctcaagggacgttgacgcaaaacatcatgctcgacgtggtgaagagaacggcctcacgaaatgccgtcctcgttacctgcgccgggaagaagcactgtaaggaggctgccgccgccctcccgccaggggtgacttacgggatcattaccgacgacatatcacagaaagagcgtgatcggattctggaagatgcgtttaataaccgatgcaagttcatctttcaagtcgggtgccttaccaccggctacaacgtcccaccgtgggacactatcgttatcctgcgcaagatcggcagtctcacactgctggttcagctcatcgggcgcggaatgcggatcctgaaaaaataccacgtcgaagagctgggcatggtgaaagaggataacctggtgctcgactacggcggcgcgctggacgatctcgctgaactgtatttttcaccattccttgagcaataccgatatgagaccgacacaatcagcgggaaaacgcaggaatgcccctacggccatcttaacggcaagcacgctcgccggtgccgacatgtttatgatcatgatggcgtggaggccgacgggacggaataccggaaagatgaacggtgtagttattggttcgtctcgaagacctgcgaggacttcaagaatgatcgcggggtggtggtcaacaagggttgcggcgctgaaaacgacataacggcgcgatactgctcccactgcgggaatacgctgattgaccccaacaaaagccttgagagaaagagctatacccgagatgacttcgtggacgttcgctcgttcaatgttgagccgacgaagtgcggtaatggcgtggtcttccgttatgtcctcggcaatcctggtgagccggactttaccgcctatgaaatattttggccggatagcgacagtatgccagcaaaacaccagtggaaagcggcgcttgacaagcacgtcgcatcgccaaacaccagagggaagatgaagcgcggggtgaagacgaagatcctgccgtctgcgcacctgatagcagcgccgaagcgagtaacgcaccggcgcataggcgggaacaagtcccgagatgtgatagcccgtaaaattttcgaaggaggagacgacctgtgatcaaagaatacctgttcccgccagccaatcctgtaggcacgcttgaggatgaccacctggttaactttaaaacctggttcaatcactggtatccagacgtctactggttccatgtgccgaacgagaacggcggcaaggcgggaaagcagtattttctgcgccagcaggcgaaggggttgcgcaaaggggtggcggatatcgtgatcctgcatcgcggccgcaatggcgagccgttcggcgtgatcgagatgaaacgcgagaacaaaaagctgtcgacgccagtcagcaaagaacaggtcgaatgtctgtcagcagtatccgcacagggcggcttcgctgcggtggcgtatgggttcgactgcgcgaagctggcggtgattgacttcctcgggccgtcgcctattagcatcaaataaacttgactagcatattacacggacgtaatatgcccgaacaccacacaggaggccatcatgacatataaagaattgagagagttgttacacggcggaatacgccacgctgaccgcaaaacatttaaagcggcttacggtatgatgcgagcaataaagaaagtagtgctcgcatatagagagccgggaaacgatcttatcagggatgtgctatgggacgtgctattttgcgacgtacccactggaacagagttgatgctcggtcagattatattccgcgatcctgatgtgaaatacccggctattgagaataaaagcaaatggctattgaaagttaattgcaagggcgattcgcgccgctttgtaaggcaggaagatctagaacgaaaacttcgcttggatattgaaaaggggattatgtaatgtctgaaattaaatctcttaaagatgatgaagtcttattcttcactaataacgacctttccaacgaagattatcacgcggaaagcgatcacatgaacggctccggcttgtgggaactttattcgacctgcccggccaactggaagtttgcagaagacaagaaaaagcaatcccgcgcccttgtgttcgggactgcggctcacgctaaccaccttgaacctgagctattcgaaaaaacatattttcgtatgccggagaaagaggattttattaaacgcgatgataaaggcgagatcatcccacagcccaactttatcacctcgctggaagccgcaaaatctttcttaaaggctaacggggttgctggttattcgaaaatgaaagagccggaattaatagagaccgtcaccaatactgccgccgcgcttggtattaatgacgtcgttttctggcacgatatcgtaaataaggcaaacgaagagcgcggagaccgtgaaggcattcgcgggcaggattatgacattatccaggaaatgcgcgcggtgttattcaacaatgaagacttcaaggaatactttgttgatggtatgtcggaggtctcgatctttttcagctaccaggggttacgttgcaaggttcgcctcgactggatcagcaaacacgccgacatggtggactacaagaccaccgatagcgcaaatcctgagcgattccgccgcaagtgttttgaccttgggtatccgctgaaaatggcattgcagcgcgaagggtttaaagcagcatttggtcaaaagcctcgcagaacgatgttgttagcccaggagaaaagcagcccgttcgttgtcgctccttttgccatgtcgactaaaacgctgatgatcggttatgcacagctacgcgaggccattgctacgttcaaatggtgccgggacaataacacctggccgacatatggcggcggcaacgtccttgacctcgatccgccgttctacctcgagcagacgtaccgccacctatgggacgacgtcaagaccagaaaataattgattcgcggctaatatactgccatattagccccaaaccataaggagtaaataatatgaaattctctcaaccatgcggcgttattgttaagcagtttgcccacgcccaggatatgtgcgtatcgccgaagaagtccaagcagaatcagcacttaaaaaaccactatgcgaccctcggagacgtggccgccgctatcggcccggcaatggaagacgctggccttatcatgatccagtcaccgacgcatgagccgggacagcctgcgaacgttctgctgatggagacgcgcattatccacaccgacagcggcgaatggttgtcagacgtatgccagatcccgctcgctaaaacagattcgcaggggttcggctccgcgctgacttacgcccggcgctatgccagggtagcgatcttcggtctgaccatggacgacgacgacggcaacaagtcagtgcgcagcgccgcagactgccgcaaatcaatcgaagccgcgaaagacaaggatgaggtggacgccatctaccgcgccgcgtccgagctattccgttttgacaaggcgtcactgcgcatcgttgaggatgcccgcgcaaacaagatcgtcgagttgaagaatgcggaggctcgcccattcaatccaggtaagccagcgaatgcccgtcgcggtaaggcaaccgtccaggttgcacctgatgacgttcagccgcaagatgtaccgccgaaaccagagattgaagaagatttttaaggagtcattgacatggcaagccgtggagtaaacaaggtgatcctgctgggccgcattgggcaggatcctgaaattagatatatgcagtccggcggcgcggtcgctaacctcaccctcgccacgtcggaatcatggcgtgataagcagactggcgaacagaaagaaaacaccgagtggcatcgcattgtcatcttcgggaagctggcggagattgctggcgagtatgtgaagaaaggttcccagctttacgtcgaaggccagctaaaaacgcgcaaatggacagacagcagcggcgtcgagaagtggacgactgaggtcgtgcttaacggcccgggcgcggtgatgcagatggtgggcggtaagagtgacggaggccagcagggccagaacgcaggacagagtcagccgcgaactcattcaggccagggcaggcagcaaccgcaaggccagccgcaaggccagccacagcaggattttgatgacgatatcccgttttaaggtggaagcatgaaagttaaattgaagttaaacgagtaccgagaaaaagcaggcttgtcgcagcgagcgctcgcaaaagaggccggactggctcaatgccttgtctgccagtacaacaacggcaaagtgatgccgtccattgaaactatggttcgccttgctaaaccgcttggcatcaaatggcacgaactggtaatcattgaaggagaggaagaatgatcgtcaatatcaaacaagcactactcgccggtttcatcggcgtgatccttggcttcgtcgcgcaatctgcctttgcggcagaacgcgccgacaatagcaaccaaggcgttagccacattgagaaccaaacgaaagtttatgagaacacgacggccgggaaagagcgcgcagcgtggtcgtcaggcagggtgatcgaggtgggcgatagcgtcagctgttataatcctgcgttgaacagggtaaacggcgtgaaagtccgctgttcataacaagaaggggccgacggccccttttttcattcccctttcaattccctgatctgcgccttcaattcctgcaccgatgacacaaggtcagcaatgatcgccacatagtcgacgttcatcaccttgatacgctcgccgtcaatttcctgctcgacgtcctgataggtatagaccttgtctacggtctccgcctgctgcgcgataaaaccacgcctaacgcgcgtttctcccttcatccggtactcacatacccctaagcgctcaatgcgctctgaggcgttttcaggcgcttgcgtgaagtctgttttcaggcgcacgtcggaaccggtcgttaggacgtcacccttcggcgtggtgagcgtgccgccagcccggaagatccacgcgtcggttctcccgtagccgtcgaggtaagcgacgatccggtgttcggttcctaccagctcttcgatgtagtagttagccaccgcgccgcgcgcatcaccgtttgctccgcgaccctggatcatcgactggaacggtgcgccggtaataagttgcccaaccgggacgttatctggtgccaccgaccgggccatgagcgatccccatgcgtaaagatgccttttacacataaacgcaccttctagggtcagctcgccggacacttgctcgatcaggcgcgtggtgtaatccgcggtgctgttattgaaatgaaaatcaatgtatggcgtgctaaatgacagctccagcgcctgggaatacatctttccgctggccgcgttgtcaacgttccccttcgccgtcacatcaccaccagcggcaagcgctccggcaaccgtggttttcttatccgtgccaatggtcagaatatcctcgaccgtagaggccggtgagacggtggcggtgttagtgcgctggatcttaaacggcgtaccgctgccaaccgcgattgtcccgccctgcccatattttttaagcagcgcaagatctgagttcttgcccaggtagatcatggcgttgtcggccatacagttgacgttaccgttaatcttcatcccggcgctgaacgtctgtacagctgtaaagttattctccgccccgcgctgcgctgcggtgtccactgagccgatcaccttgttccatgagcgcacagtggcggtggtgccgtcctgcttcgtaattgtcacgtcaccgacgccgaagaagatctgatcttggttcgacaggtctgtgtagtatttgttaaacgcattgtgaatatcagccgcgagctgatcgctaatatttgccattcaatatcggcccccgcaggggccgcctccatgttacggcgtggacgaaccacgaattacgttgttattgcgcgctgcgaaagcgtcgaaccgcgaaaggatggttaaaaccatctggccgttgcggtcaaggtagcagccatagcgcaggattgcatcaccggtgcccgcagggacgacgaacgacatgttgtctatgttcatctcctcctgagcggtccgcaggcgagtagcgccaccggtttcataggcaagttccacaccgatctccatactgccgccaccagacgtagcgcctgtgccacgaagaagcattgcataagacagatagccaggattcaatccgccgtcagcccctggcgcgtatgacatccccgctctgagtctcgctccgccgtcgatggtgatgctatcggtctgcaatagcccgccgcgaatattgatcacctggtcgaagttctggcgacggaatcgggccaactcgaaccactgccaggtcgccttcggtactttgcgagtacggtgctgtgcgatgttgattgcgaaggaaccaatatcgccctcaatgcggttcgcgtacacagtgccgttgaaccagccgtcagtagcataaaccgcgccacgaacgacaacgttattgaactgcgagctaccatctttaccgatgcgccagccctgcgagccatccacgaagttgttggacttgatctcgttgccgatcttggcgttggtgatcgagccgtcgcggatcagcgcttcctgcatgtacgccacgccgttctgaacaacgaacgggtaggttttgtttgccccgccagtgtacacggcgaaggtgtcggccataaccaggaattgagaggatccgcttgcgtcgataccaagctgaatcccagcgatgcgcgggtttccgccgccggtgtcagtctgaacttttacgccccactgcgccgacaacttgccgttgatatccgctaccgccgtggaggtctgctgaacggtggcgctcatgccatccattgacgcgttgatcgtgtcgatctgctgcgccgttgcagactcaagatccactactgccttgttcgtctgcgtgatggccgcctggttgtcaccgatttgcgcgcgaagttgctggaagccgttagccatcgccagcccgttcgctgccgtcgtctcgttcaggccgtcaatcgccgactctgcatcgtcaacgcgggaagtgatgctattcagcgccgtggagttggcggtgatcttcccttccgcgttggtaacgcgggtagtcagctgagatacagccgacgcgctggccttcgtgtcgaccacgccggacaggtcggaaaggtcgctgttcagcttggtgatggcctgcccctgagtggtcagggtgttgccctgctgggtaacggtcgactgcaagctggtgatggcgttggcgttagccgtgatcttcccgttcgcggtgctgaggtcggacgtaagctgggtgatcgccgtaccctgcgacgtgatctttccttccgccgacgtgacgcgggtcgtcagattgttaatggccgtcgcgttcgctgcgttgttgatctcgtcggtgacgtcaacgaagaaaacatcgtcaaagtagacctcacctgccgacaggttccagttgatgctaaacaggatcgtcatgtcggatgacgggacatagtcctttgtcagcaacgtccagttggtgccgatattgctctgtgagaaattcagttctgacagcgggccagcgccggtgtcggcgttaccaaggcggaatttgttattccccacggtgttcgggccgattgccatgtcggccgtgcgcttcgcatagccgccgaagcgataggtctgacccttcttcacgttgagaatgttctgagagatcgacgcattgccgccagccttaccgcgcaggatatacgcgccggacttcggtgcttgcgctgcgtacacgtcagccagtgagttgaaaccagtccagttgtcggttccacgctcgaagccggtgttcgtcagcatgttgtccgggttagccgccagtgctaccgcgtcatttgtcaggctggatttcagctgagtaagagcattcgcctgcgccgcaatatctttcccgttctgcgtcacggtgctggtaagcgtgttcagcgcgtcgctgttagccttgatcgtcacttcttcggtaatgtcgtaaaccttgaaggagtcgatccagatctccgcgtttgacgggtggcagtagagaccaaaagccgccccatccacgccggacgcctggttgagatctgtttcccatgtcagcgtctgccagctggtcgtcagggtgttgtttttgtcggagtaagatccttcaacgccgccgttatagttccagcgacgcattaacaggttcatcgccccgcttacacccttcgcgcgcacaacatagcggtagcggcgctgcccgttctgcgggatcggctttttgttgttggcgaagatgcccggcgagttgccatcggtgcgaaccatgcgcacgcccaccttgccgtcgccatagtcgccgaaagtcaccttgctggcgttctgcacgttgtaggcggtgtcgccttgcaggaagtcgaagttctgaacgaggttttcaccggtgcggcggtacgcctcaagcccattcgtaagctgagtgatggccgtgccctggctatcgatcttgccttctgcggtggtgacgcgagactgcaacgcgtttaccgcgctggcgtcggccttctggctcaacgtgccattgatggtgttgatttcgccggttagcttggtgatcgagtcagcttgcgcggtgatcttgccttctgccgtgctcacgcggctggttaagccggagatggccgaagagttcgcgtctgcggtggtctgcgctgcgtgcgcgtcggtgacgtcggtaatcaccaggtcgtcgatgtacagacgataccccgggccgccggaggtgccgcgagtggagatccacagacggccgcgagtcttctgagagcctcccgcacttaacttgccggagaacttgacccatttaccacgtccgccgccagcggtcagcgctgcctcattgatggcaaaagctgtcggccatgctgcggttcctgctgcggtgcgaacgatcatcccgacgttacagccccagccatccggcggcgtctcgtcttccggcatcattgcccagcattcatagcgataaacggcgttttcgcggatggcggtctcataaccaaacatcttgtcggagttgccggtttcaccgtcagcacggcgacacttgagcgacttcgaaccgctgaatgcataatcagtcgtgactactgcgttagccccgctaattgcctgcccatctgcgtatgattcaaacgacccgtccacccatgggttgctattcgaatactgctgagttttgaggctgttcgacagattggtgatcgcgttgctctgcgacgtaatgtcgttgccctgctgagtaaccttcgtgttcagcgaggtgatcgcgtcagcgttccctttgatgttcgtctcgttggtgatatcgaccacatagacgtcgtcaaagtacatcacgccggacttgagcgccgtagttagctggaatgatgccgtggtgttttttggcgctgtccagtccatgaaaacgtgctgccagtcaccagtaaacggcccgtaattgacgcctgccagcagaccgctgctatccgcgaccctgaacttggtattcgccggatcttggatctcggtgcctgaatcctgttttgcgaagaccccgaagcggtagcgacgcccctgcgtaacttccacctcctggcccacgccagccgtcccgccgctcgccattcgtagcgacttgctgccactgtgcggcttgagaagggtaacgacggtagacagcgcattccacccggtgaatgccgcttgatcgcgctcaaacgaggcgttcgccagcaggttacccgggatcttgccttgggcatccatggccgactctgcgttgctgatgctgttagtaagctgggtgattgattggccctgcgatgcaatcttaccctccgcgctggatacgcgggttgtcagtgcgttaagcgcgatcgcatcggccttgctgttcactacgccggttagggtcgacagatcgctggttagcttggtgatcgcctgcccctgagatgtgatcttcccttctgcgttggtgacgcgggtagttagctggctgatcgccgtagcgttcgcgtcggccttgccttctgcgttcgctgctgcggtgacgtcgcgcacctgccagtcggttgcataccatacagtgccgaagtccgggcctgcctggttgatttgcaggaacgggcggaaatagcctttcgctgcgtgcgtggcgttcggcttgaatcgccaggtggttcgcgtccattgtgcgccggtcgccgctgagatctggccgccgttcgcctgcggagacccgatactgcccgccgcctgcgttgacgtcccaatgtagtgttggaatggtgccgtgccggtgccgcacgctgccagtaccgagatctcgaacacctgcccctcatggcacggaatgttattcatcaccggcacgtggtcacgatactggcatttgatcgcccaagcgtaaggacagccagccgggacgccttccgacgtggtagaaactacggtcatccccatttgcgggtatgccgggtcaaccgtcgggttagggatgaggttagcggcctgcgtcagaatccccttgatcgatgagttgatcgaggtgattgattcagcctgagagtcaatcttaccttcggccgcagtcacgcgagaggtcaggctgctaatcgcgccagtgttggccgtgatcttgccgttcgccgtcgacaggtcgttggtgagctgggtgatggcgttgccttgggaggtgatcttgccctcggcgttgcttacgcgagttgtcagtgactgcaacgcgcttgcgtctgccttattgtttaacgcggtgttgatatccttcaccgagttattgagggtcaggattgcgctgctgttcgcgtcgaccttaccggcggtctgttccacctgggaggaaatgacctgcgcagcggacgccgcagccatctgaccggcaccactgaacagctgatcgacgttgtcggatagcttgaggccgaagttgatgtagaagccgccggtcatctgcgccacgacgaactcaatggtgttccagccctttttaagagcaagcgagtatttcgtggtgctcgcgcctaacgatgcggtctcgacgccgttcacgtaaaggcggccggtgtcgtcaacgatgcgtgaccccggggagatctcgatggtcttatcagcgttgaggtaaaccagcgacttcgcgtaggcgattttgtagtcgccgtatgactgaaaatccagcttggccgcgtcggccatttcggatactgccagcggcggcgcgcctgcgagatcggttaacttcggcacgtagccggtattaaccttgatgtcgaagaccttggtcagccagtatttagccttaccgttctgcgccgtgttctgcaattcagtgatggcgctaccctgcgacgccagcttgtcaccctgctggctgacagtggtttgcagttgctgtaacgcgcttgcgtcggccttgttcgcaatctggccctgcaaggtgctcacgtcgcctttcagttgcgtaatcgactggctgttagtggagatcttcccttcggcggcagtaacgcgcgtagtcagtccagagatggcgctggcgttcgctgcgttgttaatttcatcggttacgtcgacgaaaaaaacatcgtcaaagtaaagctcgccggtgttgatcaggaagttgatcccgaaggtgatgttctggtcgctggccgggacgtagtcctttgtcagtagcgtccagttagtccctacattgttctgagagaacgggagttcagacagcgggcctgcgccagtgtcggcgttgccgatcctgaatttgttgttgccaacgttgccgatgaccagatcgccactgcgtttcacatacccgccgaagcggtaggtgcggccttttttcaggcttgccactacctgagagatcgccgtagtgccaccagccttgccgcgcaggattttggcccctgaatgcgggacttgagccgcgtagatatccgagtacgagttgaagccagtccatgctgccttatcacgctcgaagccggtgttcgtcagcaggttgttcggattagcgaccagcgcgatagcgtcgttgttgatcgtgctctcaaggccggtgatcaggctactgttagccgtcacgcgcccgtcaatgtctgacacgtcggttttcagctgattgatcgcggtggtgttcgcgccgatcttgccgttggcgtcagtcaggccggattgtagctgcgtgagagcctgggcctgcgattggttctcgctggtcagagtgtcaaggcgctgggtgactgcggccttattggcgttgtagtcagtgcgcagcgtgttaacgtcgcttgagatggcctgttctgcggtgacgcgggtctgccgttcgttgtagataatgcccgtcaccagcttggccgggtcggttccctcatagttgccgcgaagctgaacggccagcgtgttgcgcgctgcggcttcggcggagtccgccgctgtcatggcggtctttagatcctggatctgagcctgagacgcgcccggggtcggtcggccaacggccagccagtcaacggcaaaataattatccgcgctctgattgctggagaagtccaggcgcaggcggcggatcgtgccggagttggcccacagaagatccgggatggaaatgacactgatcccggttgccgggtcaaagtccggtgccggaatagccacagatcgcgatgattcccagcctttctcatctacgccgatccagtacagacggccagcccacgcaggattccccacgcgcttcatgcgaaggcggatgtatttatagctctgcccgtcaattgccagcgggttcggcgaccgcatggttgacgacgcgccagcagggtagatccagccgtcgctgtcaaccggcaggaggttgatgttgctgtcgtccgatgcccagccttcggcgtccttatcgaaataccagatcttgaggctgtcgaactgctcgccagtgcctgccgcgatggacgccatctgctgcgccaggctgtcgaaaccatcttgcatcgtggtattagtcgtgctgatctgcgcttcgacttcgttttttgtcgccagcaggttagccgcagcctgggccgccacttctgcgtcgtcggtttcagccttagcgatagcgtcagccacgtcgctcgccgctttatttgcggtcgccagatctccggcctgtcggtcgaggatctcctgagcgatagccttcgcgttatccgaaccggcgttagcggctgcggtgatatccttggcgttctgcgcgatttcagcggcctggttgttgatctgctgctgctgctgctggttggttgccacagcgccgtcagccgtcacctgtgctgcctgcgcggcatccttcgcagcctgcgcgctgtcgcttacctccttgatgccgtcggtaagctcgccgtaggtgtccgatcctttgatcgcgtcgtcaatgttctggtagtagtcgtccatgttgtcggacgtcatagccataacaggggtgttccatgggccagcgtcgctatacgacgacacgaagcgcgcgcgaacctgaacacgttcagcgaacccgagaccgttctgcgtgaatgtgccggtagggtaggtgactaccgacaggtcaatccagtcgccaaccggtgagccgttatcgtcgacgcggcggaactgtagctcggtcgacttcatgtcaaccagatcgtcggtgccagtcatccagcgccaggtaatgccgttcacgatgccaacgccattcaggccagccactgccgggatgctgccgcgcttaccgtcgacaaatacctgattggattcagcccatggagacgatccgccatcccgggatacggcgcggacgcggaattgataggtgccggtcagaacgttggttaggtctacggacgtgctcgactggctggcaaggttagtccagccttgtgaccactggccgttagattgagatgtgcggcgtacctgaatgtcatagctgatcgcctggtcgacaccagcccatgaacagttaacatttgcagaccgcagcccctggttgacgatgctgtaaccttcggccaccacgttagtcggtgccgacacctgcccggttgggatcagcgaggtaggacggtcttcaattcgcgcgccggtgtcaacctgcaaatactttgaatggctgtactgtaggccggtaacggtaaaattgttgtcctgctcgttgtaggtgatcttggtgatgcggattaattctggcgcaagctccgccgtatccagcaggaagatctccccggcctgaatatcaagatcagcgccttcaacggtgaatgactggcggtcttccgcaatctcggtgatggctcggttataggtgccgtcagatccagcctgtcggacgataacgcggtcgccgacagccacatggtcggagatagcccgatctgcggtgatggtggtgccggtgacgctgaggacgcgaccgccgaactggccgccttgcacatagcggttagcgatgccgacgacgtctccgatcaggtacttgatgccgttcaggccgacgcggtagctgatctgcatgtcgttaatgttcgacagcagcgcccacaggccgcgacgttgcgcttcatactcgttagtgcaaccgatgccggacacttcgagtggttcgacgccatagcgttctaccaggtctttgaactgcgcgacagtggtctgagtcttatagtgcgccttcgggtcgtcgaacgtgaccatagcgatcccgcgacggtttgacatgctgccatatgtgtattcaaaggtgccgttcacgacgtcgtcgttagtcacaacatggcggacttctgccggtgcatcctgcgcgaattgcagttgcatgttgctgtagctgaccatgccgttaaagatcgacgccagatcgcgaatgacgctccaggcgtgcgcgcgcttctggatgtacacgttgcaggtgtagcggcgatcctgggtgccgtcggcattcgtcaccagctcatcgcagcgctgcgagatggcatacattgtccacttgttcaggaatgacgccgggatgcggcggccgataccgaagcgcttatgcaggataatgtcgtaaacgatccacgccgggttgtcagtccacgcttgtttgaacgtcccgttccatgtgccattgtaggtgtgagtctccgggtcatagttcgacggcaccatgaccatgcgaccgcgcatcttgatgctgatcttcgggatgttctggaaagattttgcgtcgaagctgacaaacagcagggacgtccaaggataacggacgcgtgcatccacgatctcggtgatagccacgataccggaattaaggatcgtagtgtcggacgtgctgtcgtcggttagtcgagtgacgcggatctgccagccggtcgaactcttcggcaggtcgatgcggtgatcgcgctcatagttgtctttctgcttgccgtcgactgcgccgttgaacgcctcggtgtaggcgctgtcaccgttcttgcggtactcgatcttgtagtcgatgcggccgcctacgcgatccccgtccttctgctgaatgacaaggcgaaagttcatgcggatgcggacagcgtcgatctcggtgttagagacgttgcgcacccatggtgacgcctttttcagctcgacgttgattcgcgtctcactttccaccgccgggaagccgttgatcggctcctgctgcggggtgccgtttcggtattccagggtgacacccgggatgttgacagatccatcctcgttttgaaccggcgtaccgtccaggtgtacccgctttggcaggtcttccgcgctaatcggcacggtttcaccttcggccagcgccagcaacatgcgcacagttgcgttactgaccagtgaatctggatcttcgacaggagtatgcacgttgctactcccgcccttatatcctttgatttccattaagagcgcacctcattagcgataattccggcgctgataatagcacccccgatctcacgctcgccatacaaaacacccacgatgttaccttgtgctgtcgtattgaccggctggccgaaagcatacgacggcgcgttggcgtcatcctcgcggatcttcatcccggttgcctgcggggataacatctgcatcacgccgccagcggtggtggagaccccagcagcgacaaggtaaggggatacggcctgcccgccgggaatgaatgacgccacgacaccggcaacaatcatcgccgcgcccaggatcgtctggaaaagcccggcttttttgttaccgatgaccaccggcgcaatgcgaaattcttcatcggctgggatgggaagcgacatgtcattgaatccgatgtttcgctttccgatgaatggggcgaaggttagcccgcgtgactggctatctctcatgtactgatcgaagcccgggaggatggcggtaagggcgctgattgcctcggcgcatgagtcgaccgcaaggtgatggacgcgcccgaagcgcgcccccagctcaccatatagtcgaattgtgcttaactggtttcccatgtgattttctccggcataagttcatgacgaagaataccagtaatgcgcggctcaaggtaagttccatacatcctgtcgcgcgatgacttcgcgttcatgaggtggtgaataatcatcccgtcgccgacatagatcccgcagtggttggttacttttgacgcgatgcggaacaccaccatgtcgcccggctccgcctccgcctttttgacgaagccagcggccgcgaagttctcatctgtaaagagatcctccccctgctcccaccatggataaggtcggcggaagtctggaaggaagatcccgcgagaacgatgccatgccataaccagcccgtagcagtcagtcgccccaaggacgaactcacgacccagcagccctactggctcttcgaagaaaacggcgatttcatccttttgcggcgcatagatgatccatggtaggcacgtttcgcgcatgagttgccgatccagaatggaagggtaagcaatgccatcctcgccagggtgtgaatggatgatggcgacaacctccccggcttcctccgcttcggcgtagtcctgcggcgcaatcctaaagctgttcatcttgtcgccggaagagttcacgaccggccagtattcgaggctttccgccaaccggataagcagtccgcatccctcctgcggcgaacactctgtaaggtgttgtttaatataggttaattgtgtttccgggatgtcgtttacactgagcatttttacctttcctcgaactttccgcgaatttgtaagtaattgaatttaataacgtaatttcgcggaacagggacaatgggtatatatatatttattccataaatacatataggacatacccaagaccatatataaataaaactcccttgggagggtttttattatatatatggctatgggatgtattcctatcttcgtgaatcgaaaactacgggcctgaacggcacgctgtcgcgtttaacgacgtcaggccatacgttcggacgtcttacgcaagaaaacgccgcagaacgcgatacggcgcgtttaatcaatcaggcgcaccgagatgaaaccgccgtagtccagaacggccgccttcgggtcactcaccagctggccgaagcgcaggcgacaatcctggatgcatcccccgcattcgtcctttgtaatgtcgtcgacctcattccctttcttgtcgtaccactttttggccgtgccacggttccagctgcatccgttttcttccccggcgtccagccctttcccgtacagaccgcgcgcctgccattggcagaacgtcgtgatctgccgcgttggcacctggaaattttgcagatcgagcggtgaggaaagcgcgaatcgcacatactcatcgccttcgtagtccggccggtcgatgtagtaaagctgcgtccactgctgcattgagtccgcgaactcgttgccgtcctcgaagttgcgagggtcaaggaacttggcgtaggtctggatgatcttgaccttcgccccgaccatctgctggtatgcgcgcaggtaggcgctgatcacgccggactgattgccgatggatagggttggcgtaccctgctgctcgctgctgaactcgatcccttcggtcatgaacgcccaatagccatactcgacgttatcgaaccagatcgatttcggggtcagcttgctgccgtcaatgtcgcccgggtcgttgttcaggatactgattcgcttgatctccatctcgcctacggcctgctgccacaggtcgagacggacgccgataatctggctgttaacccaatctgcgccacctgcggacagcctggacatgtcaaacgagaatttcagccatccatcaccgagatcttcggttacgctcgccagcgtcccgcttttgaggtagccgggcgaaaaatcatgcgcggcggtcttgtagtagatctgatacaggttgtcagttgatggcggcggagtcacccagcgaccaaccacctcgatcacctgatacttgccgccagtcaggccgccagagaatgccggtaacagcaggttcgcatcgacacccagcgacttaaagttgatggtgttgcggtcttcattcttcgtgacggtgccgcgcgtattagcacttttgcagttgaacagctgatcgcggttcagcgtgctgtttgctgcgtcgaggatctcgcggctggtatgcggaagctggcagtagtgacagcgaatgatccccgcgccgaactccgagccatcgatctcgaccagggtgatcttgcctgatgggtctaattttgttgcttcgtcgaaaattgtgttgctcatccctttgtccccgtatagatgcccaccgcctgctctgcggtgaaggtgatgttcattacagcccggcccagcgcgacatatttgatcgacccggtcttgacggtgtacagcccaagctcaccgtggggcggaaccatgcggaaagggttggtgatgtgcgctttcaggaagtcaataatctgcttcccggttttcgcgttgccagtccatgagcaaggcacctccatgatgaacgggttgatgccctccagaacattctgctgcgagccgtcaccaaaagagttagaccggctgcggtcttttacagacacctgctgcccggccgccaggggccagatccacgcgtcaattgttgccataaaaaaagcctcctgtgttggaggctgtagagtatcacgcgtgcccgttgatgagcatccagatctgaccgcccggcgaacttgcccgggcgatcccgtcctgaactgctgcggccattgcatcaccgtaggcccgaccaagtcggccagattctgacacgttggcggtggcctgcccgttctggtcaacgttgatctccatcgacccgatggttactccgccaccagctccgccctgcgcacgaacaccgaggcgaccgcttgaatccttcgccagcggcatgatggcttccggcccggcttccgcgaaaaccccgcctttggcgaatggcttcggcttgtcataggtgaagaattgcggcgtgctgtatacgcgattgctgtacgccgacagcgacggactgtcatagacgccgcccttcgcattgaagcctaaaccacccatgtcgaagcccatggccccgccgacgccctggatggccttaaagattagccacttgttgatcatctggacgatcatcccaaggatggatttcgtgaagtcagcgaatgacgccttgccggtcatcacgaaggagttgatcgcgtccagaccggaatccatcgcgccggtcaatgccttctgaacgttggctgaaacgtcggtggcatctttgccccactcttcgatagccgaacgggcaccaccggcccaatcctgcgtcttctcatcggtggccttgcgcagtgcttcgcgctggcgcgcatcttcgtcgatctgctcctgcgtagcgcccttatcgcgtaatgctgcggcgcgctgcatgttctccagcagtctcgcggcttcgtcagccgacatgccccacgatgcgttgatcgccgccacctgaacggaaagatcattaccgctacgggtcagctcatcggtgatctgcgcctgcttctcaagctgtttgacctggtcgcccagcaggccgacggttttggccttcgccagaacttcctctttgctcgccagcagcgacttctcatccttggtgagcgcccggcctttggcgtccgcccggatgccttccagaatggagatcttcgccaccagcagttgatagtttttcatctgctcggaggcgttgacgtcaaaggcgttgcggtctttcagcgttttgatctgcgcccgcagtgccagctcctgcgcctgatactgctcaaggatgcgatcaccctgcgcaacggtgacggctttttccttgttgtgcttcgcctgctcgcttgccagcttgctgactgcttcgcggctcttctcatcggtggccccgctgccggtagccccattgccgttgcgcgcccgggcctctgaatctgcctggctctcaaaggcccgcttactgacctccgcgaactctttggcgatctgcttgcccttctcgatggactcccggccattcttctcgacggtctcgacgtcgatccccatagcccgtagaacggcgcgcccatcgacgcccggcaccttgtcaagcaggttggcaacgcccagcgtaaatttgctgtccatctgcgccaggtagttcagcaggtcgtcgattgacagcttgaccatatggaagatatcgacggccctgttaccccacgaccgaagcacgatccccatatcgttaaaaat

SEQ ID NO: 9 - DNA, 48635 bp, unidentified
  source 1..48635: mol_type = genomic DNA
ttgaggggctaatatggcagcatattagccgtgaatcaattactttttggtcttgccgtcttcccataggtggcggaaggtgttttccaggtagtacggcgggtcgaggtcaatcacgttgccaccgccgtaggtcggccatgtgttattgtcccggcaccacttgaacgtggcgatggcttcacgcagctgagcgtagccgatcatcagcgtcttggtggtcatggcgaacggggcgacgacgaacgggctgttcttctcctgcgccagcagcatcgtgcgcaacggcttctggccgaatgcagccttaaacccttcacgctgcaacgccattttgagcgggtacccgaggtcgaaacacttcctcatgaaccgttcaggattggccgtgtccgtggttttgtagtcgacaagatcgccgttcttgctgatccagtcgaggcgcaccttgcaacgcaatccctgatagctgaaaaagatcgagacttccgacataccgccgacgaaatattccttaaacgagtcgttattaaataacacagcgcgcatttcctgaatgatgtcataatcctgcccgcgaatgccttcgcgatcgccgcgctcttcattggccttcttcacaatatcgtgccagaaaaccacgtcgtttattcccagcgctgcggcggtgttggtgacggtttcaattaattccgcctccttcatcttcgaatatccggcaacgccgtgctctttaaggaatgccttcgcggcctcaagcgaggtaataaagttcggctgcggaataatctcgcctttatcgtcgcgcttaataaagtcctctttttccggcatgcggaaatattcacgggcaaataattccggttcgaggtggttggcgtgtgccgccgtaccgaagaccagcgcgcgtgcctgcttcttcttctcttcggcgaatttccagtttgccgggcagctggagaacagctcccacaagcccgagccgttcatgtggtctgtctcagcgtgatagtcttcgttcgacaggtcgttattagtgaagaaaagcacttcatcatctttgagcgatttaatttctgacattacatgatccccttattcatatccatgcgaagttttcgtgctaaatcttcctgcttaacgaacttgcggctgtcgcctttatagttgacccgtatcagccatttatttttgtgctcaattgccgggtatggcatgtgagatacgcggaaaataatgtcacctaacattatttcctggtcagtgctaactccgcagaaaacaagcgaccatgcggcgttttcaaccgatgtattcacgttgcatttgtctttaactggaacgcggagaacggcgcgctttaatgcacgcataaagccataggcctctttgaacgtcttgcggtctacgttgcgaattccggcgtgcaatattctggataactctgcatgtgtcatgatgacctcctgtgtggtgttcgggcatattacttccgcataatatgccctgtcaagtctatttaactgagatggtcgacgggccgaggaagtcgatcaccgcctgctttgcgcagtggaacccatacgccaccgcagcgaatccgccctgggctgacacggctgacaggcattcgacctgctccttgctgaccggcgtcgacagctttttggtttcccgcttcatctcgatcacgccgaacggctccccgttgcgaccgcgatgcaggatcacgacgtctgcaacgcccttgcggagtcccttcgcttgctggcgcaggaagtactgcttcccggcctttccgccgttctcgttcggcacgtggaaccagtacacatctggataccaatggttaaaccaggtggtgaagttaatcaggtggtcatcctcaagcgccttcgtcggctctgctggtggattgatgtattctttaatcacaggtcttcccctccttcgaaaatcttacgggctatcacgtcgcgggacttattcccgcctatgcgccggtgcgtcacgcgcttcggtgctgcaatcaggtgagcggacggcaggatcttcgtcttcaccccgcgccgcatcttgccccgggtgttcggtgatgcaatgtgcttatcaagcgctgctttccactgctgttttgctggcatgctgtcgctgtccggccagaagacctcataagccacgaagtcaggctccccttcattccccagcacgtagcggaacaccacgccgttcccgcacttggtcggctccacgttgaacgaacggacatcaacgaagtcatcgcgggtgtagctcttcttctcaaggctccggttggggtcaatcagcgtgttaccgcagtgggaacactgccgggcggtgatgtcgttctccgccccgcagccgcgactgaccaccaccccgcggtcgtttttgaagtccacgcactcgcgcgaaacgaaccagtactggcagcgttcgtccttcttgtaccgcgtgccgtcaatctctatcccgtcgtggtcgtacacgtggcgacaccggcgcgcgtgcttgccgttcgtgtgaccatacgggcactccttgatctgtccgctgctggtgtcagtctcatagcgatactgttcaaggaatggcgagaagtacagctccgccaggtcgtccagcgctccaccgtagtcgagaacgaggttgtcttccttgatcatccccagctcctcgacgtggaactttttgaggatgcgcatgccgcgcccgatgagctgaaccagtagcgtgaggctcccgatcttacgcaggataacgatggtatcccatggcggaacgttgtagccggtggtgaggcacccgatctggaatatgaacttacagcggttgttaaatgcgtcctccagtatccgatcgcgctccttctgcggggtgtcgtcggtaatgatcccgtaggtcacgcccgggggtagcgcgctggccgcctccttacagtgcttcttaccggcgcaggtgacgagcacgcagttgcgggatgcggtacgcttcacgacgtcgaacatgatgttctgcgtgatggttccctgggcaaggatctgcttctccatctcgatcaggtcggcgtcgctgaattcgtcgtcgccatcctccccgcggctcacgaaggaatcaagctggtaggtcagctcatcatcgatcgccccgtagtgggtcggcaccaccgcgccaacctcgaccaggtactcagttgagatgtcacacaccgccttacgccagaagccgggtgtttccgtgttctcgttgatgatcggctgcgtgccgcggtagtcggtgccggtgtacccgatgacgaccagatcgcgcccgtgcatctcacggcatcggcgctgcatctcccggatgataagcgtgtacccggtacggccagcggcgatcatatccgccagcgtgcgttcggccattcgctgcaacttctcgttctcggggtgcttatccgccagctcgcacgtcatctggctttcaacgatgtcgtcgacgttgacgtgctggcattcgtctatcagcaggaagcgcggcacgaagttagccagctgcttttcaagggcgttgacgaccgttttctcgctaccgcagatgatcgggaaggtggtggacttcatgcgcaggccagcgctgaatacgctgttttccaccccgaagttccgtatctccatggcgttttgcttgatgatcccgccctgacgtgacagcacgagcgcgggcttattgagctgggtaaggcggcgggctaccaggctgatcagcgtggtcttccctgccgatacggctgctttgacgacgaacgggccgatctctttgtagtggttgatggcctgcgacgtcgcgaagtgtgccgcgaactggaacgggtaagggtcgtatggcatgccgcgaaggcctttcagcagctggccgcgaacagcctctatgtccgtctcctcgatcatttgtttaatgcttttcaccttttccattgtcgcctcgttgacgtggtaaacattgcgttatattctgcacaacgaataccaaaacacaaggacttttgaaaatgatgaatatcggcaatatgcggctgtggatgcggccatgaagttctatcccattgagcagatagagcggctcatggtcggccgctgggagctgctcctctcccagtactgggacaagcgcgcatttaacggcaggcatcaggcctgcccgctgtgcggagggaacgatcggttccgctggggtgagtcgaagcaagacgtcacgatgaagggccgcggtgctgcaatttgcaaccagtgcggctcacacctgggcctgtggtggttcatggagactaccggctatgagttcccggtggcgctgcatgagattggggccaacttcctcaaggtcgagcctgaccaggaaatgacatccgagccagtgatagcccgcgaggcattcccgaaggctccgcgcatacggatggaggagaagaacatttcagccgcgcagaagtacatccgcaagcagcaggccgcgcctgactatgaccgccggttttggatggcctacgacctgatcgagacaatgcgcaaatatcacatgtgaaatacagttgacaggcatataacgcataagtaatatgcccgaacacccaacagaaggagatgcaaaatgtcagaacaaaccaccgtatcaccgaagaccgccagcgcagtagccgaggaaattaagaaggctgtcggccgcggccgcatcccggtaattgtcgcagaccagccagccatcgcgttcatgatcgtcaaagagtccagcaaggccaactttactgacgataagcagctgggggttaatgccggattcaccgagaaggacgtggtgaaccagatcgctaacgccacgctgttccgcaagtcctaccaccgagttcagcacgcggtaatcatcaagtcgagcaaggctgcggccgctggcaacttcgacggccggtacttcgtgaagatcatgtgcaaccgcctgtatgtcacaatgggcagtctggctaactatctggcgggggcgaaataatgatcacattagcgcgcaaggacatgaagtcagggatgatcgttcgctccctcaaaagcggcaagttcatgatcgtcggcaaagggaaaaacggcagagtcgtgctgcacatgcatgactttaagccgattagcccggcacatgatgagtgggagcttgtgggggtcaatgcaaaactaaacatggggtggccatggctatcggctgtcggaaaatgatcaagggcagcgagcgcgggaagatggtcggctgcgggacgtacttccacgcaggcggccgtcacggacgctggcacgtgatcgataatgtcgtagtgtgtaaacgttgtttcaaacagtggaaaaaggagcacaaagatgaagaaggcgatattcctgtttaaccgctctcggcacatgttgcagccgtggttagacgctggctatgagtgctggacgttcgacggccagctgaaagagggcgttcacaacccggagccgggcctgttcgaagtgggcatgtggttcgacgcctcagttaccaccgtgcatgccaacgacgtagcccggattgtaggcggtggcgtgaagttcatcgcctccttcgcggagtgcacctacctgaccaccaccggatcgcgctggctgtatcacccggatgaccgggatcttccggttgaggagcgacgcccgcacccggcatacccgaaccgccgccgtgatatgaacgacgctgttaagctggcgaaattcgttgcgctggtggaggcatattgccacatcgtcaacgggttttcctccggccctatcccgtggatgctggagaacccggcgcggtctttcctgccgaagttgtggcgcaagttcgaccacaccttcaacccgtgcgattacggcgggtacatccccgagggtgaggagatgcacccggactacccggggatcatccctgaccgtgacgcctacaccaagctgaccgccatctggtgcagcgaggcgttcgtgatgcccgagccgaagccggtagcgccggtgggcaaggacttcaaccgggcgatcaaggtcggcggcaagagcacccgcaccaagaacatccgcagcgccactcctcgcggcttcgcgctggctgtgttcgaggcgaaccaccatgcataagttcatcatgacgctggaagattaccggatgttcgccctgcgtgaggagcatcgcatcatctcggttgaagaggctccgcttggtgatgcctgtatctcatgcgagggccgactggatattcatgtggaggtgatcttctgtcgtgaatggatgttgggcgggcagcggttttatgtgagcaaaatcaaatatcggtcaaacaccccaaaggaaacgaaatgaaagacgaagcagacaaatttacgatcgacgcatgggaaaaggcgcagcaatttggcggcgaacacaacccggcgctgcacgctgaggccgcagccaaaggcctgacgccatggcagctggtcagtaaccgcgtttgggcgacgaaggggctggtgactggcgggcactatcaggccgttctcccgcagaaagtaaccggccgccggttcaacgggagcaagaccccggacaacgtccgcccgaactggcgcacgccggagcacatcttcgcgtggctggatatgacctatggcccgttcgaggtagacctcgcggcctgcgagaagtcgacgaaatgcgacttctacttctgcaaagaggagaacagcctcgcgcaggactggagccaattcgatgcgatgtttctgaacccgccttatgacgacatcacgccgtggactgagaaaagccgggagatcaagccgggcgcagtgctggcggtagtgctgccgaacgacaacagcacggtgtggttccgcaacatggttgatcaggcacacaccatcatcaacatcgtcagcaacgggaagaactccggcaggctgtcattcgaacacgctggcaccgggaagccaggcaagcagaacaacaaaggcactgtgcttttcatcctgcgcgggcggaagcgtcgcggcggtgtggagacgctctacattgatcaggatcagatgttgcgcgaactggggttactggatgcacagtaaggcgcaagtctggcaggccgcgaaggagtgcggcctcgacgaattcattaccgccgtgtcaaaggcgtttcccggcgcgattgatggggtggcgatatcggcgaaagggataggcgttctggcaactgacgaccgcatgctgaggcgactggtgagggtgaagcccggcgtcacgctcacaaagcagcaagtcaaggagataaggacgaaatctggtgttactatgcgatataaaggggaaaactgaggagtagcaccaatgggtaagacgtaccagcggcacaaggccaggactgtttcacgggctgacaggctgcgcaggatgaaccaagataagaacacgcgaatcatcaccaaatacatcgccgggacactcgcccggctaccggaaggagaggatcatgactttagcgcaagcaattttgaaggcagcaatcgaagggcgcgatcttaagatcgggaagggcgtcgaccgcgagaataagcacattggcccgcgaaatggcaagttctggactgaggcgcgaatccaagaggtgatggacgacgtcactgtgcgccggatgacgaaggcgcagatcatggagaagcacaatatcactgagagcggcttttacaacgcctgctaccgttttgggattccgaccgcaaaatgaaaaaacataccgttattcaaatcgacactgctgaatttcataacgccgtctacatccttgggcgtgaagataagatctacaactggaaccagaacgtagagttccgcaagcgccttgttggcctactgggggaaattgcagcagcgaagcacctgaacaatattcatggccgccaccggattatcatcccgatgggagtcaatgcgcgcaccggcgtgtcggtgaacgcgttcggccagggtgacatcatgaccatctcccgcgtaggaaagcgcgaacggcagacgcacatctatgaggtgaagtccaccgagggaaccggccggcagatgcctaccatcaggcaggacaacgctgagagctacgtgatgaacggcgttgacgcaatcattctggtggcggtgcagatcaacaaggcgaaagccgagtgtcggatcatgcagcaggtgtcgcctgtcgaggtgatcgagaagtggcggcctatgcgcaaccgctatggtcaagagtgttacgctttcaactaagtatactttgcgcttattatggcccccgttactaacacgggggcttttcttttgggcgacttcttccacggcatcaccgacatctatcggatgtataagaccgatctagattaccccatcgctgcggcggtcatggcgacattgcgtcacatccagctcggtcacgaacgtcgacagatctggacgaacgcaatcatggcggcaatgttcgcgaagggcatcaccttcatcatcaccatcatcggggattccgtcccgcgcatgggctggattgccaaccaggacgcaggctggatcgttgcctgtgtgctgggctatgtcgggattgacaaggtaattcgcgtggttgagcggtatttcccgtccatgaatctcagggggaaaaatgatcggcaaccttaaaatctacctactggcggcccttgccgcctttttgctatggcagggcggaagttatgctctgagcaagtacggcgaaagccggtatgaaagcggcgttacagctggggtgaacaaggaggctgaacgcaggaataaaattgaccgtgagctggccgatatgcgccagcgggagaaagaacaagatgatcgcgacacgtctcgccggattgaccaagcacgcgctgacgctgctggtgctgcttatgctgctgaccggctgcgccagcaactcaacgcagccacttccatcgcaaaacaacacgccgccgctgtcggtgttagcagtgatgccggaacgctctccgatctgctcgccgaactgttctaccagtcagtgcaggcgggtaacgaactggcagcagaagctgatcgatactacatcgccgggcagcgctgcaacgtccagtacaaccgactattgcaacaaaggagtaacaaatgaaagtgagtgataacgggctgaacttcacagcagcctgggagcaattccgcagcacgccttacttcgcaaccgaagatgagcgccgccgtgggatctacacctggggcttcgggcacactggccggaaccctccacgaatcaacatcacccgtgagtcggccatggcgatcctgcgtgaagacctcgcctacgctgagaagaaggtgaacgagtgggcgcataagtccatcacgcaaccgatctttgacgcgctggttgatctggtcatcaatgccggtgaggagccaatccgcccggacaagaaggcaggcgacttcgacgacctggtgacgcaaggccgctgggatgagctgatcgtacagctggagttcttccgcaagcagagcgggaagatcgtcccagggctggttcgccgggcactggcgcgtcaggcgctggcgaaggggatgaactggcgggatgctgaggccgtgggcaggaacgcgaaggtgtaaaaaaaggggccaatcggccccttgttgtttaatgcagcaggaagaaacttaacatcacataccccggcgcgtactcgccgacgttgcagatatgaataacacgcacgtcgatctggcgacccgtgtagccgtccgcctcagtccactcgcgaaggcgcaacgtgtctccggtggaaaagctacgatcccacttacgcaattccgctcgcttctcgccacgctctaccgcctgaaagtggactggcagaattttcagatcgtgaatcacttcacacccccgacaacctcagcgccaattgccgcgtaccctgcgaggtcttcgaacgagtcagtgctgtcgtcagtctgggcgcggcagatctttaggatggattgcagcgtcaccacgtccaggccagtcagcggcgcactctggcggttcgcagacgctcgcacgatgttgaacgcatcagcaatgcggtcgaactggcgctctttgccgttctccgcgccgtagcggcgtccgcgctcctcaagatgacctttcacccgttcgagcacctgaacggcgtcaagaggctctgaggcgctctcatgggcatcggccttttcagtgaccagatagatagccgtgccgtccttccgtgcgcaatcgcggttgagcgtcgcgatgttgtcgagggtcagcgccgactcatctgctacgccgtggtgctggaagaagttggacgggaattcaaccacgtgcggtacggaatattcaccgtggtcagccaggcaatgccagcgggcaatgatggtttcctgcccagccagctcgccgtaggccagaaacgtcaccagcgagttacgcccggggatgttgctaccgcgaaccgggctaccgccttcgctgatctcatagccgaagcgcaggatatccccggcagtgaagcggtcggtaacgtcggctgtctttttcttcttggtggtcatgttttgctcctcagcatttcattagtgttttgcgccagtccgcgccatcaaggtcgacgtagcctaacagatcgggcgtaccgtcaacactccaaaattcgttgccgtcggaaatgaacggctcgttgtcgtagacgtagagcgcgccatccatatcgacagcgatccacgctgcccaccccggcgcagttatcactacaccgttgtagttgaagaccttaaacacccctttagtgattaacttcatgatcgtctccgaagtacggcacgcgcggcgtcgtcactggcgcataggcctcgatcctgaaatcgcggttgcggtcgagcgggaggtagtaggagctgaactccgggtgtacgccttcctgacaccagccgacgaagaagaacggttcaccgctgtcgtcgctgcggccgtcccagtttgtcagctgctcatcggtgtagccgcattcgtcgaaattgacgtaccagaagcggcggatgaggcggcagttgttgcgcaggcggcacacaacccaaaactccatctcgtgcccgtgctcaatgtcaggggtgtcgcccagcgtccaggtggacggtaagaattgttcgaataacggttcattctgtttcatttgcaaaagtcctctacgttgatgaagtcgggtgtcatgaccatgtttcccgcacgcaggaagctcagtccgaagcggtggatcagcgtgctgcactggtcgatgtcgctgtaatgcatgcgacgccagaagcctttcagggtgccgacgtcgtcccagcgaacttgcgggcgatcgatgaactcagcgcggacgaaccggccatagtgccatacccattgcccgggcttcacgtcagcgacttcgatcagcctggtcgggaatgccgggatcttgctcatcgtgctttcacctcgccgtaatagcccacgtccagcaggtcggacacaaccgcgatgacctgcgccttcgcctcttcgtcggccttcttgttggcgatgaccttcatgatgtcgccgcgggtggcgtcgaacatctgctctgacactccgcccttgcggtagcgttcgcccagtttgcaggcatccttcatgagcttatccatctccgcgctatccggcagaaggtcgtacatgccgagatcgcgctggatattgatgtttttgatgccgacagtgcagctgacagcgctggcggttccgacgtatgagcatcccagcacggcagcggcgacgatggcgatagcggtaatgcgtttcatggtcttactccttgttgctgcggatggcggcgatggtttccaggtggcggcgctcttcaatgcggcggcgctcttcgtctgcggcgatgttgcgcatcaccagcagaaacaggatcgccagcagcggcgagaacaccagcgacagcagcgcccaacccagtccattacggccacgacggtcggcggcgatgcctaccagtaaagccagaacaccccaaatgactaaaaagctcatgattctctctcctgttaacaccggccccttgccggtgtgtgtatattagtatgcagtaatagtgcgtgtcaacactatagaatgattccagcgccgtgcgtgtaaacggtggcgatggtcagcagctcaaggcgcagcgccttcaatgccccggatgcggtctttgcgtcgatctcggtggcgtggttcttcgagtcggtgtaagacgccttaaagcggttgtgcccgtaggcgatgcagcgcacgcggccgaactcgacgacgacgcggtaggtcttctccttcgtcttgtcgttgacggcttccaggacgccgaacttcgcgccgggcaggagcatgccgcagatgtgagcgcccagctcgcgggcctcttcgtgggcggtgatcttcttcaactggtcaatcattgcgggcctccttctggcctgcgggcgtgatctcgcacgccccggtagtcaaattccactttgccagtccacggctgacaagtccgttaagcgcggtgacggtgtgggccttgctgtcgtagacccatgcaccggcgcgccattccgatacagcaagccgtttgagcacggcacgctgcctgatacgcagtttcaatccgggcggcctcctgcggccagccatgcagcgtaagctatggaacgggtcagatcgcacttcatggtgatcttgcggtcttcgtccgcgttgacccactgggagaaggtcatgttcagcggcataggcttgccatcagcggccgcaagcgcgtggtgatagctgttcagcgacagcagcaccgatacccgctggcgtgccgagatctcacgcaggatcgctcgcatgcagagggtgatgctccccaacccctcatgcttgcgctggcgtgcgtcccaaaactggtacttcatcgttagcggtggtcgtttacgtccgtccattacgccccctcccacgattcgcccaggtgttttttgatcttgcgcatggcctcaatgatcatctgcgcacgtgtcccgcgatccccgtcaacgtcccaggtcttcgaaccggcgtacacctggcggacgacgatgttgaaagcggacttcttgtgtgtcacgtggaacactttgtaaggtgggcgggtaacgccgccggaaaccttgtaatctgtggagatggtgaacccctccacggttgccgtgtcgatggcggcctgaatagtgatcatgcgatcctcctatgcgatatattcgacggtttcagggatgattgctgcgtatttgcagtagtcgagcgccgggatgtaccagcacgagaacaggcgagtctccccgtggcgctcatcagtctcgacttcgcacacggccgactcgtagaccatcccgctcgcggtggtgacgcggattagcggaaggactaagcgcttccacgcgtcaacgccctggtcgtggtattggttcatcactacgtcggcggcttcgtctgcgcgttcggcagacaatgagtcgtggaatgggaagtaagccacctccacgcaattcgcaacaacggcgacacacttgctcatggtttcctccgatggcccccgaaggggccggttggtttagtatgctgcgtcctgtgcgcgcagcgcgtagtcgtagttggtcagaccggcagcgcgggcgttggtggtgtcgctggcgatgacccaggagccgtctttgaactcaatctcacagtggtggaagttgatgcttttgatgtcctggaggttttcctcgacgatggactgaataacgaccgcggcggtcatgttacggcggctgtattttgcggtgatgatttgtgcagttttcatttcgttttcctcatttcgttgggtgtataaacactatatacacccacacgcatagagtcaacaatatttatcaaaaaggtagctcactgtcgatgccagtcacccgtggccgggccagcatctcccggtattcctcttgggcctgctcctgcgccagcttagacaggcggataacgctatacatcatcttgacgatgaagcgggccgggtaacgctccagtgccagcagctcctcgcggacgacgtcaacggcacgctggcgaccgatgtgcaagaagtacccattgtgggtgtagtgacgggcttgctgaacagcgcggtcaatgatgtcgttaaccaccagcgcttcggcgtgggcttcctggcgggctgcgtagttgcgctgaccttcaacggcatccagcagcttttgcagcagcgcttgcacgtcgcacaggctggcattagctttccactctgcctggttccagtcgtccaggttggaggcgatgtaaccttctaccgcctgctgcatatcgtcgtacatgttttcgtcaagggtgtcgacgttttcgcaaatcagcgcattggctgcggagtcgatgatcaggcaagccagcaggtcagcattcttgaactgagcacgggcttgctcgttggtcatccagctggccggattgccgatggtcagatccagcgcggagaggatttcgttagcggcggtaagatatttgatggctgatttggacattttgcgaccccttgtaatttatcggtgagttactgcctgttcgataaatatattataggggccgcatcgtgtcaatagtgcttacactactctttgatgaattctttgaaatctgcggacgatgtctcgcgccaggtcatcagcctgccgttgacgatcgcgtgacgctcgcagttatgatcgtcccggaatttcaggatggtcatggtgttgatgccggttttggtggtcagcttgcgcatgctgcccgccttcgcgagaagggcaggaatgcttgttacgtggcaaatcaggctcatattgttttcctcagtggttatcacggcagctacccatcagcgggggaacggcatctttgatcgtgtagtacgggttacgggcctcgtgtgggttagcctctttgttcaggtgccccagctcagccattttgtaaattgcatcgcgcacagagtcgcgggaatacggcgttccgtcggccttgaacaccgtggagctgatacggtgcaggatctctcggtaaggtagcgtgccatgctgttcagcacggatgagcgaatacacggcttcctgcaacggcgtatacgtgtgcgcctggcgcttctcatccggatcaaagtgctcatcctcagtgcctgcgtccatatcgtaaacgcggtcttcgaacagccagaccttcgtggcgtcgtcgatgtagataaagctcggacggtcgacctcctgccctggggcgagtttcttctcatacgtgcttttcttcttcgcctcaacgtccttcgcgaacaccggcacctgaaaccccttgagcttaaagcgccccttcaaaccaccctggcggctcttgccgacgttcagtacggtgtagcctgtctccttctggcgagcattcagccccttgccggtctgcgtcttctcgcgcaccaggctgaacgttttgtagaccgcacccttcgctgctgagccaccacgagactcaaggtcgtactgaccggacatcaggcttcccttgctgacgtgggggatgaagatcccggcgcagttgagggactcagcgaaccggtgtccggcagtggtgatcagctgctggtcggtgttgctgttttcgtccatgctcacgccgttgttgttggccgccgcgaggtggaacatcttgctgtcgaagatgaccagattcaccggtcggccgttggcgaactgcaacacgcggctcttctggatgcgcaacttacctggctccatcaggtcggccgggcgcttgaacaccttgatccagtcgcggagattcacgccggtgcggagcgaccaggcggcaacctgcaactcgacgctgtccgggtcttcggtaaagaacacgctaaccccgggattgcacacgcggaagcagttgaacagcgggcgacccatagcgaggctgacagccatctgcaccagtagcgtcgtcttgcccgcgcctgcatcaccgtttatctcgttgatggttcgacggttaagcagcccctcgatcaccgggtcgtagaagtccggcgaggtgtttagcacgtattcgcccgggtcgtagtctttcagcgcaggatcttcaaccagcccctgctcgacttcctccgcgagacgcttcgccacctcaacgcgctgagccgacaagtccatgccgagattctgtttttcattctcctcgcgaacgatgcgctggagttccagatgacgttggcctgcatccttcttcttcggctgcggtgctggacgctcttccggcgcggttgagccatcccacaacggtgtcggctcgaacgtgtcaggctcagcacgcgccacctggtcgaagtacgcctgcatatcggccatctcctgcgagtatgcttcgtcctcctcctcgcgggtcattggctggttgaggatgtcagccgcttcgtgctgcttatcctgatcgcctaacaacgctttccagtcgtccggcgtcattggccttttgttctcttcttgcatgttccctcctgtgttggttcggtcattattcacagtcagtaatacagtgtcaatagcaattactttcccccctgaaaaacggccgaaagttgtaaaccaagtgcacccgcagggggtgtaaacatcgttgtgttacaccttgattttattcaacgttatcatgcacttaactcggtacgctttttaaccacttgtcaaccaaatgagttcagggggcgttaagtgggagggctgcaccacctgaacaccagtcgtttcgcgtaagtcattgatattaaagctccccttgattttcaggagccgaaaattgcctctccctgaaattttcaagtgattgatattaaatggataatttcaggggataagtggaatccctattatatataaaacccatataattacagaaacacgtacacccttacgcacatgggggaagaaaaaagcgctacgcagtggctgcgcgtttttattctccccaccatgccgtataggggtaaactgaggcagagccacttgagagaggaaaccaacatgactgacaaggtgaaggtgacgacaccccgaaacccagtcggaagacccaccagctacaccgaggacatgcccgaagcgctgctgtcgttcttccgggtagacattgacgacattatcaaacacaacctgacatccgcggggaagagcaacattcgtatcgacccgaagcatttgccgtccatgattaagttctgtgaatccgtcggcattcatcagtcaacgcttcacgaatggcggagtaagcatacagaattttccgaggcttacgcgcaggcgcgccagctttacgagcaaatgatcctggatatcggatttgccacgaacagcactttcgcgaccttcatgctgaaagcgaacttcggctaccgcgacaacactgagatcgtcgtgaccggtgacgcgaacaagccggtgcggttgaagatcgtcagcgagcgaccgaaggatgagaagccgcgcgaggagtctgaggctgtcgactggggcgatgactaaatactgcttgacatacctataactgtgcaggaatataggggccgggcaatcccgcccctactgcacaggaatcatcaacatgacccaaccactgaatttcacctccctcgcgcctgctccggtcggatgccttctcgattgcgcaaaaactggcgacgcagcaaacaacctaaaactcgcccgggcgattgacgtcgagctggacggccgtggctccgagcagcacgtgaagattaaggttggcaccctgcgcgtgctggttgagtccatccagtcactggataagctgagcgcatcgcttgaggccgcactggacgaacgcagggaagagctgatcgaggtgcgtgacggactgattaaatggcgcacatacgccaccaggctgctggctaacttcttccagacctacccgaccgtcgacaccaacgacgacaacctgcgcctcatgatcaccgcgtccattgagcacgaacagcgtaagctcaaggcggtgagcaaagagcgtgatgaactgcgcaataccgccagcgccgcagaccagttgcggaaggccgctgagctggagcgtgacgacgtgattaacctcaaccgcaacgcagcggaggagatccgcagtctgacagagcgcaacggccagctcgatctgctggtcggcgaggtggcgagccagcgcgataagaacgggcagcatgctaaccaactggcctgtgaggtcaacgacctgaaaaagcagcgtgagcgcctgacacatctcgccgatgactaccgccgcgagctgggcgcagcatcacgtcgttgcgttgcgctcaccaatgacgcgcaggcactgactaagcagcgcgatgaagtgactaccaggctggctaatgcgaagttgcagatcgcagacctcaagcgccggttagacggtgaagttcagcagtcggctgctgtgtatgccaacatccgcgcctactccgaggagcaggagggtgccctattactgcgcatctccacgcttgagggtgagaaccgtcagctggcgaccaacctggctaacgctggtctggagatcgccagctataagctactcgcggaagacctgaaagcaggaactgccgttgaccgtgacacggtgaagcgcctggaagagacggtgcagcgccagtatggtcagctcaacgagtggtatgactgggcctcagacctcatttgcagcccgtcacaactgggcggagagggtctgcgtaccgccattgcccgggcgatgaagaaacgcaaagaacgtactgagcacctggaagcggctttgaattccgtcactgcacagcgcgatgcgtgggttatttgggcgcgtgagttcgccgacgcaccggcaggcctccacaccacggaacagctcattgccatggtgcaggagaaggtgaaaggctcacggcacaccacccagggcacgctgaaagtcaccaagctgaaagaggatgtactcctgacctctcgcggctggtgcaagatgcaggatggcaacgtgacgatacaaaacgcagtgattgccagcggtagcattccagccagcaaggtcaagttcagcgaggcgatggaagatgccatacgtgaactgattcagaaagaactgtccccaatcaacggcgcaatcgcagacatcctttcgaagatgcgcaaataatccacctaccggcccctgcgggggccaatgaggtctaccaatgcaaccctattacccaatcattagcgccgttctctgcctgttctgcttcctctgctgcaaaggctggtcgacagccctggatatcggcgctgcaaacgacaagaatatgcgcaggctggcatgcaccctcgacatcgctggcgacgtgttccactgggcgggctgggcgttcgtcgtcgctggcatccttcgtgccctcggattgttctgattgcttacactttgtaccacttgcccggttgatccccggagcgccaggctgatacgctttccgcaggctcacagagaggtagcgaagatggggatcgtaatgggtgtatggttggcgctggtgacagctatcgcgatgatcgcaattcacatggccgcaatggacagggagcgactcaaggccaacccggccagccagatcaccaagctggtgcttgcggtcttcctcctggtcggcgtagcgcacatcgccaccaggtacacagctttcctccgcgtgctctcataaccgaacacctgctatcatggccccgttaacacaacggggcttttttatgtctatccaatccgacgccagtcaattcattgacctgacactcacaccaccgcagaacgactttctgcaattgtcgtgtaaacacccggcattcgtggcgggcttcggtaccggcaagagccagaccatggccgtgtcgtccgtgctggacgcctcagagggcggctccgatgctacgatcgccatccttgagccaacattcgacctgtgcaagctgatcgccgtgccgcgtatagagcagatcctctccgaactgggcattcgctttaagaccgtcggcaacaaggagatctacacctcccacggcgggatcggtgacttcctgtttcgctccatggacaacccggctcgcctggtagggtgggaggcgttccgcattcactgcgatgagatcgacaccctcaagaaggaggcggccaaaggggtctggcgcgcagccatcgcccgctgtcgtcagtcaccgaaggagtatgagccgttcgacttcctgcccgccgaccgcccgctgaacagggttagcgcctactgcacgcccgagggattcaacttcctgtatggccgctgggcgaaggacaaggagcgcagccgaaaggctgggtacctcatgattcaggcggccacctcatccaacccattcctgcccgtcgactacctggatgctctgcgcgccagctacgacccgcagcgcttcgaggcctacgcgaaggggcaattcgtcaacctgaaatcgggcacggtctataagaactttaagcgcgagctgaacgacaccgacgtggagatcatccccggggagacgctgatcgtcggccaggacttcaacgttaacaagatggcgacggtcatctacgtcgagcgctatggcgaggacgggctggccgaactgcatgcggtggacgagcgacacaacggcatcgacaccccggacgtcatccgctggctggtcgagaagtaccagaacccgggcaatggctacatccacccgatcgaggtctacccggatgcatcaggcggcaacaccagcagcaagaacgccagtatgtccgacctgtctatgctcatgagcgccggtttcgacgtctactgtgggcaggccaacccggcggtgaaggacagggtaatcagcgcgaacacgctgttctgcaacgcaaccggccgccgtcggttgttcgtgagcagcaagcgctgtccgcaattcgtcgaatgtctggagcagcagatctacgatgacaagggtaagccggacaaagaggcgggcaaggatcacatgaacgacgcaggcacctatccggtggtctataagttccctgtcgtgcataatggcacgatctcagccaataatatcgaatgggtacgatgatatgacgatctcgaccatcccgcaggcgggcacggtatctaccgagcacccgctatacaagcggttcaaccaggaataccgcaccattgaggactgcgtcgcagggcagacggtcatcaagcgtgccggtgttctgtatctcccgaagcccgaagcgtggacgatgaagcgctacaacgcttacaagcgccgcgcccacttcctgaacgccacctaccgcacgcagatgggtatggtcggcatcgcgttcgccaagccagcaacctacaccctgccgacggctatcgactacctgtcgaccgacatcgacggcgaagggctggatatggatcagctggtgcgcatgtgcgtagcgcagaacatcaccttcggtcgtggtggcctgctggttgactacgactccccggaggacatcgggcaggtgactacgctggtcaacagcggccgcgtgaccatccgcatgttcgaccaccggcagatcatcaactggcgcaagagcaagggcaagtactcgctcattgtgctgcgctacctggacgacgtcgactatgacggcttcgagcactatcaggtcgtgcgctaccttgaactgcgtctggtggatggcaaggcctactcccgactgtggacggatgagttacagggcgctgccggtctgccagcgtcgatcatccagcaaaacgggagcatgaatcagcagcagcctgaactgcgcccgatcatggcccgcgggaagcagctcgactatctgccgttctgctggttcggtagcgagaagaacgacagcgacattgacccggctccgctgtccgacatcgcgaacaccaatatcgcccactacaacgccgacgccgacaacaccgacagctcgtttatctgcggccagccgacgttcgtgatcgccggtgtgcctcagaacttcgcgaaggacaatccgagcatcaaggtgggtggtgacgaagcgatcattctgcaatccatgggtaccggcacgccgaccgccagcatggtcgtcgcaccaccgaacactccggcggctgcgctgctggagaagcgtgagaagcagcttgccatgctgggcgctaagctggtcgagcgcaacggggcgacgaagaccgccacccaggctggcgcggatgagaaaaccgacaactcaatcctgtcccagtgcgtaggtaacgtcgaggccgcgtttaatcaggcgatggagatggtgaaggacttcaccggcaccgagggcgctaacgtccacatcaacaagcgctatgaggacatcgtacttaacccgaccgaactgacggcctacatggcggcggtgcagtccgggatgatgcgtatgatcgacttcctcgcatggcagcagcgcatcggcctgatcccgaacgatgtcgacctggaagacgtcgagcaggagctgaaagacggggccgaagagacgcagctgatctttaacgccgcagctcgtcagacccaacaggggctggataacccgccggacgaccagaccgaagaggacgacccggagaaggacaagccgatttccaagaagaaggccagcgcgccgaagaagggggctaaatgacatccgttaactcgcggatggcgtctgaggcggtaaggcaccgcctctacctctaccgctatagcgaaggccaggccaggaagatgacccagctactgcgtcgtcttgccgtggacgtcgtggggcgtctgctgtatgcgctggacgactcgaagatcaccgccgacaactacacggtgaagcgacttgaggccatcaaagccgccattaaccctacgatcaaccgcatctacaaaaccacctacggccagctgaaagccgaccttgaggcgctgagtaacggcgagctggcgtaccagtatcgcacgtggcgaacgctcatcccgaacccggtgctggacttcgtcggcggactggtggagatccctgaaacgcaggtgtgggcggcggcgaacagtcgcccgttccagggcatgctgctgcgtgacatcccgtctgtgctgggtgaggccatgaccgactcaatcggccgggcggtgcagcagggcatcttacagggcgagacgtatgaccagatcattcgccgggtcaagggtagtgcagcagcagcctacaaagacggggtgatcggcaccaacgagcgccacctcgccaccgtcacccgcagcgcagtgtcacacgtcgcagctgaggcccgggacaagatcggcgaggccaacgcaccgctcatcaagtccgaacagtggctatcgacgctggacaataagacgtccaagctgtgcatcatccgcgatcagctcatgtacatgcgggacaagaagcatacgcctatcggccatagcgtgccctacggcgctggcccgggtcggctgcacatgaactgtcgcagtacgtccaccttcgtgttcaagagctgggaagaactgggcgttccgggagtcaagatcaagggtgcgtcgcgcgccagcatgaacgggcaggtaccgatttacatggactattcgagctgggtagagcgccagccgatgagcacgttaacgcaggtattcggcgtggagcgtgcccaactcatccgcgacggcaagatctcgccgcctgacctgttcaacgacaagggggagtatttaacactcacccagcttcgcgaccttgaccgtatcccggcagaagactaacatcgtgccgttgacaacacaggagctatcacatgtggaaatatctgattaacaaagaagcgtttgacgccctcacccctgaacagcaggccgcatacaaagcagcaggcactaccggcaactacgtgctgaacattgaaggcatgccggacatcgacgccatgcagcagcagatggctgacttacagacccgcctgggcaccatcgacgcagagaaggccgccgaagcagagaaggcacgacaggcagcgcttgacctggcgaagaagaacggtgacttcaaaaccatcgaagaggactataagcgccagatcgccgagctgaacggcaagattgagggcttcggtaagcagcgccgtgatgacttcctgaacgcgcagatcgacaagctggccgccgagctgggtggcaaagagtatgccgcgctgttcaaaccggcgttgcagcagcgcctggctatcgaaggcggtgaagacgggtctgacttcatccctcgcgtgctgaaagacggcaagccgtcggcgatgtcgctgaacgacctgatcggagagttccgcgaagacccaacctataagccggtgtgcgtagctcctgcatcctctggcaccggacgccatcaggcaccgaccccgacgcctcctgctggcgatcaggctaccggcattgacgacgtgcgtggtaagcagctgagccgcgcagagcagattgcggcaagcatcagcgacgcagagtaagcacaggcccggcattgccgggctttttcttgcttgaccagtagttgccggttatcatccagacgtttaatcactcaaaggacatcgcgcgatgagctttacaatttttcaacgaaaactgatcggtaccaccgttcagctcctgactgagaatctgaacgtgttcaacgcggcttccggtggcaccatgctgatcggtagcggcgaggtcatcaaagaaacgatggagaaaatgaccatcggcatcattgacggcctggtgcaggatcgcaacgaacacgcccccgttaacaccgtggtgcagccgaaggtgctttcccgcatccttggtggctccatcaactccgcaggccgcctcgggccggttgccatcacctctggtcaactccgcctgatcgagactgacgtgaaccgcgcggcagctgagatcgcaacccttgcctccgaagcgatgttgaagcgttacgtcaccgtcgcaatgggtgcaggcgttgctgcgatcgaagcgttcggccagggtatctacacccaggatgcgaacattaccagcaaggccggtgagctgtatccgaccgttgaggatttcccgctcgcggcgtccatcttcggcgaccaggctgacctcatccgcacctggtttatgtccggcacccagtgggcgaagttctccgcacgtgaagcggtcaagtccgccaaactggtgtttgagctgggcaacatgaagatcttcaccgacggcttcggtcgttcgttcgtggtgtccgacgcggccagcgctggtatctccgcagcgacttccggcggctccgcgatctacgcgcctgatcaggcaatcgtcggtctggcggctaacgccatccaggtcactactaccggcctcaaaatggctgctgacccggctaagctgggcggcgagaacattgaaagctggtggcagggcgagtttaactacggcatcgccctgaaaggcatgcgtcctaccctggcgttccgcaccgccaccgaaggcaagaaaactccgactatggccgacctggtcaagaaagagaactgggaagccgaagtcggtgaaaccgaccgtaagccggttggcaacgacgacgatccggtagcaccgtcccgcaacgtccgcgagacgctggggatcatcatgaagttgaccccgaccgtgctcccgtcaactggcggtgaagcaggtggcggcgcgtaagctgtcgtgatttaataaaggggcttcggccccttttcttttggagataaacatgatcggcaatctggacgacctgaaagcattcgcggcggccaacggctacacggatatgagcgacgaagagctgagcgtcgcgctccggcaggctaacctatggctgtggtcactgtcgtggaagggtgagcaagtcgaacccgggcaacctgacatctggccccggacaatctgcaacgacaccagctgtctcgacttcaccaccccgccggaagtaatccgattcacctacgccgtcgtgtgtgacgccgtcgactcagggacggaattcaacaccgcatcggctggcgggtacaagaagcgcacacggatcgagggcgcgatcgacgtcgagtacagcgagcagagcctgtataacgctggattcgaagcgccttacatgatgggcatgatcgggcactggctggaaggcaacggccgcggctgtaacgtcaagctggagcgtggctaatgaacaagctctatcgcgaactgcgggctgaggcccgcaagctgttcaaggagtacggcgcagttatcaccgtcagcacgccgggcggcatcggccgtgacccgaacaccggcgaggaggtggtgacgcctccgggcgtggtgtgcaaggtgctgggcgtcatcactggcgtagaactcaagttttgggggctggcgtcaatcccgcccggggagcagcagatcgtcatggcgtggacggacactaccggacaggagtgggagccgaagatgaacatgaccatcgcaggaggcggccgcacgtactccatcaccgagattaagccggtcatccccgacggtggctacggcatcgtctataagctgaggatcaaggggctgtaatggcacgcaagcggaacggcacaacctttgccgccaacgtcgagaagtgggctggcggcgtcgtcgagcgtcacgaagagatcgtgcagctggcggccatgaaggtgttcgcgatgatcatccagcgctcgcccgtcggcaaccctgacctgtggaaccgcaaccagcaggccgtcaaggagcgcaaccgcatgagtgatctgcgcacggccatgcgcgaaagcgacaccttcggctacacgaccaagcgcggcacccgtcgcctaaagccgggcgcgaacatcgttgcagcaccggcgaaattctcttcccctgtggggccagtcggcccgcgtatcccccgccttcgcaagaacgagcagggcgtgaaccctgtcggcaagggctacgtaggcggccggttccgggcgaactggcaggtggggatcgacttcatccccattgagtggctggatgagcgggacaagtcaggcacaccgaccatcaacaagatggtgaacgccgtcgagcgcttccgcgttggcatggccgaacacatctacttcgttaacaattcgccgtatggctacccgctggaatacgaggggcactcacgacaggctcccgccgggatggtgaggatctcctgtatccagtttgaggaagcgttcgcggctgcaacagcagaggcacaaaaagcatgatcagcacttcacagatccagtccaagttcgacaagatcgccatgcagtggggcgtgaacagtaacgtggcactggtgtggcgtaacagcgccgacaacgatatgaacgagcaggcggtgagccagctggtgggattcccgcagcacatcccggcaccgtctatctccatgggcttccagcagtccgacttggcgcggcgcgggatctaccaggtgatgctgcgtgctcctcgcctgtcaggaacccgtcagatctacgacgctgccgacgcgttggtagaggcattcaatgaagcaatgttctacgacggaaattatgttagcatcggcgacgacgatcagcagctataccttaccgctccggccgaaatcggtgctgactatgaggacgacgccgggctgcatgtggctgtcacgatgaactaccgtatcaacaacgtaagaggctaacatggctacgaaactctcctacaacatcccgaacggctccacgctgcaaatcgcacagacaatgggcgcaagcgtagcagtgaccgggatcaccaacgcgaaagaggcggtagcgtctatttcagccgaggattcaagcatcgccgcaggcgactacgtgcagctgttcaccagttgggtcaatatgtccggtctggtggcccgcgtgaagacagtagcggctggcaaagtcacgctggagctggtggacacctccgacaccgacatttacccggaaggcggtggagctggtacgctggttaagattcaggcgtggatcgacctcccgctgaccccgaccatctccaactctggtaacgagcagcagaccaccacgttccaggctatccagcacgagcgcgcggtgaacatcaacacctacaagtcggcggctacgcagactttcaccatggcgcacgacgcaagtctgccggtgcgtgaggtgctgaaaaagctggatcgcactcaggacatcaccgcgttcaagttctacaacaagcgcgcgaaggaaacccgcgtttacggttgccaggtctcctttaacgagatcccggcctccgaggtgaacaacgtcgaaacgaacagcctcgttctgagcctggtcagtgagatggtgatctatcccgccgcgtaaagcgtgctatcatcagggcggcttcggccgcctttttcatatctggagacaatagacaatggctgcaaaattcaaactggtacccgccgggactttcgaacttccgatcctgatcaccaccgtagggcaggatgaccctaccgagctgaaatttactttcaagcgcatgccgctcactgagctgaaagagaagcaggacgcgatggcgaagcgcgtgcaggagatggatgaggagtacaagggcaaaaagctgtcctcagtcgaagatagcgtgctgcaatatccgttgatggctgactttgtgctggacatcgcaaccggctgggagctgtccgatgagttcacgaaagagaacctgatcaccctgttcgacaactacccgacggcgtttatgtcgatcagcctgggatatcagtccgagctgtggaaactgcgccaaaagcgctaaccgccgcgattgagggtctatatttccccgatccgccgcagcagttagtcgacaatttcgggggtgagctggaagactaccggccagaagtggagctatcagcggagatcgttgatagcttttatttttatcagcgtatagatacccaatggcgcacggggccgggcggtttaatcggcctcgactacaacgtgatcccgaccatggcgcagctttacgaggtgaagttcgaccgccaactcatggacgacctggctgtgatggaaggggccgcgatcagagttctcatgagcaggagtgatacagcatgagtgaaaacacagaacgcttgatcgtcgacgtcgacgccagcggggtcaacgcgggggccaagtccctcgccgaccttgttgacgcggcgcaggacgcaggcagggcagcggacgggctgggcgacaagttcgaccaggtgaagccgtcggccgactcagcagccgcagcggttgacggattcaacaacgaggtgaagcagacgcaggaggcggcaggcgacgctgctgtgggcctgtaccggcagaatcaggagctgcaaagcctgcttgaccgcatccggccaacgcgcgttcagcttcgtgacctggcgcagcagcaggaggcactggcgaaggcgcaggctaacgggctgctgggggcgaaggaggcggaagagtacaacgccatcctcaccagtcgagccgggatcatcgaccgcaacgacgcggccatgcgcgggctgaatgtgacgtcagagaaacagaagacgttgcagcagggattgaccatcactaccgggcaataccgcgctgcgatgggcatgttaccggcgcagatgaccgatatcgtcacccagctggcggggggacagaatcctttcctgatcatgatccagcagggcggccagattaaggactctttcggcgggctgggcaacacctttcaggcgcttaaacaattcatctccccgtcattccttgggctggttggtgcgactgcggccattgcggccatgggttatgccgcctataccagtgcagagcaggcagacaggctcgccgcatcggtgacgctcatgggtggcgctggctttaagtcggccgagcagatcaaccaggcggccgtgaggattcagcaggcaaccggcgacagcatcagcagcatcaccgaccgcctgatcgacctgaacaacaagggcggcctgacggctgacatgatggagaagatcgcgatctccacgtcaaaactgaccgatgccgggctggacgccagcgacgtgatgaaggacttcgacacgctggtgaagaacccgatcaagtccatcgccgcgctcaatgagcagtacggcttcatgaccgaagcgcagatgaagcacctcatccagacgcagaaggagaaaggtgagcaggccgcggcggccgaagcgctggacatctacacaacggccatgaacaagcgggccgatgacgtgatcgataagaccgacaacgttggacaggcatggaagacgctgaaaaccaccgcgtcggacatctttaacgatatggggatcgtgctgcgttcgtggggcaaccgcgccgtcgacatcttccagatggttaagctgtcaatcgacgacctgctgaactacctcgcgcagatggacagcaaattcacgctgggcgtcgctgacctgctggacaaggtgccgggcgttgatgggcgtggcgttctccgggcgatggggatcgacgtcgacaccgtcgagaagaatggccgtgagtccatcgagaagggcaagcagatcgcgaaggagttcgcggaggtcagtaagcgcgcctttgaaagccaggctgacgctgaggcccgcgctcgcaacgccaacggcgctaccggcagcggcgctaccgatgagaagagccgtgaagcggtcagcaagctggcgagtgagtcagcgaagcacaacaaggagaaggccgtcaccgttgcacagggtgatcgcatccttgagcagtatcaggcgcaggagctggcattgcgggcgcagatcaagacgttgaaagaccgcaacgccttcgacgtcaacgcctccgagcagatgaagaactatcagctgttagtcgcgaagatctccatcctggagggcatccgggctgacgccaaaggccgggcactcaccaaggacgaacagtcgcttctggcgagcaaagaggaagtgctggcgaaggccaagaccgtcggactgctgggcgatcaggtcaagcagctggagcgtcaggcgcagatcaccgacgaactgacccgcagcggaaatgacctttccgttcaggtggcggcaattaacgcatcatgggggctgtctgccgatgagtcggcgcgactgctggagaacatgcagcgagcggcggctctccgggacaaaggcgcgtctcaggagcagatcgacgaggacgcacgccagcgcgaagcactgcgacaggctaccgatgagaaaacgcaggactgggcaggcggcgcacgttcagcgatcgaggcttggggtaaggacgctaccaatgtgtcggccaacgtgcagaaggctgtcacgggtgctatggatgccgggctggactcgatcaacaccttcgtgatgaccggtaaggcgtcgttcgccgacttcaccaaatccatccttgggatgatggtgcagatgatcaacaaatggctcatgttcaaggccattcaggggatcggcggcgcattgggcttcgatatgtccagtcttggattcaacgcgaagggtggcgtgtacgacagtccgtcactgtcgtcgtacagcaaccgcgtctacaccacgccgcagctgttcacgtatgacaagccaaagccgttcgcgaagggcggggtgttcgccgaagcagggccggaagccatcatgccactggcgaaggactcaagcgggcgcctgggtgttcgtgctcagggtggcggcggtggcggcgtctccatcgggtcgatgtcggtgaacgtcgaccagaacgggcaggcgacagccaacgtctcagagtctggcaagctgggccgggcctacggcgatgcaatggccgcagccattcaggacggcattgcccgggcaagttccccgggcggacagatctggatgcttatgaacggtcacgcgtgataacctacagcctcccacacaggaggctttttttatggctacattagacgcgtggatctggccgctggcggcgggtcaacaggtatcagtgaaagaccgcagtaggtcaaacagcttcggcgacggctcacagcaaaacgttctggaaggcatcaacccgtttatcatggaggtgccctgctcgtggactggcaacgtgaagaccggcaaccagatcctgtccttcctgaaagcgcacatcaccaacccgttccagatggttccaccgcatggcgaactggggctttacaccgtgaagagcgggacgatcaagtatgtcgcactggggcgggcaaccatgaacatcaccttcacagctgagcaggctgtgggcatctacacaggggcgaaaggatgagcaacaccatttttgacgaagccactaagctcgacccatcaggcaagatcttcctcgtggagatcgacggcactgagttcggggcgggtattatccggggccactattgccagctcccgcacacgagcaaggagatcctcgacagtgcgaacagcacgctgacccgcgatcagctgttccagtgtttcagcagcaatgcccgcggcactctcacgaagaacgaagaccggaacaccatcaccttcaaatcgctaggggctgacgcgaacctgctgctgcctgcgtttaccggcggcctgacgggcgggaagtatcaggtgattgaggtggtaggacgctggattaccccgcctgctggctcggataacctgtatcagatctactataagacggcggcgcacgacttctcgccgggctacctcaagaccgggctgttaccggcggtcactgaggatcttggggatggctggctgaaattctcgttcgatatgtcgcagctgagcgcgggcggtaccgactgggtcgacagccagattatcggcattcgccttgacctatggcagcaggcagtcggcgagatcgagatcaagcgaatcagcatcctgaacaagaaccctcacgaggtcgacgcatccaagttggccccgaagtcaatctggttcgacaacgtcgaatatgggtactggcctttcatggccgaggggatcgagttcagcagcgagcagcagggaacgcctaccctgtccatcggcaaccagtctggcgtcgtcagcgcctacctgcgcgcctatcagcagatggttggggcaaaggttaagctcatccagacgtatgcgaagttcctcgacccgcgcaacttcaccgacggtaacgagtacgccgactcaatgcagcagtggacgcagctctactacatcgaccggccggactatgagagtgaagagtatgttcgcttcgcgctgtcgtcgccgctcgatctccagaacttccaggtaccaacgcgcagcatcacgacgttctgtcagtggcaggctcgcgggctgtacggcaaagggctggacgcaggggaagagaacggatgcagctggaaccgtggcacggccaagaagtggtacgacaagcacgggaacgaggtggacgacatcaccaaggacgaatgcggtggatgcatccaggactgtcgccttcgcttcggccagctggtgagtgacccgaaagcggctgttctggactatggcggattcatttccgtgcgtctgattgactaaaacgcgctgtaacgcgttctgaggcgctttctatggcgagacgtccgaacgtatggcctaacggcgttaaacgcgacagcgtgccgtttaggcccgtagttttcgacttccgaagataagaatacatccccatagccatatataataaaaaccctcccaagggagttttatttatatggtcttggggtatgtcttatatgtatttatggtaataaatatatataccaataccacctgtcccctgaaattcagcctttaaaatcaatggcttaaaagttcaggggaacccaaggggagccaaaaatgattgacgtaaaagatatcccggaaaagcaattaacgtatattaaacaacaccttaccgagtgttcccctcaagagggctgtgggctgctggtggattcagggggaggcttcgaatactggccggtcatcaactccgcagccgacaaaatgaatagcttccgcattgctccgcaggactacgctgaggctgaggacgcagggaacgttgtggctgtcatccattcgcatcctggtgctgacggtctggcgtatccgtccatcctcgatcgccagctcatgcaggagacgtgcttgccgtggttcatctacgccccggacaaggatgagatggcggtattctttgaggagccgaagggtctgctggggcgtgacttcgtgctgggcgctaccgactgctacggtctggtgatggcatggcaccgttcgcgcggcatccagttgccggacttccgcaagccgtacccgtggtgggagaaaggtgaacagctgttcacggatgagaattttgcagcagctggctttgtcaagaaaaccaaggctgagccgggcgacatggtggtgttccgcatcgccgccagcgtgagcaatcactgtgggatctacaccggcgacgggatgatcatgcaccacctcatgaatcgtaagtcgaccatcgacaggatgtacggcacttaccttgagccgcgcattactggtattctccggcatgagttactaccggagaaaacaccatgggaaaccagctaagcaccatccgactatacggtgaaatgggcgcgcgcttcgggcgtgtccatcacctcgcagtcgactcctgcgccgaagcaatcagcgccctttccgccattctccccggcttcgaccagtatatgcgtgacagccagtcgcgcggcctgaccttcgccccgttcatcggcaagcggaacattggctttaacgagatgtcgcagcctatccctgacggcgaagagttccgcatcgctccgatcatcatcggcaacaagaagggcggcctgttccagaccatcctcggtgctgcgatgattgttgccggtgtcgtggcgtcgttcatccccggcgggcaggctgtctccccttacctcgttgctgccggtatctcaacggccgctggcggcgtcatgcagatgctttcccctcagtcgaccgggatgaagatccgcgaggacgacgctaacgccccgtcatatgccttcggtcagccggtcaacacgacagcacaaggtaatatcgttggcgttttgtatggcgagcgtgagatcgggggtgctatcatcagcgccggaattatcgctaacgaggtacgttcttaatggaaatcaaaggatacaagggcgggagtagcaacgtgcatactcccgttgaagatccggactccctgatcagcaacgcaacagtgaggatgctgcttgcgctgtcagagggtgaaaccgtgccgattagcgcggaagacctgccgaagcgtgtctatctggacggtacgccagttcagaacgatgacgggtcagttaacattccgggcgttactctggagtatcgcaacggcaccccgcagcaggagccgatcaacggcttcccggcagtggaaagcgagacgcgcattaacgtggagctgaaaaagtcggctgcatgggtgcgcaacatcaccaacaccgagatcgacgctgtccgcatccgtatgaacttccgactggtcatccagcagaaggacggggatcgcgttggcggccgcattgattacaagatcgagtaccgcaaagtcggcgacagcgcctacaccactgcattcgacggcgcggtagacggtaagcagaaagacaactacgagcgcgatcaccgcatcgacctgccgaagagcagcaccggctggcaaatccgcgtgacccgcctcaccgacgacagcacgtcagacaccaccgttctcaactccgggatcgtggctgtcaccgagatcgttgacgcccgcgttcgttatccgtggacgtccctgctgttcgtgagcttcgacgccaaatccttccagaacattccgaagatcagcatcaagatgggcggccggctggttctggttccggccaactatgacccggtgaaccacacctacagcggttcatgggacgggacattcaaacaggcctggacggataacccggcgtggatcgtctacgacatcgtcctgcacaagcgcttcggcattggccgccgtatcccggcctcattcctgaacaagtggacgatgtacagcatcgcgcaacgctgtgatgagctggtgacgaatgccgacggcacgcagaaccgccgctacacctgtaacgtgtacatccagaaacgcgcgcatgcgtggagcgtcatccgtgacctggcgtcgatctttaacggcatggtcagctacagcaacatgcaattgcagtttgcgcaggacgcaccggcagaagtccgtcacgttgtgacgaacgacgacgtggtgaacggtaccttcgaatactcatacggcagcatggctaaccgtcgcggcatcgctatggtgacgtttgacgacccgaaggcgcactacaagacgcagaccaccgtggcgcagttcaaagacctcgtggagcgttatggcgtcgagccgctggaagtgtccggcatcggctgcaccgacgaatacgaggcgcaacgacgcggcctgtgggcgctgctgtcgaacatcaacgatatgcagatcagctaccgcgtcggcctgaacggcatcaagtacctgatcggcgacgtcgtcggcatcgcgaaccgctacgtgcagggcggtcagttcggcggccgtgtggctggcgtatccggtaccaccatcacctcagaccgcatgatctccgatcacgtggcaatcggcgaccgtgtgattgtccggcaggctggctccgacggcacctacaaccgcgtgatcaacgcaatcgcggctgaccggatgtccttcaccgtcgacggaacagaccttgatattcagacaggagaagtcttcctgctggatactcaggagctggcacctgaacttatccgcatcaccaagatcacctacaacgagcaggacaacaatttcaccgtcaccggtctgcaatacagccactcgaagtatttgcaggtagacaccggcgcgcgaattgaagaccgtccgacctcgctgatcccgaccgggcaggtaccggcaccgactaacgtggtggccgaaggctatagcatcgtcaaccaggggctgcgctccgccaacgtaaactgctcgtggttcaccgtcgatcaggctgtcagctacgacattcaggtgcgccgaacctctcagtcaaacggccagtggtcacagggctggactaacctcgccagccagtcgaacacgtccgtagacctgaccaacgttctgaccggcacctatcagttccgtgttcgttccgtgtcccgtgacggcggttcgtctcagtgggtcgagtcgaatcaggtgttcgttgacggcaagcgcggcagcatcccggcagtagcgggcctgaacggcgtcggcatcgtgaacggaatcacctggcgctgggtcactggtacagacgacctcgttgacatgaagtctaccgagctacagttccagcgcatcgacagcaatggcgcgccggtaggcaactggatcgacctcagcgttgtgacctaccccaccggcacgttcacgcaatcaggcctgaaattcgctgaacgcgttcgggtacgcgcccgcttcgtgtcgtcatatagcgacgctggcgaatggagcgcgccagtcatggcgatgacgtccgacaacatggacgactattaccagaacatcgacgacgcgattaaaggctccgatacctacggcgagctgaccgacggcatcaaggaagtcagcgacagcgcacaggcagcgaaagatgcagctcaggccgcacaggtcactgccgacggcgcggtagccaccaaccagcagcagcagcagcagctgaacaaccagctggctgagatccagaagaacgcgcaggacatcaccaacaccgccaacgccggggcggcgaacgccagcgcaatcgctcaggagatcctcgaccgcaaggctggtgacatcgcgaacgccaacaaggcagcgcaggacgtcgccgacgctatcgcgaaggctgagacggacgacgcagaggtagctgctcaggcggcggccaatctgctgtcgactaaaaacgacgtcgaagcgaagatcgatacgacgaacatcaccatgcaggacggcttcgacagcctgtcccagcagatggcgtccatcgcagctggtaccggcgagcagttcgacagcatcaagatctggtacttcgacaacggcccagaaggttgggcatcggacgacagcaacaccaacctcctccctgtcgatcaggacggctggatctacccggctggcgcaacttcaaccatgcgctcacctaacccgctggcaatcgacgcgcgcagctacaaatacatgcgcctgcgcatgaagaaagttggtagcccaatctggaagggtaagctgtactggatcggtgcagatgagacaggctggaatgatgcccgctccttcaccatccccgaacccgagttcgacccggccaccggcgtcaccgtgctgtcgctgcctgatctgctgtgggcaacatccggcacgctgcgccgcctgcgtctggacttctccagcaatcagaacgccgataactattacgccatcgactggctggccgtaggccgtcctaccccgggcgcatcgcaggcgcagatccaggacttgcgcacggcaatgaccgccgccgactccgccgaagcagcagcgcgtaacacgctggccgtacagcttcgcgggaactacgagggaaccgacccggcacagctggtgactggcatcatctacaacgagcgccagacccgcgtcaccgcagagcaggcgatctccagcgacgtcaacaccctgcgcactgactacaacgcgaacaaggccgccgtgacccagcgtctcgacaccctgaccagcgaaaaccagtctcaggcgcaggcactcacccagctgcaaactgacctgaccaacgccaacgggaagatcgttgctaactccacggccatcacccagctcaagacggacgtgaccaacctcgacgggcgcgtgacggcgaacagccagctgatcaccggccttgagagcacgctgaacagcgacgctatcgcgctggccgccaacccgaacaacctgctgacgaacaccggcttcgaacgcaaaaaggatgcgtggacaggcttcaacacctactccgacatctacgcggctcaggtgcccaagtctggaaccatgatcctgcgcgggaaggctggcggcatcgcctctatcggtcagaacgtcgcgaacatcaagcagggccgaacctaccgctatggcggttgggtcaagcgctcctctgatatggcgatgagtccgaacaccaccgggaacaacaagttccggttaggcaacgctgacactggcaccggcccactgtccgaactcctgtacaacgccaccaccatcggcactaactggacgctgttcaccaaggacttcacggcatccagcgatatgacgatttactatagcgtcaactggattctgaccgccggggaaatctacttcgacgacgtcttcttcatcgacgtgaccgaggagatcaggaataacgccaacgccaccgctatcaccggccttactacccgggtaacggccgcagagggcgcgatcaccaccaacagccaggcaatcacccagctgaaaggcgacgtgagcaccctgcaaggtcagatggcgaccaaggcagaagcgagcgcattgcagcagctggcgaccaccgttagccagcagggaaacacactgacctctcagggtcaggcgatcaccgatttgcagaacaccgcgcagaacggcaaggcgaagtactggctgaccaaggtcttcgacatcaaggtgagcggtagcgggtacatcccgacactgtccgacctgtctggcgttccgccgctggccgtgtccgagatggccgatgctgcacgtctggacttcctgacttacggcgactacaaaatcgcgtatgcgaagtcgctggtgtatgtcgcagctgacaagaccattgcaatctccccgggcggccgcatcgtcgacgacactggccgtctgtacatcaacggggtagaggtagccaccttcggcgctggcaccgcaacttacagcctggcgctcaaaaagggctggaacacgctggagttcgtggttgcgcagatcaccggccagttctacatcaacttcggcctcaagctatctgacaacgtcgatcagctgttcagtggtgccggtcagctggccgccgcatccgcctcgcagatcctctcctctcaggttgagcagaccgccgggaaggttgacgcgaacagcgccgcgattgtcacgctgaacaactcagtgcaggacatcaacaccgcgctgaacaacaaggctgacgcgagcgcgttgcagtcccttaccacccgtgtcaccaccgcggaagggaagatcactgcgcagggtaatgccattacccagctcaccagcgacctgtcgacggccaacggaaagatcaccgctaactcaacggcaatcaacaacctgacgacccgcgtcactgcggcagaagggaagattgactcgcaggctgaggccatcacgacgatcaactcatcgatcaaaggcgtgctgactcaggcggcgaacctcatccctaaccctacggtagacccggcctatccgcaaatggggcttaccgtcgtgtcgaccgcaggcgaaggtgtcccgaccggatgcccttacccgtgggcgatcaagtgccagtaccgcgatcatgttccggcaatgaataacatcccttgccgcgaaggacaggtgttcgaattctcaatcctggctgcatgtggcaccggcaccgcaccgttccagcactacatcggtacgtcgacgctggtttctggcagcatcggttccccgcaggctaacggcggccagatctccgccgctaccggcgcacagtggacgcgaaccacatggcgctggactgtcaacgcagcgcagggtgcacggggttatttccgtccgttcctgcaaatcgggcagagcggcccggacttcggaactatctggtatgccactgactggagcgttcgcgacgttaccgcagcagcgaaggccgaaggcaaggctgacgccaacgccacggccatcacccagctgaccacccgcgtcacctctgcggaagggtcaatcacgtctcagggccaggccatcaccaagctgaccagcgatttgagcacgcttaccggcgtagtgaacagcaaagcagacgcttcggcgctgaacgcgctcaccacccgcgtgtcgaccgctgagggcaagattgattctcagggaacggcgatcacccagctcaataacagcctttccgcgaccgacgcctcaatcgacgcgcagggcaagatcccggggaacctgctggcgaacgcctcgtttgagcgtggcacggtatcgttcagcggctggaactccctctccactgtcgtcacgctgagcattccgcacagcggcaccaaggcgctcaaggcagcaagcggcggtaacactggcgtcggccagaacgtggagatcacgcagggccgtcggtaccgcttcggtgtgtttgccaagcaggacacaggcacaaccatcagcgacccgggcaacacgaagttccgtatctctgactctaccggcctactggtgggcacgaacttcggcccgttcacggctgactggcaacacgtcttcatggactggacagccacgaagaccaccaccgcgctgttccagctgactaccgcgctgagtgccggggcgatgtacttcgacgacgtctacgtggtcgacatcaccaacgacaccaagatccaggcgaacgctgacgcgatcaccacgctgaacacgaaagtgacccagcaggggaacgacatcacgtcgcagggcagcgcaatcacccagcttaccaaccgtgtgctcactcagcagtacgcgaacagcaacccgtgggtagatggctcgtttgagtcctacgcgaaccagcaagccatcggcggtgcaaatggcctggtgactactgagttctttttcagtggcgagaagtccctcatgtgccgccgtggcaacggtgaaaccgggaactctgataagacgtttggctatgaaacggccattcgtgagtcggcggtttaccgcttcgaatgctgggcgatgatgccggaagatgagacgccgccggaaggatggggctgctacgtcggtatcatggttcgcaccgcagccggacaggcagcatggcctaccgcgttcaacatcaacgaagccgcgctggctgctggtggcggtcgtgggaagtgggtcaagttctccggcaagatcggtgctggtggagcgcagaagactcgcggtcgtctgtggatctcctgccgtggcacatccggcggccctgggtatcgtgtgttcatcgacgacctggtgattaccgacgtcaccgacgcgcacgcagcacagaccactgccgatgctaactccagcgccatcaactcgctgaccagccgcgtgagcgcagctgagggcaagatcacctctcaggccgacgcgatcaccaagctgaacggcgacgtgagcaccatcaacggcacgctgagccagaaagccgacgccagcgcagtcaccgcactgcaaacgcgcgtgaccgcagcggaaggccagatcacgagtcagggtacggccatcaccaacctgaacaacggtctggaagcacagcgccgcactggtgaaaacctcgtgcagaacttcgacttcctgcaagctggcactgcctttaacgtacagcaggacagcgtaagcaccgtgaccttcggcgcgtatggcgacggtaaagcaggcgttcgtatggttcgcgctaacggcacatctccgggactgttcgcgaacaacaaaaagccggtaccgcagaacggccagcgccgctaccgctatgtcgtccgcgcgaagggtgtgagcggggcaatgaacctcctcatgcgtcgctggaattacaacggctcggtagaaggctcttacgctgacaagaacaacacgctgacaaccgactggcagaccctgacctgggaaaccgatctcaatcaggcaagcggcgttgatggcgcggcgttcggtctgtattgccacccgtcaaacgctgaggtgtggatcgactcgttcaaggtgtacgacatcaccgaagagctgacgatcaaggcgaacagcgcggcaatcagcagcctgaccaccaccgtcgaccagcacggccaggacatcaccgcacagtcgaacgcgctcacacaactgaaatccagcctgactaatgacgcggtagcactggcggcgaacccggataacatgctgacgaacaccggcttcgagcgtggtcaggacaactggggcggctggagcgctcgcgcggatgtctatgccgcacaggctccgaaatccggtgcaatgatcctgcgtggtaaggctggcggtaacacggcgatcactcagaacgcactgggcgcgaaagctggccgtacataccgcttcggtggttgggctaagcgcacagccgatatggcgatcggtgccaacaccaccggcaacaacaaattccgcctgggtaacgcgaccaccggcgctggcccgctgtctgagctgaacttctcagaagcgaacatcggcaccaactggacgctgctcacgagggactttgttccggcgacggatatggatgttgcttactccatcaactggaaccttgctaccggcgagatctatttcgacgacgttttctttatcgacgtcaccgacgagatcaacaacgcagcgaacgcgacggccatcaccaacctgaccacccgcgtcacgacggcagaaggcaaaatcacgtcgcagggtacggcgatcactcagctgaccgcagacctcagcaccgcgaacgggaagatcacggcgaacgccaacgcgatcaccagcctgcaaacgacagtgaccaatcagggcaatacgctgacctctcaggggcaggcgattaccaagctgaatagcgacctgtccgacctgtctggcgtggtggacacgaaggccagcgcttcggcgcttaacgccctgaccactcgcgtcacgaacgcggaaggcaagatcaccgccaacacgacggcgctaaccagcctgacctctcgcgtcggtgatgcagagtccgcgatcgacggcctgaacgagacgactgcggctaacggcctggcgatggctaacggcttccagcagctgcgcgcacagattggcgacaatcaggcggccatcacgcagacgaacaaggcggtggtagatctggagtcggcaacggcgcagcagatcgacaccatcaacgcatcaatggatggcatgagcgctaccgtgcagcagacctcaacggcggttgcggatatcaacggcaagctgtcggctcagtggggcgttaaagtccagaccgataccggcggcggcaacccgcgcattgctgggattcagctgggcatcgacgcaaccggcagctcgcagttcctggtgcaggctgacaccttcgcggtgtacgctggcggggctaacaagacgttcccgttcgtggtacagaacggcgtggcgtacatgcaggaagcgttaatccgtgacggctcaatcaccaacgcgaagatcggtaacgaaatccgctcgaatgactttgttgatggctcgcagggctggcgaatcgccaaggatggatcgtcccagttcaataacgtaatcgttcgcggcagggtggaagcgaatagcggttctttcaaaggtaccctgcaagcggaagcgttcatcggtgatattgcagtggcgcgtcgctacgatgatatgtcgttccgtcgcaaccagaccgtgcagcgcaacggggcttatcagaaccgtggctacggtatgaccgtagttctgtcgtgcacgctggtttatcagctcactggtgccggtaacgttcagcagtcgtattctgtcgacatcacgtttaacatcggcgggcaggaagtcacgcgccgcttcttcgcgaacgcatccggcttccaggctggcgacttcacacaggagtttcgcttcgctgccgaccttgccgccgataacaacaatgtgaccttcttcatcaaggctcgcggcaacgatgcatcgatcgattacaactgctcgatccagaacatcacggctaccgctttccgcacgaacagcaactcattcagctaatggaggcggcccctacgggggccgatattgaatggcaacaattagcgaccaactcgcgaccgatattcacaacgcgttcagcaagtactacacagacctcgccaatcaggatcagatcttcttcggtgtcggcgacgtgcagatcaccaagcaggacggcaccaccgcaaccgtgcgctcatggaacaaggtgatcggctcggttgacaccgcggcgcagcgaggctccaccaacaccttcacagccctgcaaacgttcagtgctgggttaaacgtcaccgtgaacaacatcaattgcagcggcgacaacagtatgatctacctgggcaagaactcagatcttgcgctgctgaaaaagcagggacagggcgggacggttgccgtaggcagcgggacgccgttcaaagtccagcgggccaacactgcaacagtctcacccacttcgacctatgaggacatcttcgttattggcgtggacaagcagacgacgctacccggtgcgttggctgctggcggcaacatcgacaacacgtcgaagggtaaggtgctcacccaggccattgagctgtcaatgagcacgccttacatcgacttccactacaacggcagcagcgcggactttaccgcccgactcatccaggacaggtcgaaccggctgaacgcgcaggtggcgagcttttgggtgactgacggcaggatcacggcgtcggcatcaatgccagctaacccggcggcgggaacgctgctgaccgctccacctatccgatcattgatgaccgggcgcggggcatacggcgacacggacggcgcttacgcacaaatgtacctggaagagcaggtcggcactgagcaccggctcgttctgtacgcggacggcttcgggcgaacagatgcatggatcttccgtgctggcggcacgatctccaccgggaagggtgacgtcctgacgagcggctcagatgtccggctgaaagaggacttcacagaagcgcctacaagcgcctgtgagcgcatcgagcgcttaggggtatgtcagtaccggatgaaaggagaaagtcgcgtgaggcgtggttttatcgcgcagcaggcagagactgtcgacacggtctacacgtatcagggagaggagcaggacatcgacggagagaagttccgggtgatgaacgtggactatgtggcgatcattgctgacctggtggcgtcggtgcaggagcttcggaaggaattgaaggagctgaaaggggaataaaaaaggggccgatggccccttcttgttatgcgcagcgtaccttgacgccgttaacccggttcagcgccggattgtagcagctgacgctgtcaccgacggcgatcacccggcccttcgaccactcagcgcgctctttgcccgcggtagtgttctcgtaaaccttcgtctggttctcaatctggctgacgccctgattgcttttatcagcacgctcagcagagaacgcggaggtggcgacgaaggacagaacgagtccgatcagtaaagccagtaatgcctgtttgatgttgatagtcatggttattccccttctactttcacgagttcatgccatttgaggcctaaaggcttcgccaggcggatcatggtttcaatggacggaaattcgcggccattgtcataacggcatacgcggcactgcgcaatgcctgctgctttcgccagaccacgctgggaaaacccagcgcgctcacggtgctctttcaaaatcagtgtaatggtcatcttctacctcaaaacggaatgtcgtcgtcaaagtccatcggcggctcgctggactgctgctgtggttttgactgctggcgcgctggccctgactgcgtgcgcggctggccctgcggctgaccttgctgaccgccttctgccttgccgcccaacatttgcatgatggcgttcggcccgttcagcaccacttcggtcgtccacttctccacgccgttgctgtcagtccacttgcgtgtttgcagcttaccttcaacgtagatctgtgaacccttcttcacgtactcgccgacgatctccgccagcttgccgaagacaacgacgcgatgccactcagtttgctccttcacttcgccggtctgcttatcgcgccatgactccgacgttgcgatggtgaggttagccactgcgccgcccgaaggcatgtagcgaatctctggatcttgaccgacgcgacccacgaggatcaccttgttaattccacggcttgccatttatagcgctccttaaaaatcttcttcaacgtctggttgctgaggcgctacatcttgaggctgttctgtttccggtgcaacctggactgtcgccttcccgcgtttagcgttggctggcttgccgggattgaacggacgggcttccgcgtttttcagctcgacgatcttactggcgcgggcgtcatcgacgatgcggagggatgccttgtcgctgcggaacagctcgcatgcggcgcggtagatggcgtcgacttcgtccttatccttcgccgcctcaatggagcggcggcagtcggctgcgctgcggactgacttgttgccgtcgtcgtcatccatggtgaggccgaagatagcgacccgggcataacggcgggcataggtcagcgttgagccgaagccctgagcgtcgttcttcgccagcgggatctggcagatgtcggacagccattcgccagtggcgacgtggataattcgcgtctccatcagcatcacgttcggagcctgtcccgcttcgtgggtaggcgactggatcatgattagtccggcgtcttccattgccgggccgatggccgccgcaacgtcggtaagggtcgagtagtggttctttaagtgctggttctgcttcgacttcttcggcgatacgcacatatcctgcgcgtgggcaaactgcttgacgatggtgctgcatggctgggaaaacttcatcattttgtgactccttatgttgaggggctaatatggcagcatattagccgtgaatcaattactttttggtcttgccgtcttcccataggtggc

SEQ ID NO: 10 - DNA, 50553 bp, unidentified
  source 1..50553: mol_type = genomic DNA
tttttgtcgatatcgatcgaggtgtacccaacggacaattcagccgctacgcgctgtttcgcctgctcgatcgactccccgtcgtaaatcatcaccggaaccagaaccccgatcccgtcctctttgccagcgccggaacaggatccgactaccagccctttcgcgtttttggcgttgaccatcttgtgacccaaagtaattggcttgccctggtatgacgccagcgattcagcgtcgaacacctcggagcgcgggcgaaactcaacgcgcgggccgttcggggtctggtaggtctgtgcgccgatacgcgcaacgatcggggtatcgaccagaaagccgttttcatcaaagcgggccttcacctttaccgtgtcgaatctttgaactcttttcattgtaattcctctacgttattaaaatcgggaaccgcccagcaacggcaaccgtactcctcgccggggaaaatgccgtcaccgtttacgcggcgtcgcttaccttctagtttgatgtggctttcgcgttcgcggtcatccatcatgccgaaccaaaagtaatgcgatactttagcatcttttaggcgctgcatcatcaacatactgttaaaacttccgataatgccgctcgcccggttgcgcgaccaactgccataaatggcatatcggccctcgatgatttcatcgatctgctcgcgagtcttgccaatgttgttggcagttcgaactttcgttgtccagtcagcgacgatatcggctgttaacttctggattgatgcctttgcggtatcctgccatttcttcagcgcctgctgataccactgctcataaccaccagcaccgaattccttcagcatcatgaccgcttcattatcgcgcccgccagccgccagcgcaataaccagccactgcttagagttgaagcggtagatagtcaggccgatggaggccagcgccgcaatgacggcagcaaagaacgcgatcgccgcctcgttgatatcgtcctccgcctcgttgatttcctccgccgtggcgtcgaacttcaggcggtctaaacgatcccgcatttccaccaccagatcggttgtcgcgtcatgcatcaagcgggataaatcccgctcgcttgcttcgggataacgccagtttgggattctgccgttaactttcatcgccgccctcctccgtgttgttcaggatctgcgtgctttgcgttttggtcttgcctgaccctgacgtgcgatccggtagctgcttctgttccggcgcattgcctttcaacttcagttcgggaaccatcgcggacagggtgtcacgcgcttcgttagcgtcaatgacctgatccgataccagtccttgcactgcttcggcgttcttcttaaagatatcagccttctctgaatcggtcggcagtgacagcggttcgaactctacgctgaagtcttcctcagtgacgatgaattgtagcaggaattctaacagtggtttgtagtcgtcgttgcgcttccgctcaaccagcttataaaacgtctgcaacgcagtgttttggctggcgctaacgccacctgtgtttttgttcttcagcacgatctcatgaatacctgacagcgcgacaatccgatccattttggcggacaagaattccgggatgcctgaaatatcggagttaatcacggaataatcctcatcatccgcatcaatgccgatcgtgttgccaactcctgaattcgcgtcaacctgggccatgcgcaaccgggccgcgtattcgccctccctgtcgtcgcagattagagcaagacctttggccttccacacgccctgctgcttacgcttcagcaactgcgttgcgaggtactcagaataatcgtaatcaagaatcgcttcaatcatcgacttgttcagcaccgtgccgccagcgcccttgttgagtttccgtaccttgttggttacgcgctcgccgtcgatgtagtgcatgcgggtataatgcacgttaaagtcgctcccgccgtttagaggcttgacggtgtacatcttaggcttgccgaatcgtgggcttcgcgggtttttctcttcctccgctacggacaccgaatcgtagtcgtaaacgacaattgattccagcggcttaccgcgttttgcggctgaagtcagcatgcggccatcgttgaccattgccaggacgtaagagccaccatacagacgcgcccagcagagggcatcggtgatttgcggctcaagtttaaggccgtcccactctgactggaatttcgtgttatcggagacgccgttaagctggaagccgggcgacaccatttcttccgggatcacgtcaacaatctttttcgccagtccgttattgtgatagaactcctcgatttgcgacatattcccgaacgtgcttgcaatcatcgccgtggttgacgcgtaccccgcgccaccattaaagatctgattgtagtcatccatcttgatagctttcatattttaaccttgtgtgatttgtgggccgttaagcccacattatgtattagcggcccagctttttcaatcctgcaaggcgtttcattcgctctaccgggtcatcgctcaggttcatttccaggttcgcggcgtcaaatacgttatcgcaaatgtcatcgtggggatgtgaatcgtcataggtaaacgcgctcatttccgccacaagctccgcaatgaacggatggctgtccggcagtacgacgcggccacccttgataattggctgcgcatccatcgcgcgagtcaccttatctttgtcgcgctgaaccgggacgatctcacccatgccattaactgctttggtcagatcctggattagacccgtaccgctcgccttgtcttcgatgtaaatctttcgcaggttcccgcattccttgtttctgcgccagcactgcttaatgaatgcctcagcctgcacgcgcaaatccggcgcttcccacttgccacgaatgccatcaatgaagtagacgcgatcgcggtacttgccccaatagcacagcacggaatagtcgtttagctcgttcgtcttctgcgcggtatccgccgtaatgaaggtgtattcgaacttgtccgggcgcggttcatgcgccttttcgctgtcgccgtaatagcgccaccattccgacttaaacacgttaccgcccaacgcgataggctcctgctgatactgcgaaaggaacgtataaagatcggcatcgcgcaaggcaaccaggttctcgatcgattcgttgtcctcccaaaatgaccagtattcgacaccatcaatgaccaccgacggcccggataacacgtcgcgttcgaactcaggacgcaaccagtcagggagcgattcgccgtattccctcgttaccatcgccggaataacaatgcgatcgaattcgatagccatcccgccgctcatcatgaaccaggtggaatcctgcgcatgcagccgctgctgtacggacaggatcggcgtttcgtcgccttgtttcttcttcgcacgacgtgatcgaatggtattcttcagcaagatgtggctcttttctcgcttcacctttgagaacatatcatcaggcttgtcgatatcatccagcgcgattaggccgctgaaaccaggcgtcatgtacccaccacgcttaccgacgatctgaccaccagacgaacgggacaccatttccagccttacgcgatcgttgtcgtccaaaacctggaattcgtcgatctgcttccgcccgaatttcgagggccatagctcctgccattcgccagatgaaaagatcttgattacgcgatcggagttgccttttgaaagcgcgtcaccctgcgagatctgaaggttgcgaaccttccggcacttgagatacgcatacggcgcgaggtggatagaaaacgcttcggttttcgtcgaacccggcgcaacgtttacgatcgtgcttttgcgcttcccggcgatgatttcatctaccgtgtggcaaaagtaggagtggtgccagttccacatcagcttttcaccctggataatctgaaaccagatcttcaggaatagcgaaaagttgcgcgtgctcaatgccttgattgccagcttatcggctggcttcaggtcttcccaaataatcatttcgtcattcatgatcggcccttaaatcttgtccagaatgttactaacagccttctccaatacttcatcggtgatctcgttcttgttgcccgccacggcgtcaatgttgagaacagcaggcttatcgatccccatttccttaccgacgaacgaagcgttaatcatgccgacggcagcaagctggaatttctgctcatagattacagagtcgataaactccattaccggggcatagttcgggtcgtggcgatagcgtgtaagcgttgactggttcacgccgcaaaacaggcttaaccctgtgatcgtgaaaatgcgcggcttgttcacgccccactcgttaacgtcgccctggaaagtggcggtttccgcagccttgatggcgttttcttcggcccactggaaataacgcttcgcgatttcaaagaattgttgcggcgtcatttcggcggttcgccccagcactacgccaaaatctttttcgtatagcgccttgaaattgccttcgaagtgcgatttcgttacgcgttttttgcgttcttcagacattgtgaatcctccttctgtgttgagttgcgagtataccagattgcaggcacaaaaaaacccgccgaagcgggttatgttcatatcagtttgttacgccgcttcagtgttttctgaagtgatgcaaatggctcacagtcaacatacgggagcggcgaaaactctattcgtttcgcgataccgcccggatcgccaattttttcccagcgtttcgttttcttgttgtacagcatcgcggcgaaagtgccttcatgcacgcgcttggacagccgttcgacaaggtggaaggtgcctgcatagaagcctatgaccagcataattaacgcgacaatcagagttatcattgtgttgcttcccttacgtagttgatgcttattttatgagtgtccaggttgacgcctgaacgcttctttgctttctccaccgcgtcggcggtatcgttcgcttcaatcgtcatgctgaactcttgaatgcaggacttgcaaaagccgcccattttccttgctgtgagtatgaccttgtactgcatcaccaccccccaataaatgccccgaagtggggcgatacttgcggatgtttaccgcctcttgtgtctacgcttttaacgatacccggtcagcgtgaatgcgtcaataggcggttgattcgttcggttactttttactcatactcgccatcacggcgaccgaaacgaccttcgagatagccagccagccagataaactgaccgcgagttaacagcgtgttgacttcggcccaatgcttatcgatcatccgggctgcaacctgatcgtaagtctttttgtctttccgtatggcgtcttttgtttccgccgtcattcgtttcgccacacgcttcacagcgttgtactgcgcctcattcagtccgaacatttaagccttctcccattcgacccaggttccgcgagcaatgaagatctcgacacgcagaggggcgttgaaatttttgtagatgaagatgaaacctttcttgctgtcggtttcgacctgtgtaaccggaaaggccagcggagtaatcgtatcgaccgactcactcatctggatacccgttaccgttgcgccaatcggcatatcttcgacttttgagaactcagacatagaatcaccttagtaaaatttgcgcccgccagaatcgcttacaggcgctttaaatggtatacgaattcgttaatttttcaagtggtggcacggctcgccatctttaacggctccccactggcgacgtttgttccgctccagcttttccgccaccgccactgccaactgctcatcggtgattccggcgcggcgggttgcgtcccacaccagcatgatgatatcggcgaactcgctaatgtcatccggcgcttcggcggcttcattggcctctttagccaggtgtttcagcgggccgaccgggccaacgttgccgaactggcgatccgaccattccgcgtgcgcctgccgaacaaagcggaagggatcacggactgactcagcgtcgccgcaaaggtacaggtctttccacgccgccgggtcgttttgtacctggcgcatttcatgcagcacggcgtcaacgtccatcttctcaggccaattgacctggaaggattccggttggcggatgtattcgaccacctcgccgcccagcacgcgctgctgcatttccgcctgcgctttcgtgtcgcaggtgaggcggcgcgatttgcgcccctcgttagtcccgatagtgtaggtcagcacccaaattttgttgttcattcttcgatcaccttatattcgccttcgttaagttcgaaccagtcggtagggagcacctggccgaattcttcggtgtggtagtagcgccccacctgcgcccacttctcgccgtcgctatagcattcgacggtcagtcgatcacctgctttgaatccggcccactgtgcaagggtaggctcatccggggagttggtcacgtccgggttgacaatctcaacaacggccaggcccaggaatgatttgtctttggtcggatacggaatgctcatttgtttagctcctgattggttcgcttcaataaggccactatatcaaatggccttgcggaagttttagcaaaaagtgctatttgccgtcgcgccacaaactaaccaaggcgtcggccatctggcggagaactttagcgtgggtctgcgcgtcttcaccttccggcgtgcgcatggcttcgcggattttctcgatcgtgttgtgggcggcgttgagttctgattcaagctctttaacccggtcagcgagcgaggcttctttcgcgcttccgacaataaccgaccgtgacagcatgcccagggctgcaaccgcatcgcttgccgacttcacgccatctttgaagtgcgcggatttctcagcgccgatcttaaatccacgtgcaacgccccgcgactcatcccgcccgaacatgttcagcacgcgctcggccagggcctccagatcctgatctttatcgcgttcgtgggccttcaggtcggcaaagaacaggggcgactcagtggaggtgatgccgccgaacattgacgccgaagtgtggatgggatattgcatcgcgccgcccactaaaccgccgaaggagagttcgccgccagcgaaacagttgttgatttgcaactcgatgctgaactgaccgccgccgatgtagtgcgagttgcgcgggttgaccgcatacatgttgccttcgtcatcggtgattttgtaaagcgaatccccggtgtatttggtgaaaggctcggcctcatagcgcttgcctttggtgaatttcgcgcccacgccagcgggagaatcagcgttcggtgtcaggatgaatttgtaggtgctcatgatttttcctcttttgttggtgtggggatagtatgcactatccccggacggcggttttagcaattcgtgctatagggcgtcgatttctgcctgcatgaactcgcggacggcatcgccacggctgcaatcttccaggtaatcgctgatatcgtgctgaagctcgcctttttcgtcggtgtagaaagcggcccaatcccgcgcccactccttgacggttttgtagttgccgacgcgcttaacgcctgcgtcagtccacccatactggcgggcgatgatgcacattgcgcgaaccaccagtttgcgatcggtcttgcgcttcgccacttcgaaccgcgcgaactcaccgaagatgccgcgaaccaccagatcatcatccaggtagtatccgtcgaagtgccagcatgaggactcgttatcccggctggcggtgatgatatcgccaggcttacaggagatgctaacgagcgactcgacggaaacgcatttcagtttgattgtgttcattagcggatctcctcgatcgcgttcaggcagagtaagtgggtcgcgtaatcaagatccgtttcggtggagcgctcggaatgctcgccgccggatacgcagaatcgcacgctgggaacctcgatctgaagttcggtgccgtcctcaagctcgatgatggctacggaatcctcagccagcatgcttaacaggtcgatgatgtggtcattcatggtgtaactcctgattggtttgtttcgcttcagtaacgccactttaccaaatgacgttacggcaggtttaacaaaaagtgctattctttgtcgccagtgaatgcggcccggcgaccacggcggaagccgttaatctcagagaggcggcttaccccaatgatgaccatcatcattccgatcatttgccagccatcttctttggcaaccaccagaccacccaggaaaagaacccaatacagtgcaatcattttcttgctcatagtttcacctcaaataaaacgttgttttcatatggtcggttaagaaacatcgcgatcttctcatccggcatgcggcacgccagccagttttcgcccaaatccgttgttttcttatcgtcctgcaaaatccagacttcatccaggccggggccgaagctggcttgatactccttgcccacggtgaacagcggagccagtggcccgtagccagcatgagtgcaaattactgttacggtttccatcgcgtcagatctcacagttggttggcgaaggtgtgccacacgtggcttttcggcgtgcgcttcataagtttgtgcgcctttcgggccatgcgcttatagtcgcgcgaggtcagtttaaccggatcggcaacgaacgattcgaccaccagcccttcgcagaggtattccggcgaccactccatgaactccttgccaggctggaagcggacaaggcgggagaggaatttagaatcgtacaggatctcgccgcgctcgccgtagtagaacgcaccgcgcattttgccgtcattgccaacatgcagcaggtgaatgcgggatttcttgccctcgaagttggttccgacgatagccacgactgcgtttttgatgaagtgtttcatggtaaatctccgttgttggtgtgggataattatgcccgatccgttgaccgggcgtttaccaaaaagtgctattgcatggtgcgaaggtcgatttgcgattctttccagtcagagaatggctccatttctccgatttcctgcatgttcgcatcgcagcgcccgcagtctacccaggctttgtttacgccgataattcgaacatcttcggcgactgactcatacgcccaaatcgcgccgtcttcgtcaacggcaatcgtattggcccacactggcacgtcgacggattttgcatcgctggtgctgtggatgttaatctgaaacgccacaacctggcgctgcgcgatggtggcaactaccttgccgccggatttgatttctttggtcattattcgatcaccttaaaggttgccacgaccgaaccgttacggcgttcggcggtgagtgttgatttgttgaaaaagaaccaggtgttgttaccatgaaccacatcacagccgatcgagccatgaggcgtgcggacggtaacgcccagctccgcgctgtactcaaagccaggtgtgtagttgatagtgttggaatcggtgcaacgtaatttcatggtgactgcctcgtttgttggtgtggggtaactataccagcctaccccgatcgagttttagcaattcgtgctattcaatcaccttgattacgcgctccgggcggtgcggtgcgccggatttgtggagccagtagcgggcctgcgtcaactggccgaagtgttcgaccgccacccaccagaagaaggcaacacgccgctgcgctgcataccactccaccggacgcccgaaggcgtcaaacgtcgccacgcgcacgatcctgaatttgcgtttagaagccataagcctgactctccagggaagcgagcgatgagaacgtgtaagttctggtgcatgagtaatcgcccacgaatccgcagatctcaatgctcccggcctcaatggtcacggatataactttcatatccaggtggaaggcgaacatggcaagcgctttatgtgcgcgatgcatatattcgaactggttcatttttccgctccttgtgcactctcgacggcatcggcgacggccagcaactgattagccagatcgcggattaccttcgggtcgtcaaatacgcagcaaccgctatcgtgggtcgccataagttctacgccagcagcgccaccactgaacggcgacacgaccaattcatcgccatccgaatcgcggtaacataccgtttgcagtttctggtcgctcatttgaacagcgcccctttgattttattccagaaggcgaacggtacgcgcttgggtttcaaatccaccacgtcgtgatcgtagaagcccaggagcaagccgcatttcttcggcgggacgtccacaatcacatcacccatgaagtaccagctatcgccatccttaaagtacagtccgacgcatgcaccaggcgctgcatgggtggcggtgtccggcaggttgtaggtcttgccgcgagatttaaattgttgcatggtgttttttcctatagaaacattccagtctatttgattaggcgtataccttttgtgataagttttttagccttatcagcggtcaattgctctattgattcacagtcataatttaagagaacgcgaaccataaacttgtttttggtgtgaactactacaaactcagatccttcatttgttactgcgcagtaatatttcatcaccttgccctcatttcgtttcgatggggtaatgatagcgcatcaccccgctttagttttagcaaaaagtgctattgctgtgggatctggaagcagagttcccgccagttgcgatgctctctgccagtgttgcccaggaagcagactgttcgcgcaatgtggccgtactgctccgacccgcgaagccattcgcccaggtaatccttttcgtcgccgtcatccggcagacagtggcgcgggcgcatcttgaatgcgaagacgtcgccgttaccgtcgatggcaatgtgggtggccccgccctggatggccgcctgtgcggttgcggtcgtggtgcttttgtcgatgccagccaggaagttagtgaattcgttcatggtcatgctcttttgctccggctccggctcaaccagaatcagtgtatcgttgcagaccatcgcgaagaagatttcagccgtcatgttcgacttcttcgagatcgcgccttcgcgcttgcgcatcatcactgcgtcatcttccagccagtaaatcaggccattaagggtgtttaggtattcgcgagatttcattgtggtgctccgttgttcgtttcgatggggtaactatagcaagccaccccgatcgtgttttaacaaaaagtgctatttgaagttgtgaacctgattcccgccgctgtggtcgtcaatgtcaacgccgtcgcaggtgacgtaaaagccgcgaatgacggtaaagcgccagcgtcctcgccagtggaagtacacgccgaattcacggcccggcactgccttagtcgactccttcgggatctgaagccccgcgaagttgcggagttgaagcgttctgttaaagcgtggcatggttgatgctcctctcgttggtgacgcggtgataatacccgatctctctgaccgggttttaccaaaaagtgctattgcgggtagtccaggctaacgatattgtcggcgctgtcaagcatcatctgaagcacgtttggcgctccaatgaactccggtcgcgtcaccgcctggcccgtttcggtgatgtgctggatgtatgactcagaatctggaagaaatgccatcaaaagcaagtcacctgtaacgcattctaaggcgctcggattttcgtcctgtgatgcattgattaccgcgtcgataacgtcctgctcgcttactggctcgctgcccaggcgcattggtgctgccgggtcgtgctggtcttgatagagtttcacttgatatctcctgctttgacgttgagtttgatagcctggataagcacgcgggccgtgattggttcgatacgcacatcaagatcgtttccggtcagcgcatggatgattccgataacccgttcccggtctgcctggatttgctcatcactgctaaccgctgattcatcgcgttcaatccagtattcgatcacgccgtcgcgtgtcctggttctgaacttgccgtgcttgccgatgtgatgcttcagtgccgaccggatggcgtgcgatgtgatctgcttgccatgcgtggcgctgaacgcctcgacgtcgaccttaccggacagaccaccatcaataaaatcctgttcaatcaggctttggatggttggcccctcccgcttgccaccgacctgtttccgctcgcgctccggctccggttcgtcatcatcgccgaagatatcgcccgcgagccaggcatgataagcggcctgtttatctggcggataggtcatccacacttcgggatcgacctgctcaaactcccatttttgttcagtttcgctcttgttcactgtaattctctccacttccgttccaattcagtaagcatactaagccaggcgtggcaaggcgtcaagtcagtttgcgtaagaaagtaagatatacccccaccctcctatataccctggcggcgcggaacactgaatttttgggggctgtcgcaagcgaaaatggtagcacatctccttactatcttacgtgaactggaatattcagatagagagaataatagaataataataataatattaagtttatcatatacttatatgtatatttatatgcttatgctgcgcactttttgatcaatttttacgtaagattatcttactgaactgcgcgtgaactgcattcggttactgtgaactggcaaccgttttggcaggattcgaacggcgaattatgtgcatggtgcatgcatctatgcaattcgttgcacatcatgaaacactcccccaagtcattgcacagaatgaaacaatcacaagcaatcatgattcgtcaaaactaatcaccagggaatcaggtgcaatcacggactattccactattccgaatcggtggaataatcagcaatcgcaggaatagcattttttgttaaaagccatccgatcgactttgctatgatgacttcaacgaaacgaattgagccaaaggggctaaagctatgaaacttcaacgcgaatcaatcaacctgggcagcgagtataacggcaagtggaacttcgttatcatggatagcgacgccgacaagatcgaagtggttgaggaagcgttatgcaaaatggccactggcttctctgtcggcggagaagagaaaacctggggcgactactgcgaccaatgcccttgctatgatgatgggtatggctccggcttctggattccggtcgaagatgttccggccttcaaagaggcgtacaaggcagctaagaaagcagtgaaataagcacgaattgctaaacgccgggccgaaaggcctggtatagttaacccatcgaaaccagtcaggagattaaccatgaaagcatttgcggatgtagtcgtcggggacaaaattcaatatggcgcaagcgacctgttccgcaccgtcaccgatatcgagaaagggcgaggcgttaacgggcagaccgttttcatcgtgctcgacggcgtggcgcgcttcgcggttgatgctcgcgattgggtcttctgcatcgagaaggggagcgcatgagaaagcggagggccggggaggtggtttgcacctgcgaggcttaccccttccctcatcggatgttcggcggttcatgcaacgggatcgccatcgtcatagccaatgttggcggctcggattgccagcattgccagttactgaacaacgggcgctgtgaggttctcgccgggatcgaaaacccgatcgagtgccattacgtcgccgacttcatccaccgaaacgaggttaaaatctaaatgagaacacttaccatttcaaccagcttttcctacatggttggcgcgccggatgttgatatccagatctcgcgtgagatcgccgcccgtgacgtgacggaaaagtttaaggcggcggcaactgctgcaatcatccactattacgggcgtcaccctgaagacttcaaagccgacgacacgccgtttgtcgtcaatacggttcccgaaagcaaggcgtggcaaatcaacgacaagcagacggggtatttcatcttcggtgcaacaccttgccgggtcgacagcaacgatatcgaggttcagagccttgaggatgccgcgccgcgcactcagcgcacaatctacatctgccaggattacacgacctgcgttcccgaatagcacgaattgctaaaacatcattgggggatagtgcatactatccccacaccaacgaaaagaggaaataaaacatgaaccacccaaagactgattcgatcctggccgtcctgcatgcacatggtcgcgttgttctccgcatgaaccgcgaatccggctttactcagatcacgatcaccaaatcgaatggtcgctatattgtcggcaccgttccgggcgctcgcctggttccgtcctcgctggctggcgtcacgctgacgctggaatcaaacagcatgttcattgagtcgtggagaagctaatgaaagaaggcgatcgcgcatacctggaagtcaacggcgagatgcatcattgtactgtgatgctgaaaagcaagggcgtttacatgttcgttaatgaattcggcgaggaggtcgcgacagtgcaactgttctggtcgacgaagaatcccggcgatagctccctgactggtataccggatcacgtcggggcgaaggaaagcatgaagtgctgcgaggctccaggttgtggggccgtctataaggtcaaggcggcggatcttaaacgtggctggggtaaaacctgttcgaagtcatgcgccgccagtttgcgagaatttaaccggaggaaaagcaatggctgataattacgacgatgcctactggcaccgtttcttaaccgcccaggatgcggggcttaaccgcgaatattgcatcaaagtagccaatcaggaaatgacgctatcggatgccctggggagtatggatatggatgccgaaagtctgccgatgcgtgacgatctggtagagcaagaagaaaatagttgcggctgtactggtgaagaaggttgccgcgaatgtatccctttctggtgaggtgacaatgaaaaagcgcgttgtgtggtgcatgtttgacggttccgggattatgggtctaccgtgggcaattcgcggttgcgatgtatattgctttaacgcagattccggcgaccacggcgagtacaaaatccgcatggagcatgcaaaaatccagtatgtcaacatctggattgacaaagatttcgacgtgaagcgcacgatcctgggtatcccggatcctgacattattttcgctttcccgtcctgcacgctgttagcgcatagcggggtgaagcacgcccgacagactcaggatgtgctatcagccgccgatgatgcgaagatgatcgagcaattgggcgaccaatataattgcccctggatggtagaaaacccggttggcaaattgtcgacgctgtggcgaaagccggatttttatttccaccctcgcgacttcggcgggtatgttgcgccgcatgaggaagtttggcacccaaaaatgccgcactgcgacaattacacgaagaaaacgtgcatctggcacggtaacggattcgtggagccgaaacggttattaccgccggagggtgtggagggcgtcgacttcttttgggcgtggaaattcctgggcggtaagtctgaaagaacaaagatgcttcgctctatcactccgcgcggattcgctcgcgccgtgttccaggcgaattttaatgaatagcacgaattgctaaacgtacccgcttaattgcgggtatagttattccatcgagacgaaatgaggtaaacaaatgaaattaattatcgcgatgttagctactgcactttcaatgactggcctgggcggctttctctttgcaatcatgcttttgtgggtttgtgggattgttgacgtcatgcaccacaaaacgatgattgatatcagggtgaatcgcctaattagcgatatagaagacgcttgcaaaaacacgaaaattacggtggtgaaatatgatatctaaaaaactggctgacgtatgccgcgaagttctgaagatgaataacggcggcgcaacgatggcggcgatgcaaaataagatcgaatcgcacgttggctttaaattgagttgcagaaacaaatccgactttctggatctggtaaacctctatatcgaaatgggagaaaggaaataaaatggcaaagtctatcaaaattaaatgcacgtcaagccgcgctgttaatatccaggaaaacaacctttattccgctcgcattgacgacgaaggcaacgtgtcaatgatggtatataacagcgccgaactgaagaagaagcgcgtttacttatcggtcggcattagcggtgagttgtttattgctggcgtcggcggcgtggtggtggcaacgtttatcgaactgaaaacgaaaaccctgaaatgcgttggcctcgaccacaaaaacccggtgaaaaaatccttcaccgtcggcaagcgttaccaggtggaaagcggtcgcgcgctgggcggcgtcgccgggtacatcttcgaccgtgacggttgccgctggacgctctaccgtgaggaagtcggtttcagcgtgtcggacggcaccacgtttgaggcgaaatacctgtaacggattcggggccatgcgccccgataacctaagcacattttgcaagtgcgtttagattatcactggatctcggatttaagacggcttatcattagccgcacgattaaccaatcaggagcaaggcatgtttttaaatgaccgcgtgtccccacaagatattattgccatcgcagagaaggaaggcatcagccccttgcgcgtcgccatccgtgcgaacgggtatcgcgactccgtttctttctggcccaagccgaaagatatcgacgtaaacgcggacaagtaccccacgatctcgatcgcgaatgattacgatatcgtcggaaagctggcgctcaatgccgctcgctccgttcaattcccggaatcatcggcttatatgcatttcctcggaaccgtgtccgctgcgatgatgggtcgcttttgggtggagtaccacggcagcgagcaaccaacgacgctttacgtcattacgtcgcagccgccttccgctggtaagtctgcgattaactcgctggctatcgatccgatcgtcgcagaggttgagcgaatcaacgaggcgcgcaagaaggagcgcaagaaaatcatggcgaagttgtccgccaacaagcaggctatgaaaggcgagttgtcacagtccgatatggcgaaactgttcgaagacaaagacgaacttgaggagaagttagaaagcatgtgcgatctgacgttccccgtttccgataccacgccggaaggcctggcgaaaatcaacaatcggcaaggcaactttgcggttatctcggacgaagcgacggcggttaacagcctgttagggatcacgtatggcaacgacggcggcaagaagacgaacagcgaactggtgttgaaggcgtgggataagggccacgtatcgatcgcacgttccgacgtcagtaacaatatgtcattcgtcgcgctgggttgtatttgcgtaatcgcccaggatgaaaccatcgacgccatcatgcaagctggttctcgcggtatcggtgtatcagagcgtttccttttggttcgcgagcaaacgcggttaggtgagcgtgtgttcattgacgaaaacgggaattcgacctatgagccgatcgacaagtctttacgcgctgattacttccgcctcatccatgacattatgacggaatcgtatatcaagctggaagtgactgaagcaggcatgcgtcggctgaacaaggcacgccaggagttagagccggaattaggcgacggcggaaagtattcgcatacgatgctgcgcggtgcgatgggtaaattcgataagcaggtgatgcgcctggcgtcggtaatccacacgatccgaaactggcaacctggcggcaaacgctcgaagaagatcggaaccgaaacgatcgacgaagccatcatcatgtttcatgagttgagcaaaacgtatttgtcgtcggctgattcgtccggcttcgctggtgagggtgcggagattaaggccgtgtacgatgttatcgccagccgttgcaagcagtcgaaaggcgtgatgactgttcagagcatctataacgcgtgccgcaatctgaagatcttcaaaggtcagtccggggtgagcaaaaggattaaggaaaaattgctgccgaagatggaggaattaggtttcgtctgcgtgattgattcggaagtgttcgttaatccttcgttcatgaggtaatgaatgtttatccttgacatttaccgattctgcgagtctcgccgggaattcacccggcaagattttgcaaagttcgtttacatgcaccgcgaatcgccacgcatggcaaaagctgccaacgtgtcacaccgtatgttcgcctcaatggtttctaaggagtttttagcgcgaagctatacgaatggatacctggacggaaaaaacggcgtggtgtggtgtactggcccggataacagggagattgggtttaacttccggtcgtttgaagggatggacaacaaatacatgtgggagatgatgcatattgagcaactcgacgatgaagccctattcgggaaagcaggtggaagatctgataacggaggttcacaggcttgtttgcgtgaatcagatcacaccagaaaattacttgcgtgccgcgctcaccttgctatatcaaggcatggccgcgacaaacacggttgaacatgggttgaatgatgaagatggcgtggcactgctgcacgtcaaacggtacatatgaaaaaaggggcttacgcccctttattttttcgctcccgccacataccgaaaacaccgaccgcgaacatgatggccccaacggcaccaatcagccacggaatcatgcttccgctatcgtcgtttcggatctcgatcttctccgccgtaatctggttcgcgtgaatgctggaggtcgtcaccgcctttttgttggaagtgtcaaccttgccaactgccgattctttgaaggtggtttcctgcttgctcgacgtgtccgttttgttcgtcacgccaaccgcctgtttcacgttctccgcgccgacttgcgccgtcatatctggcttgctgccaaccagttcggaaaggatcggtacgctggaagcgcaacctgaaaccagtgcaaccgcccacacgatgaagccgattgccagtgctcgctgaaaatttaagctactcattttagatccttaatgcatagattgaattcctgatcccggcgattatgcaggccgcgcgatttttccatcttacccgttttcgggtttcgatagtacgtccagcggtaaagctgttcgcacgcctcatacagcctcccctggttcgttaacttcagcattgtgctgccggagtatgcgccaccgccagcgttgaaagtgaagctatacatcgacgccctgaaggtgtccggcacggccactttgattttgctgtcaactacacgctttgcgacctggatgtgcttcgccaaaagtgcatcacactctgaccgggtataggttttccccttgattacgtccggccctgtgatgccttcgcagaccgtcgaaacgccagcgatatcggtataaactttgtatttcgtgtcctccactttcgggaggaaggcgacagcgatcgccatcgccgccgcgaatgtaacccgcgttttaatccccatgttatttactcctgatcttcaccgccgttttgatatccccggcttccagcgcttcacgaagcgcttttgaatctcgccagcgcaaccacgcgccgaaggagccgaatagaatcatgaaaaataaaccaatggccgcaatgataagttgcccggtcgcagagcctgcgagggtaacaccgccgctaccattggttgccgcgttgatgaattcccgcatgatatgcaacctctgttagttaagtgataatgcgatgatatatgcgttgggccaaataaagaacaaaaaaaagggagcctgttaaggctcccaaagtttaaggcggtgataataaaggcattaatccggcaattttaatgcaatgtcagaaacaaaatcaaggattttctgtgcatcatcttcaggctcgccagtcgtcatatcaaaatcaagttcgtgatacgtgtcacaaatcagatcggggcgtcgaatgtgcttgcggctgtcgcccgcaaatgtcatgccgtcgcggtggaggcgaacgacaaaaacgttaagtgcatcatgcgctgcgacgtgctcgacctcttcatcaaaaccaccgtcgctgacaatgcagttaaacggcgaaaccaacgcggaatcgcaaagcaacttgccgaactgctttttgcctaacgtcggctttacgaaattttcgctaatgtgaatcaggaattcacgcggcgatcggtcgcctaaaaagtcgcatttgacttccttccggctgcgatcgtggtaacggacggagaatcgggcaaagtcggttgcacccaggatggcgcgcgcaatgtcaaacatcggtgatttgaaacttaggatccgatactcccatttgcgggcgatgatttccgcgatggtgtcttttccgatgcccggcgcgccgttgaggatgattacatttttcatttgtctactccatgagatttcagatggtcgtgaaggttttcgccgtagtcgcagacctggtaagttgtgataccaaggctacggaagtgcgcaataacagtggggatatcatcccacgccgcaacgattcgctcaatgccaatcttgcgtaaaatttcctctttgataaccgtatctttccggttgtcggaggctgaacgcataatcagcaggtcgtaatgcgatgcgccattttgcaccagccatttttcagtgatctcgcgtgcctcatcacttcgcccggtcaggatgatgacgataaatccggctgcgcgcatggcctccattaccaggatcgtgtccgtaatgggagcgtcaccgccagccgccatattgaacgccgtccagctttcggttaggtggagatcttttttcggtagcaggtgcaaacggtggttgccattggacaacgtgccatcgagatcgaaaatgcagatatttctattcatcggttttccttgttggcccctcgcggggccgttgtggttacatgttcgggcggtagataaagcggcctacttcgccatattctttgctgtacagaataaccgccgcctggcgatatgagcgccaaccaccgcgagcggcgtaagcgtctttggcccctaactggccgtgtacttcgtcaatccctaacgagtgttccgttacggtctggtgatgccaatggcccgaatgcgtgtagatgtagtcgcattgaccaaattccttgcggaagtctgtagccattgcggcgaggcgcgtttctgccttcttcatcgtgtggccgtgagtgtagcccagcatcgttttgccccacacggtacgatgcagaattgcagggctgacgtcaacgaatacgcgcggctcattttcatagaacgctgcgagcgctgcacgcaaccagatcatgccagcctgatcgtggttcccctcgattacctgcacctctacttctgcgtgattactcagcagtagcgacacagcgcggcgcaaggagcgaatagccacataaacaagttttgcgtaacggctatcctgatcgagaacgtgaccacttgccggggttactgcgtccaggccgtcactgtgaaggaagtcaccgccgaccagcaagaccgcctttttcgactgcggggcaaccgaaacggaatagtcaaagaagcggttaagaaccctttcggctgtgctggtgtcgtagttctcgccgcattcgtgcttgtgggccatcgcgccgatgtgcaagtcgaagatcggatacagagcaagctgatcctcaatgaaaaacttcgattcatccttcggctgcggttcagcgcgcgggaggtcttcgcagaatgatgcttgcgccgcctccatcaaagcgatcatgcggtcgcggtctacttctgacttgacccagcgcacaacttcgtcaccgttcgcgcgaatcatggtcgatgtgcctttgaccccgaacccgtccgggatgtgttttgctacgtggttgttaccgtgcaaatgcccctggcgggcaagtcgaacgccgcgacgctccacactgcgaacgttcatgccgaactcttcggcgatctcgcggtaggtcttgccttcctcgcgggcggctaaaaattcttcgtctgtgattttaggttgcataatttatcccaattgaattgcgtagttaaagattgcgatagtgagaaccaccgccgtaatcaggatcgcaatatatcgcattctcaacactcccgctacttgtaatattttttggtctgcttcgactcattaatgaacatcttcagagcgtcggcctccgcccgcgtcgcaactgctatacgcgtgcgcttcagtgggcgctcatgaagataggtaaatttcccattgaacacaatggagatatccttgatatcgaaatactttgcgatcatcacgatatcgtcactaatgccagcctctttggcatgctgccaaacggcagcgcggccagattctacaatcattattcgtcaccataaatgcagaagcattccgccatctgctcatacatgtgaatttcttcgatgccgtgggctgcgcggaagtagattgcgccgatttcaccatcaaggccattctctaaaggcttcgccacgtagtcggccatgcacaggcgagaaaggttaatcaggtggcgcgatacgatgtgcggcttaacttgtgcgatcttgatggtgtcggcaatggttttggtgttcatggcgttagctcctgattggttgatggaacaataatacccgctcgcggcgggcattgtttagcaattagtgctgtttcgcgaaatattccgcaccttcacgcgcccgaaaatccagcaattcgcgttcaagaatcgcgggccagtcagcaagcggcgtgccgttatccatgaactcttgataagtgccgtcgatgctatcggcgaaggccatcttttcttcatccgtaccgatgaagccgtacttgtccagcagggtaacgacgatgtgtaggtattcggtgaaagattcaagctgttccatttttcagatcccacgtttgcgcatgcgctttttagttaatgaagggcagatttcgcttaccgggacgtagaacgttttttgctcctcgccaggcttgagtttgcgcatgatgaaaatcacgctgcccttgttgttgttgtcgactggtttcccgcttaggccgttgatgaaggccaggcgaccggatcggcttagttgcgttccgtcttcgtcctctgtgacgtctgcgacaatccaaataatctcagccgctgccttctgtgcgtcgcggaaccacgcagtagagttgtcgccgggaagcaaaatatcgatctggttgtcatgctccatctgctcaatggctttcagcacaaagggatccgggaacgagtaaggcgggttaagccatacgtgcttatttttcccccaccagcgcttgaggcaatcggtcttttcgtcgtaaaacttcgggcagacggtgttgctttcttcggcggcggcgtccaggtcgtatggcccgtaacgctcctccatgtaagcaataaggctgcgatcggttgaccacttgtcgcggacgatatccggcgttttgctcccggcgtagcggttgcccgttacctggtagaatttatcaggcttgacagcctgatagtgtccgccagtagcaagcgcgttacctatgaacgtttcacgttcaagctgttcaaacgtcgtgaacgcgtcgtgagtgtctttgtcttgggtgtcttttgccattttaccattccttacctgtggtggttacggttccgctgatctcgttaccgttcttttcaaggcccgcgaagcgcacatcgacttcaccagccggaacaactacgccgtttttccatttggcaacacagattccatgcgttgaggttgcgcaccagccatcggggcggggtgatgaagtgcaaccggacaaagtgattacagcgacaattgcgactaataaagttttcatgatgtttctccgtgattcgtttcgatgggagaatattacccgactcgcgccgggtagttttaacaaaaagtgctatttgattgcgtcttcaaacgcgatcttaaactgctcgaatccataggccacggcagcgaacccgccacggcttcggacggcggcgaggaattcccgttgctccttgctcactggcgacgcctgggatttaccctggcgctttagctcaatggcggcgaacgggtattttccgccaagcccaatcagcacaaggatatcgcttacgcctttgagcaatcccatttgatgatcagcaacggcgctcgccttgtgcttgctgccctcgttgaccgtatgccagaacaaataatcggggtattcgtaacgcaaccacgaaacgctgttcatctggtcgattttttcaagtgggcaagcctttacaggcccgccgtaatattcgaggtaatcccctttgtctgtaatcactcctcgcctccaaagtctttgcgggaaataatatcctccttcttgccgttgatgcgatgcgttacgcgcttcggcgcgcggaagtattgcgcatactccaggatcttgcgggcgtttttcatgccgcccaacttgccacgcattacagcatcatcaacatgctggaagactgccttttgtcgccacaacttaccgcaaatcgcactttctgactcagggaagaatttttccctggccgtgaaccgctcgccgtcatggttgagcaacacgtaattaaagatgatcccgctttggtttcgtgtcaatcccaaatcaaagcctacaacctgataccagtcattttgcgtgtaatgcttcccggtgaggttgtcgttaggatcctttaactgcacgccacaacatctgcactggcgcgccacaatgtcgttttcagcgtggcatcccttaaccttgattttccccgtcctcggatccttttggtcttcgcagcgctgggacgtccaaaaatactcgcaccgattgccgttactatccttgtggatgcagcggcgggcgtactcgctattttcgcctttgcagaccgggcagattttcgggccgttcttgctgctcttgcgcttctgatactgcgcctgctccagaatcggatcgaaatataactggcccaggtcatccattgttccggcaaaatcccagacaaggtgatcttctttgacccacgaataaggcgcttccttttgccagtctttgagcaatcgcattccgcgacccaaaagctgaatcagcaacgtaagagaaccgatcttgcgtaggattacagaaaaatcccaaaacggaacgttaacgccagtcgttagggccatcacctggaagatgtacttaatctcgccccggttcgccttgtccagaatttcgccgcgtttcttagagttcgtcttctctgtgatgatcgcgtatgtggcgtccggcggtaagtagctcgctgcctccttacagtggcgctggcccgcgcaagtgataagcacgccgtttcgcgtctgcgcacgctctaccaccttctgcataatcagcttagtcatttcgccggaatcgtggattttcttctccatcttgcgcaagtcttcagcgctaaaatcctgcgtgccgtcctgactggagccgtgaaactctgacaggtcgtagcctaagccgtcggcctcagtgtcaccaaagattgtcggaaccaccgaaccgaattcgacaaggtagtttgtgttaatgtccgtgatctgctcgcgccagaaacccggctggctcttgtcttcctgcaagatcggaatgacgccgcgaaactccgaacccgtatagccaacgatgcgaagttctcgccctgtcttttgaaggcaacggcgcattaactcaatgattacgatggtgtattgagtgcgcccgccaccaaattcaaccgtttcgaacttttcgttgtacgggtaatctgcatcgacgatctcaccattcacgcgataaggcttatccttcgcgcggctcatgtactcgaaggattcatcgttcgcgatagcttcggcgaggtcttgccagtcaacctgatggcattcgtcgattgccaggactgaaggcacgtaatcgcccagcatcttaaacaggccattgaccaccgtaccttcggagccgacgacgatcgggaagtaagccgcctttgtgcctaacccggcgcaataaacggagtttggcacgtcaagattgctgatttcttcggaatcctgcttcacgatctcagcctgcctggcgagaaccatcataggcaagttcattgttttacactgcgccgcgagcatggctatcatgatggttttgccagcggatacggacgccttaatgtaaaacggatgctcatagttcgcgatccgcttcgccgtctcgatgtacgcgacagcttggtaagggtacggaacgatatttccgaccgtgaaccgcttttgaatagatgggatcttgtctgcgtaggcttcaatttgttgttcaattgtcagcatggttaatcctgatttgtcattcgcatggttgcgtgtataatacagagcaaattttatcgtgtttaacaaaaagtgctgtgaggttaaattatggaacaaatggcaaaggtagacaagcgaactttgaacggcaataacgggacgtcacgcgggaaagataagaagccccgcaagaagccgacaggatattacgtcctgaaggatgaagtaagggcgggcctgactacacgaatggaattggtgatcgaggcatacggcggcatcgccaaaaccgcaaaggagttgggcgttagcatccaggttgttcagcagtggattaagcgcggtatgatttcagccgacggcgcttacctggtgcataaaagttaccgccgcaatgactgcaaaggcttcagggcttcattttgccgcccggatctcagattcgacagcaacggcaagccgattacgcgccgctgcgaccgccgcgaaatgctccgcgtagtccgatagcacaatttgactaactaccaaacgcctaccgggttatgattctcgcgtgggcgttttttatttggaggttatgacgtggatttttacgacgaaaaagaggttttgccatacatgccggggatgtggcgcgaggcgctacaaaatatttgcggcatccactcccgatacttcaacggcaaacaccaggactgtccgaactgcggcggcaaggatcgcttccgctggacggacaaattagagaatcgcggcgacggcggggcgtattgcagcggctgcggtgctgataaggggatcggatggttgatgaagttaagcggcgagccgtatagcgagtgcatcaacattcttgggcgatacctgggaaaagttccgcaagagtacgtagttaagcgcaacaagcaggttactcgcgataacgggtacgactacggcaagatggcagatcacgatcgcgtcgtggcgataatgaacagaacagaggccgtcgatagcacgcctgtaacgctctatgaaggcattgaaaatgagttcgttgaatcataccgggttggcgtaaaaacccacgagaacggaaggcaagagctatttcatgcactcccgatgcaactggtgcatgaagacgggccggacgatgaatactgcaacatcttattcattgatgaggagggccgcgagaagatgttagctggcgacctgactttcggatcggtgatcgtaaccaatcagagcgaaggcggtaacgggccaatttacctggctcgctcttgggtggaggcgatgcacttcaatatcgcaagctcgtttaagtgtgacgtgtgggcatgcatcatcccgtccaacgttgagatcgtggcctaccgatataaagggaagggtggcggcgaaggtaagcgagaattgcgagtcgtatgcagcaggaaagatcgggatatgctggcggcggctgaagaacgcgatatgaaagttatcgtgccgaacaatgacaacttcaaaggcgggttcgaacgaaagctctacgtggcatcatcccttctctgattaaaacgtgaacaaattttaggtaagattgataatttcagtcttacctttttttatgcccaaaattcagcaacttaccaactggtcgaccactttaagtaagattaggtaagatgaatcttacgtaaatttcgctcattttttaaccaatatcgcaccatagaatatatataagtatatgatatctaactatattattattattaccctctctctatctatctgtgtaggtaagattttctccgggtatatgtattttgctttgcgattccgctccaatttttctgtgaatatttacctataggcatcttaccatcttacctatttgggttaactcaatgaaatatataaagaaaatcacgtaagatgcatcttactaaatcttacgtaaatttcgctcattttttgaccagttggcgaatagcactttttgccttgcacctggaatcgtgatgcgtatacttaacgcaacgaaacaacaaacggagtgataccaatggctgaagcaatttttaaggcatacaccaacgctgaattatccaacgatgattaccacgatcctaactcctggtgcgccagatacgttagcggctcaagcctcggcgagatttacgcaacatccccggcccactggaagtacaaggatcgtgaggaaacagccgcgctttccttcggtacttgctcccatacctgcatgctggagacgtccaaatttaatggcgagtacctacgggcaaccgcgccgggcgacgttaaggatctgattacttcgaagtcggcattgtctgcgaaattgaaagcgtgtggcctgattgggacgtccaacaaggactaccccgaattgctggaaatggcataccgcgccgggattgatgttaacgtgtggtgggcgatcgaactctgcgacgaaagcgccgccatcaactcaggccggaagctggtcaaggattctgatttcgatgctgtcgtgcaaatgcgaaacgttatgctggctaacccacggcacgctgcgtgcattgaatcggatacagcgcaacgcgagttgtcaatcttcggcgaaattttcggcgtcccggtaaaggttcgactcgatcatgttgacgtcgtgtcggatcccgaactcatcaaagagtgggggtttaacccggatgaagttttcgaagtggtggtgattaccgactacaaaactactcagacctctaaaccggatgacttcgggcggctggcgttcaacctgggctactatctcaaaatggcattgcagcgcgatctgttcgttaagacgtacaacgaaaaacgcccggttgttgtccgcctgctgacgcaggagaaaaaatcaccgttcgcgcctctcgcgttcacgttaacggatcagcagattgagatcgggcggaagcagtatcaaagcgtgattcaccagtacgccgaatgcgtcaaacatgacgtttggccgtcatacgaatcgaacgcagcggaagtgaagttgcccacgccgcaattcgtgaaatacatgttcccggaagtatacggcacaaatagctaaacactacggcgcacttgtgatatagtgcgctccaccaatcaggaagaggaaagtttgtcatgcgtacatctgaaagtttcaaagagatcgccgttgcgttaatcaaagcgaagtctggattcgtcgccgcgaagaaaagcgggaagaatagccacctggggaacacctacgccaatctcggagatatccttgacgccatcgggccatcgctggaaaagaacaaaattatggtcattcaatcaatgatggataccagcaccgacaaggttatgcaccttgagactatgtttctgcacgaatctggcgagtggatggcgtttcagttcaacatgccgatcagcaaaaccgttgagcaagcatatggctcgacaacctcatacgctcgccgttatgcgttagccgccgcgctgggcatcaagcaggcagacgatgacgcagagatcgcgaagatgaagccgcaagacttcaaaaaacgcattgatgcgtgcgaagacctcgaatctctccgcgagatttacaagctggctaaacaaacattgacgcctgcggaatggaaggtgacggaagacgatatcacgaagcgccaggcgcaactaaaagtgacgccagcgaacggatttaacccaggcaagccgcaagaggttgcgaaacgtgagccggaacaggtagaatcaaagcctgaacctgaagcacaagatatctcatctttcaactaatttaaccgggcgggaaaccgccccataggaaaaacaatgcatgttgtaacaggggtaatccgaaaagcgccttacgtaaaagagggtagcaacaataacgggccgtggaagatgtacgcggtcgacctgtcggagcgaatgaagatccgcaatcgcgacggccaggacgaaactgtatacaccaactatcgcgccgtcttcttcgcgaaggaaagcatgatcgcgtggtacgatgaagcgttgcaggtggacaaggttattagcgtcacctgccggacacttcagatcgtaaaccgcgagcacaacggctcgacttacagccacaatgaaatgattatgccgcaactggaattcagccagcgcgaaccaacgcagggcggcggtaatcagcagggtggatggggccagcctcagcaaccgaagccgcaacaacaacaacaaccgaagccgcaaggcggtggtggtaatcagggcatggatttcgatgatgatatcccgttctgatttgacaactaaaggggccgcaaggctcctttttttattgcttcattgatgctattatctgcgttactcaaccaaccaaaagaggtcttaaaatggcactatacagacaaggcaaagccgcgatggacgcaaacggcgttatcaccgggactggcacgaagtggcaatcagccttatcgctcattcgcccaggctcaacaatcatgtttttatcgtctccgattcagatggcggtgattaacaaggttgtcagtgacacgcaaattaacgccatcaccacaaacggcgcggttgtcccgtccagcgattacgcgatcctgttaagcgactcgctaaccgttgacggcctggcgcaagatgttgcggaaacgctgcgctactatcaatcacaggaaaccgttattgctgaagcgctggaattctttaaggatttcgacctgaacgctttgcaggaattggccgatcaggttagggcggacgcggaagcatcggcgacaaacgcagcggcggcggctgcatccaaggatgctgcgaaaacttcagagacgaactctaaggcttcggagaacgcggcgctaacagcacggcaacaagccgggtcggcaagggatcagactcaagatctttataaccagactgtcgatcttgtggctggcgttcaggctcctgataagctgccaacctcgccaggtagctcgcgggcgtggatgaagatcgctaacgttaagaatgctggtcaatcaaaatgttttgcgcaatttattattggcggtggcgctaactttggttcgcaaaatctaccagtcgatatcttttcgatttctggccgcggtcttcctgatacgctaaccagtaataatattgacgccaactttactcaatgcgcactcattccggcatcaaatagcacgtcacgtttgaagctgggggttgtgaaaaacactgacggatcttttgatgtttatttgctatcgcctaacggttactttcccgttatgtggttaaaccgtttgaacgtgcaatctaataatgggttgattaccgggccgatcatcgatcgcactggctatacgtggattacaacggagccagcggggattgtatacaattcacccgctgattacctggcatctaatgataatacggttgcccgcaccaacgtagctaacacgttcagccagccgcaagcgatctccgtccctggtggtaacgctacgctaaccctgaacggtgccgtagttcgggccaataacaacaacgcgatcgtttactccatcccggaagacggtcaaggcatgtacttccgcccgaatggcgatatgaacagcgcgaagcaggttgtttttgatgcggcaaactttaccgttaccgggttaaatgccactttcagcaatgcggttacgatgttaagcacgctccgcgtcaatggtgcatctaaccttcgcggcggcgttgatgttacgtcgacgcagaagctgcctctgaaggagacgacggccacgaacgggattggggttaacttcgttggggataacgcaactgaatgctctttcggcattgaaaatacgtctggtgggtctgctgtattccataactacactcgcggcactaacaatgctgcaagctcaaatggtcagctaattggtggttatggttctcgtccgtgggatggttctgcatatacggaacactcaaacgtttctcagcatttcttacaggatggcacttgttcggcaacgaaccacggcggctggttcaggctgttaacaacaccgcttaatgcaacgatggataatcgtcgtcagacgtttgccaccagcaataacggtgatctgtggatcggctatgatgttcctatgggaacgtacaaaatggaaggcatttcttccggggcatcggagccgcttagttggaatggtcgaggcctaaagcagattaacaactcatcaaatgagttgaacttaatcaccccgcgcaatggtagcacatcaagcaccgtaattcgcgcgaactcatgcaatgggtcgctaagttctcgcgggtcgtcacagtcaggcgatgctttctatgtcgggtttggtgggcatgatggtaatgattgggttggcctgaaggccagcattcgatttgccccatcagagggattctcagcaacggcaactggtgccgggatcacgttctcaactacggcagttggaacaaccaatagggtagaccgttggaacattagcaacgctggcattatgtacccaggggcggacaatgcatactcgatcggtaactcatctatgcgtgtttctgctgtgtacgcagcgaacggggcaattcagacctcagatgctcgcctgaagtcagaagttcgtaagtttaccgataacgagatcgccgccgcgaagctgttatctcgggagattggcatttactcatggctggctaaacaggctgaagaaggcgaaaatgctcgcgagcacatcggcctgaccgttcagcgcgccatcgagatcatggaatcttgcggactggatcctatgcactacggattcatttgccatgacgaatgggaagaggaagagatcattattggctatgaggacgacgttaatccaatcatgggtaaaaaggaggccggggatcgttacagtttcagatatgaccaattaaacttgttcattgcaaggggtatcgaagcgcggctatcagccattgaagaaaagttagagatgtaacaaaggggccgattggccccttttcttttaatacatgttttcaataatgggaacgctcatgccgactaatcgatcctggacgacgctataggttgacgtccagttagattttgtaatgccgcttgcacatcttacgctattgccgctcatcattaacccagcaaattttgccctacaacgatcaccactaacgcgacttctgaatccatacctgcccagcaaaatcattccctcgccgatatcctgataatcccacgatgggttatagaatcggtttctgaagataaacggacgtcgaaccgtggagaatgtgcattggcccgccgcgttgaaaaagttcagtccggttccagcttgcggcgcaactccgcttgcgaaaatcgccacccgcattgttaccgttgcgtcaccttcagcgccgttcgtttcattcctggcgtagatgttgtttccgtcatattcgaccgtcacgccgtcggcgctccagcgagcaaacaccatatacttattgcggtcgtatccggtatcgggagtttgccattgccctgtaaacgtgatcgttccggcccacacgcaaaacccggcccgcgttgagtcagggattgccgtaaagtctgtggaatcggcaatgtataacccctggccgctggccgacggaaggatctggcagattgtcaaatcatagaggcggtcacgaccccaattatcagaccaccacgtagaaaacgtaagctgggatccgttctgcgagtacccgctttgcatcccgatagttggaacaaggttcgtccctctgttctggatggatactggatcgcgagggatgacgataatctgcgcccctggcacatatccatccacgttaaccactttctcatcccacgcgttagcaaccaggttgcaaaaagacgggcaacgcatgcccgccgtgatttgcatcgccggattaccatcattgagatcgataagtaaaccgcttgccatattagaacctccctaaaacaattcgcccgccgccgtcaaggttgacggtgacgccgttaccgttgattaccacaccgtttccgccatcaaatccgaatttaccagacgcagcatacagctcaccgcgaacgacaacgttattaaattcagaagcgccggatttgttgatgctccacccctgctggcccgaaatgaagttgttggactggatatactgtccgatcttggcgttggtgatcgaaccatcctgaataagcgcgttattcatgaacacttggtcattctgcacaacaaacggaagcgtgtaagcgccggatgccgcattgcggatgatagcaaatctatcggcaataaacagcacttgcgaaacaacgttgtttccttgtgctgtaagctgtaacgccatccctgaattgtattcctgtccgttatatgtcagacctaacttcattgtgtacatggaaccgacgccatcaacattggcccacgaatccagtttttgcgccagcgctgcggagttctcgccgattttggcatctaacgccgcctcagacgttgcgcgcgcttcactttcgtttgcgatcgcctcgttgacctgcgtaaacccggcttccatatcctccccaaattgcgtttgcaactggttgatttgggttgctcgcgtttcgctttcatcagccagcgcttcgttcaggatcgtaatctgcgacgtgatatcttcatcaatctgcgttttaagctgtgtgatctcagccgcccgcgcttcagtctcgttagcgatcagcacagtggtatgcgagatttccgccttacgcttgccgttctccttgcgcataaccctgacgtctgcatcgttggctaacgcgttctgaatgatgctgttcgcgtagtcgttgagtttagaagcgctgtcctgtgcgctctcctgcaactccttcatggcatcgctatccagaatttcatcaaggatctggttagtgataaggctaacgtcagtcgatgacataccgcgagcgtaatcagtccagggtgaaacgttgccgatcctgtcaacgcttcgtgccttgtaccagttcacatagccagcgggcaaaattgagtgccagtattcagccgccggataaggaatcagagtaagcaggcttgcatcctgatcggttccgctttgcgactggtaaagctcaatgtatgccgtgtcctctgcaccttcaggcatggcccacttaacgcgaatcccaaagatttcattatccgacgcgaaaaggttaattgggcctttcggcgctccaatcttcccggtcagcgtcgcactagccaaagcagaccacggagacgcgatattgccgccgctaatgcaccttacgcgcgcctggtattcgccagcataaatcccctcaatatcaacctgcgttgtcgctgtgcgcggcacgttgttccagttgccgccatccttacgccattgcacctcgtaaagttttgcgtactgcacggcagaccagccgattaccatcgtctcgacgctcatcccctgcacaattcgtgagaatgaactaatcgacacgttttccggcgcgcccattgaatccgggtcaacaaccgaagttgggcggtcgtcagtgattacgccgttgtcgatcgcgtcgtacttgttcgggttgtattgggtggctgtgatggcgaaagtaaattcgtcgtcatcgctccccttctcaatcctggtaacaacgtactgttcagccgccagttggtcactttcgatcaggaatacgctgtccggcgcaacgtcgaagttatatcccacgtttagcgtcagggttttgccgtctgctgatacgctggcgatggttcggcgcactggcttgccgtcgtcagtgttcagaatcagcgtatcgcccgccttcgcgtcgcagcggaaagccaaaaatacctgtgttcctgatacttccataatgcgacctgacaacaccaggttaaatgctgattgccaatgcggatctgcaacgtaaataacatcgccgcatgacgggatcatgccctcaagaccagtagaaaacgaaacggtggttgcgcttaggttcgtttgcagaatccagcgcccgcggcggttagcttctgtccgtctggtgcaaccgatcgccgtgatgcttgtcgggttatgcccgaaccgcattgcagcgtcagggttaaatactggttcaacgtcctgctcgtactggttttcttcgtcgtcgaacatcacgttgcacgacgtgtacatcgttttttcgctcggaaaagttcgcacgaatacgccgtcaacgacgttatcagcagtgaacagataaaccggatcgcgtggcttgtcgacgataatcgaaaggctttccccgttgtagaacgtcattccacggaaggcggaacaaacatccctgaccaactggaacgcctcgacctgcgactgcacgaccatatccatcaggtaacgcggttccatcccgccgcgattatccggcacaagctcatcacagtattgcgacacctcatagagcgaccacttgtcgaccgggatccctaactcgcgctggtctaacccataacgctgattcatgatcaggtcgtaaagaacccaggccgggttgttgctccacgcccatttgaaagttccgtcccacgttccggcatacgtcctgttaacagggtcgtagttactcggaacctggacaatcttccacttcttcttgagcgagattgtcgggatctggttctgaaacagatcgctatcaaactcgacgtaaagcattgccgtcagcggatagcggaattttgcatcgatcacctcggcgtaggactgaacctggaaggcatcgaccaccttcaccccgtcagcgtccggcgtaattcggcttacgcgaataagcacctgcgacgtgaagtcttgcggaaggtttacgcggatgctgcgatcgtaaccgccagtcgtgtttttaccgtcgattttgtcggtcaagtaggtttgatagctcgcaccgtcaaccgccatttcgatcttgtactcaacgaccgaaccgaccatatcgccgttatctttttgcgtcagcacgcggggccatagcaggcgtaagcggatagcagaaagattcttgttcgataccgtcagcgtgtacggcgtgttaaaggtaacgtcgcgtgcaacctggaattcagcgcttgattcactgaagccctggatgtaactctgcgtttgcgtgccggggcgaaattctgcaataactccctcatagttatagctcccgtcttcgttctgaaccggaacgccgccgaaatgcaactgcttcaggctgaagtcatccactacttcaccgtcagaaacggccagcaataacttgatcttgtctttcgagatcaggttatcaggcatttctaccggggttcgcggctggctggaaccgcccttgcgggccttgatattagtcatcgtttagcctcctgttaatagttttgcaattgtacacgacaaaaagcccggaggctatgcccccaggctaaaaagcgaatcgcttaattagttgttgtcttctgcgtaagatcccgaaccgaacagcgcaccgccagccaatctgtaaccgtatggcaactggattggataacccgccgccgtggtgttaattggcccgccgaaagcatacgacggtttattttctggcgactcgctcgctcgcatatttccgcccatctgcggtgcaatcatctgcattacgccacccaaaaccattgagccaccagccataaaagccgccgatgaaaaagcgcccattgccgccagtgaaccgccgccagtgaagaaggctgcaaccataatcgcagcgccgataacgatctgcaacaatccgccgttctttctggccttcgggatggggatgattcgaatctccttagctacggcgaacgttgcaaagtcattcgtgctgattggttttccgtcagcgacgataccaaagcgcatgtttgaaccaactttgctctgcatgaaaggcttaaacccttccacctggtaagacagcgcccggatacactcagcaaccgaatcaaccgcaagtttgtggaatacgccgaaccgacgcccaagggaaccagaaagtttaatcgtctttgtatgtgatgccatgtttaagatccttatgtctgcaaattaaaaccttgtgctgctcataccacccggaatagatatcgcggcgggatagcttgccgaaggcgtggtgaaggatgttattgtttccaacgtaaatcccagcgtggttccacttgtccgcctgaagctggaagatgatcatatcgccgacttcgggatcgccagtgttttcgatgaatccatcttcgcgccagtagtcgcggtaaagatcctctttgtattccggcttccaccattcgaacggcaggcggcgatctttcagcgtgacgccgtggcgcttgtgaaaatccatcaccaggccgtagcaatcatacgcgcccaaagcccaggggcgaccaatcagcggcctgcgcttcggctcgataatacgcatatcaccttctggaatcgacacgataacccacgacaagccagattcatcacagaagcataaatctgtggcgctcggaacggtggttgccccatcgccagtgtgggagtgaacgaaggcgatcggctctccttccagtgacgccagcgcgtactgtgtttcgtccggcattgattcgttctcaggatccggcgaaacgttatcgagtcggtgatatttctgcacgcgtgatttctgcgttaccagacctgcgcactcatgcgggtaaacttccttcgcatgctgcatgatctgcattttgatttttggagttaacatattaccgtccgcttttcaaggttgcagtagcgcaaccgccaaaatccaaagcctcatttccgaatcgcaatctgcacgacgaaacaaggccaccgcaaacatcctggctgggatcatcaaccttattcccgtatttgtcaaagtatccgttttgcccgttgtaactgcatcccttcccggttttgtaccatccgcgttgcgcccaataacaaacggtttgagtcaggcgggccggaatcatcaagccatccatatcgaagacggacgttagttcaaacgtagccttctgcgggtcaacctgtttaggtctttcgatatagtaaacgaaccgccgaaaatcgccctcagcgacgctaccatcttctttcagcaaatccttgaccaaaacccataccgtaactttcgcttgcatgaggccgttgtaggcgcgaataagagcactcgcttgcgcatcaatattgctaaccgtcagcgttggcttttctaccgtgccgtcacttgacattgcgataccaccgatcccgaacgggcgcgggccgtattgctcgcctcgaaacgtgatcgccttcggtgtcagcgttccaccgttaaccgctgccaaaagttcttcggttgagtaggcgatattctcgttgtggaatcggtagacctgccctccgaacttcgtggcgtcaatgtcaatcagcgttaagatctcgccagggaacagcttttgcaggcagttcgcaaactcttttgaaacgttagttgtcatataaatttcctcctcttatcgactccagatcataggccaaaaaaaagcacccgtaaagggcgctttgtgctatccggctgaagagaaccgttccgcaaactctgctgttacttcgcataacccaccgcccagcggcgcgagggtcacagagtctgccgttacgacgaatacacccattcttccatctggtgccgtccagataaagggcttcgttacgtgatcctgacaaaaatcataaaccgcctcccaatccattccgccataaacgatcggaaccgtccggcgctttgtgttgataccactcgacgcggtttggatgtatccgttaccgaaactaaccgctcgcacgttgttggatacggcgactttcgccgcccccccttgaatttgagtacaccaggaaaaagaatccactgttaacccctcgttttctcgtttacgtatttcgcaatgcgtccgttttggctcaatgcctccgtgaacatatcattcacgatctgccttactccctgctctaagcccttgccatcctgaccggaacccatcgtgatgttcacgtcacccatgctaaaaaccattgctgccgatgccgcaacattcccgccattcgtcacaccagatcctgacgaaccgttagagcctaccagaccgccggaagcatagccacgcatcagcctatataaattttccggccctaatcggctggtcgcctctttggtaaagacgaattcgccgccatgcacaacgcctttaggttcgtacttgccaccgttgccagtatagccgccgttggcgaaccctttgctgaacatgctggcgaagctgaacgtaccgccaccgccgaacgcagcagacattgcattgaacagcgccattttgattagcatgctggtaatgtcattaataacgctttttgcgaagtcgctgaagctggccttacccgtcatgacaaaatcagttagcacagtagccattccgttaaatgcgtttttggtgatatccccgatattgccatacacgttattaacttcatcgccaatgtcagcccacgcgtgcgtgaagccagccttccagtcaagcatctgcgcatcctgctgcgcatagaacttgtcgcttgctgcctgcatctgcttaaattgggcgtcgtcaagcgagccgccgctattaatccagtctgccgacatttgcgcattcgctctatagcgctcctgctgtttgctccccatccctgcggtatcctgaagcgctttagtcttctcagccatctggttttgatacttcaccgacttgtcaagcaaggcgttcaggcgctgctgccggacaatctgatcgcccacgatcgctttctgttccgccatagcgatgatactttgcttattggctaacatctgcttttcgctctgcgtcagcttacgcttggcgctcgcttcttccagcacctggaattttgcgacagtggtaaagtagtctttgcgctgctggctgattttgtcgtcaagccctttgtgctgctgcaatactttcaactgcgcctgcaatgacagcaattcggattgatactgttcatcgatcttaaccccggcgtcggcctgctccttcctggcgtttcggttcttcaggatatccttttcttcctgattcaccttatcctttgtcgcgctgctgtaaccaccagataacgtcctgttctttgcggcgtcgatgtaacccatctcgccttttgcgatccttgcctgctgctccgcaatggtcttcgccagttccgctgatttggctttggaatccttgattagctgttcttgctgtgcaagaaaatcattcccaaagtcacccataccaggcactttctgcaactgccgaccagcatcaacgatgaattgtgcgatcatggcgtcgccatccgtaatcagtttcctgataacgttgatgatagatgaaacagtgtcaacgataaggtttagcgcgccgacggtgtgatcacctacccacttccaggagtctgcggcccactttttaatgtcagtccacatcgtttcaagcggtgttgcgctgtctgcgatatccttcaggcgcttatccatcgtgtcagcaaagagtttagttgccgcttccgctgctgccgtctcacctttggttttgcgcaaagattcgatgtaggttaactgcccttccttcaggaaattaaactgatcattaagttcagcaagccccttaaccggatcctttgcgatagagtcaaagtaaccagtaatggtcttttcgctctccccggtctgcgccgcccattccgccgtagtcttcgtgatcgccttaatctggttgatgctgtattttccagattgagccagtgacgttgcgatcgcctgaatgcttccgacagtggccgatgatgttttgttgatttcatcggttagggcggtgatttgcccggtagttgttgcagcatagccaccagtcagcaccaatgcattcgctagatctcgttgcgacttccaggagtcatacccagctttggcgatagccgcaagagcaacacccaaagcaaccgcgccaactgttagcgggttaatgtagctcaacaaaactttgaacgtgtttccgataccgccgaagctatccttgatttgcccgccttgctgaatagctactaaccatactggcatcccggaagcaagagacgttactacgtcagtgatctgcgccggaagttggcgcatcgccattttatattgacctgctgaaattccagcaagccccatagcattctgctgtttctttaacgcctgctcttgctgcttcagggcgttaatgaacggtgccgcttcagttgaaacgcctaattgtgccgccttcatttccagcagttcggcgcgagtcttgccgatcgaatccgcttgctgtttcaggctggcgacaaaatcacgcccggcgttggttgccttctgtttcgcctcagcctcagcaattgccgcgcggccttcttcggttagcgccaactgctgctgtctcagcttgttggtggtcgactcaatgacagcgcccaggcggaagaattccttgtccggcacaaggcccaattgccaggccttatccagttcttccgaagccttgcgcaagttagccattttcgagatcgtgggatcgatagcgctcgcgatgttgttgaaattggttttggccttttccgtggttttcttttggttctgcaacgctcggttcatttcctcagtctgcgccgtcgcgcgcttctcagcgtccgccagcgactgaagaccagccccggtttgttggctttggttcttcagttcggcaagtgatcgcaccgctctgtcaacctgcgacacgtcaacgccgaacgtcaagccagctactttatcagccatgttagcccccatatgaaaaaagcgcccgtaggcgcttattgtgattttttgtagatctgcttgaggtattcaccctctaggatctgcaagtcaagcaatgccgcttctcgattgtcgattttatacaattcaaagaacataggcaatgtattatagtccagccccgttgggccattcatcccaatgcgccattgcgtttgcatggcctggaatagttgccaactttgggcggtctgctcatcgaagaaaatttcctctaaatcagcctcgtaatccgatcgccgtaaaccatactcagcaagctggcgatcggttaactcaggctgaagcgttagataaacagcccgccttagacttttgcacgatgcccggcaagcgcggccatgtacgtttgaggcaatgccatgacaaaggaagggtaatgcgagcacagccaggaaatgttttcatccgtaaattcttcgtccagatcccaaccttcggccatgaagcggataaaatccacgttacctttcggcgctttttcttcgctttcataaaactccttcatttcatcggtggagtgatgttttaccgtcatgttgatggttgcatctttgccatcggggcaagtgaaagttaccggaagtttgaaggatgggagttcgccgccaatacgaattttaaacttagccattttgtaatctcctgattggtatgtgttgaatgctattatgcataaaaaaaggcgaggcacaagccccgccagtaaattatgcgaccaccggaaggaagacgtgcgcacccttgagcgcaacatcaagcgttaccgtctccatctcgttgacagtagtagtcggaatgtcatcgaatgatgcagtaccagaccaataacgaacctcggacgctcgcgggacgtacatgtacatcgctttcgcctctttgctggcgtctgctgcacgcagcaccgggtagattgcgttatcgtactcgtgcgcaaacgtgtagttaagcgtcaccgccgacttataggtaggctcggactgttcgcgctcatcgctcaggcactggtagttataatactgctgctcgttgccgtctttgcccaaatcctgaatgcaaggcaactcgatccagtcagtgacgacgctcacgtttccggttgcagccgtaggatatttgttggcgtcggaggtgtcgaactcttccagcgttgctacgcctgccgtcactgcttttacgcgagccaccttattaacaaagtcgccccaggtgcaatcggtaaagatcacaatatccttcaccttcagcttgccatccgctactgtgatttttgggtttttcgcgtcgttggtcattgcggtaaacggaatctccgcaccgcgagtcttctcaaagaagaccttagcaccgtttggtaaatgcatgttgaatactcctgtttgatgtttgattaacctcgccattatgcccgctagttagctggatggcaagaaattataagcgcctcgaatcgccatgcgtaacgccactgtctccatttcgtttaccgtcgtcgacggaatgtcatcgaacgagacgttaccagaccaatagcggttttcctttgctcttgggatgtgcatatacatagccattactgacttatcgcgctcatgtgctttcatgatattatacgccggatttcccggatcgtgagccattacataagacataaacagcgctgattttgtcgtcttctgtcgctcctcccttccgctgtcaaggcactggtaagtgtaccaattttgctcgtttccttccttgtcgattgactgcacgcaaggcagttcagcccaagatagaatgcggcgaacctttccaggcgtgggaatgtaactgccagcgggcaactcattcgctctgtactcaggccataccctaactctcgaaacatctccattaacagatctgattgaatacacgttaccttcgatcagcttattgtcgcattcggagattacgacgatatcgccaacaccaaaagcgccaactccagccgcctgattaaatacgaatacaaaagtgtcagggattccaacatcggttgtgtcaagccacttaaaatcgtactccctctcgttgcttgcctcaataaaaattttactcccgttaggtaagtgcatacccgctcgcctccattgtctcacatcttaccgtaaagcgaaccgggaagaaccaacctgtttgcgccttctgcactccgtgaacttgcgcccactcgcttacgtaaagatctaatttatcgtctcctaagattttaccttcggggaaatattttgcaacgctttgcgcgattaaccttgcggcgtcggtgccgatgccgggtttaaagataacatcgatctgaaccagccccaggtaaacacggcactccctggaaaggctaacagatcgggaatccgcttcgatgtaggaaaatttaaggtgcgttccgccgttggctggcggcttaaagtcaacgttatcgctcgcgatcataatcccgttatcggcggcaaatttggccgctgctgccttgcattttaacgcaatatcatagtgcatttttcgccctcgctcgtttgattgcttcagtcacgtatacgcccaatcggatcgcgacgactcccataacgccattcggcgcttgttttgagtgtccgtattctagcgcgttcgcatagattagcatgttactgaaccagatcgaagtaatcccggctccctttgtgaacagcgcaatgttcgcgttgccgttctggatagtcttcgtccctgtctggtcgtatgcgttgatggcgtaaagtggcgcacggttaaaagtgatttgccagttgccacggaagcggcctgtatcgaccggagagcgcatcacaagatcctttaggatatcctcgcacgtcatgcgtacaacgtcctccagcgcgtccccagccgccttgcaccatgcatcaatagcaccagtgaactcccggatggtgtagttagccataagtcgccacccttcgcaaaacagggcggtaggcaacaacggttccggtaggtttcaccgggcgggcattcactacgcggtaacgctcgccgtcaacgtcgatttcgtcaccttccatgattggtacgtcgtgagtgaagaagccgcgcttgtcgccagcgaggatggtttcgccattgatatcgcgatctttgatatcccgcaccgcgcctttgattgtggtcacgacctcgccttggatgatatcctccccggtttcggggtcgatgcctccgccagcgcctttggtgtactttttgtacacgccatcggaatcgctgaaaaacttaatgcccgcactcgcgcgggcctgaattgctttgtagttcatggcgtttagcctcccatgccgcaacgatgaagaccgccagcggtcataaggccgaagccgccgccgcgcattttcagcatgcgccagtacattttaccccacggagttgatagcatttcgttgtcactcgccgaagacacgcgatcgaacgtttgggaaaactccccggtcagggtgaatgacgctacacgctgcgagtatgattcaatgctctcgccttcctgtttcattgcgccgtccagaaacatcaggtgcatggtcatcagcgccagcgccgtaatgatcgaatcgccgaactttgaagcgcatacgaattcctcagccagcaccacccatgcggttaacagttcttccggtacttctttaagcggcggagcgaggctgcgcattttgtcgatcacatcttgaatcgtgtaattcatggtctttctccagatatgaaaaaggacgccgtagcgcccttgttggttttttattcggcgctcgtaggctgcacgatggtttttgctttcgctttcactgctgcgatgtagtcgcgagtgcggcgaatatcatcgtggaattctacgcggcctttgaagatatcgtggcggaagcggttaacttgagactcttcgatctcgaacgtttcacccggcagcacttttttgccgtcgaatttaatcaggcaagcgcccacgttttccattgttaccatatccggctttgcggtttccggctgtgaggtttccggcttttcgttgatttccggttcgatggtagcagtatcttttttagccattttatatctctcctgttttggtgaggtttgatttaaacacaacggaatgtttttcgcaacaataaaaaatggccccgaagggccattctaattacacgccagaaagaatggcgatggtcagcggacgatacacgatcaggccagtacatttggaagtgcaaggcactttgaaatgcaggtctttcggctgcatcggcagcatgttgaagcgttccgggatctcgatcgacatattcatcggatctttttcgtatgccagcacgcctttagtacctgcgccgtcgatatcttccagttccgcaatcgcggtgatggtgacattcgggtagttctctttgaaccacgcgaggtaactttccgtaacgtccggcattttctgcgtcagcaggcggcgcttggacggcgggatcacgatgttggtaacatggtgacgacccagcgttacatcttcgatcgtctcgatcagatcctgcaactcgctgaatgcgatttccggcgtagtccagcttgcggaggtcagacggttaatgttcggctgatcgaacacgctaacgatgttatgcggcgcggaacctttgaacaccagatcgttaaccagggtttcatggccttcgcgtgcaagagacgctttgcggtcgctcaggctggaacccagcgcctgacctgctttgatttcgtcgatggagataaaccacgcgttacccaggcggaacactttgccagttttctcggacgccatcgcttcaacggtcggcaggtcgtcggtataatccgcgatgattttcgcagaggtcacgccgtcaaactccagccattcaaagtttttcgttaccggactcagttcggtagtaaccgggaaaagctccagcacaccagtttgcgggtaagcctgctcgtactggcgatttaagagttgggtaagctgattaacagtccagatgccgtgcgcgtcgagtttgttagcgtcgatgcccataccctgcattgcaaccttgattgcattctgctcgaatgcatctaatttcatagtcatttgaaactcctgtttgtgtgttttgacttaacgagatgaagaatagcacgaatcgctaaacggtcaaaggtttttttaacgtatgaaaaaggggccgaagcccctatttttttactcgccaccagcggcgggagcggctggcgcggttgcgtcctgcgttaactggattttcaccaggactacgccatctttgtttttgaaccactcgccagtgtgagtgtacccggttttgattaggccagcatcgccttttgccacggtgccatcatcaccgaaagttaccagcgacttaaaagcacaatcggctgcggttacggtagatgcagcgcgacaccacacgcggccatgcgtcataacgtttacggcggaaaatttgtcgtatttgaattccggcgattggtaatgggaatgagtggttacgcccaccagaacagcatcagcagttttagcggtatcgaccactttatgaccatcaacaacgccaccggacaacgcgaccagaacgccagttaaaatgtcatttgcagcggcacaggtgccgtcgatgttgtacagcgaagtatcagcgatctggcccggaatgcaaatatcgcgcttgcgggtataggttgcaggaattgccatgattaaatctccttgatttggattttgtagcggcccgaaggccgcacggtattagttacggaatttagcttgcgggtcgatgatgttggaaccatcgagtttcggcgcgcctttcttgtcttcctgctcaccatcttcttttttggcgaagactttagagcgattgcttgccatcttatcagaattggagataaagtcaaaagaagcgtcgatatacgaatcttctttatctgacaagtcgcggccatccgcttctttgatgtaagcaactttcatcgctttaacgtccaggccgtcgcacttgatgccagcggcggatacgatcgcgacaactttctgcttcgcgtcttcgtcggctttgattttggcaacacgtgccgccacttcatcttcaatgccatcaactttggtttgaagtgcgtcgcgctctgcggtgatgctcgttacctgactggttgcggttgcgatctgtgcgtccagtttagcaatatgtgcgcctacgttatcggctacttcgacgtctacgccgtcaattttgataatcatcgttttagctcctttgtggtttgagtcgtcatcatagggaaattcttgctcactatcaagatttaatttcgcaattcctgcacgcccgcgaaaaacaagcgccacatggttaacgcgaatcttcgtttgcacggcatcaaagcgaacccaatcagagacggaatcgtttttcagttcttcgaagttttccggtaggtcttcatcgaagtagtattcgcccgtcgcgttattgccccagccttttt

SEQ ID NO: 11 - DNA, 48634 bp, unidentified
  source 1..48634: mol_type = genomic DNA
aaaaggacgccgaagcgccctttgttggtttttgttattccgcgcttttaggctgcacgatctctttcgctgtcgccttcaccgctgcgatgtattcgcgcgtgcgtttcggattgtcgtagaactcgacgcggcctttgaagatttcgtggcggaagcggtcgatctcgctttctggcacttcgaaaacctgctcatagacgtaatttgtgcctttatagcgaattgcacacgcaccaacgttttgcagttgaacaacctgcggagtctgttctgcgctggtgatttctgctgtttctacggtttctacggtttcttttttactggtcattgttaatgctccattggtttactttaggtttcaaattaaagcacattgcagaatgcaatgcaataaaaaagcgcccgaaggcgcttttgattaaatcccggtgagaatcgcaatagtcagcgggcggtaaacgatgagaccagtgcatttggaggtgcacggaactttgaaatgcaggtctttaggctgcatcggcagcatgttgaaccgttccgggatctcgatgctcatgttcattgggtctttttcgtatgccagcacgcctttggtgcctgcgccgtcaatatcttccagctccgccatcgccgtaatggtgatgttcgggtggttcttggtgaaccaggtaagataagagtcgccgctagtgtcaggcatctttttcgtcagaagacgacgcttagacggaggaatcacgatgttggtcgcgtgatggcggcccagcgtggtttcttcgatcatgttaagcagatcttccatatcttcgaaagccttttcagccgccgccgcatcattgccccatttagcgccggctgtcttgcggttaatgttcggatggtcgaaaatgctaacgatgccgtgaggagcggagcctttgaacaccagatcgtttacgagcgtctcatgaccttcgcgggccagagttgctttgcgatcgctcaggctggaaccaagcgccgcgccagttttaatttcgtcgatggaaataaaccacgcgttacccaggcggaaaactttccctgacttctcttttgccatcgcttcaacggtcggcagatcgtcggtgtaatcggcgataattttcgcagaagttacgccatcgaattctagccactcaaagcggcgggcggtcggcgagatctcggtagtaaccgggaaaagctcaagcgcgctggtctgcgggtatgcctgctcatactggcgattcagtaattgagtcatctgcttaacagtccagataccgtaagcatccagttttgcggcatctacgcccatggcctgcattgcgaccttaatggcactctgttcgaatgcatctaatttcatagtcatctgaaaactcctgtttgtgtatttagcttaacgagatgaagaatatcacgaatcgataaaccgtcaaaggtttttttctggtgcaaaaatggggccgaagccccttatttgttaaacctcaactgacggagccaccgcgccctgaagcacctgaactttcaccagaacggtgccatctgcgttcttagtgtattcgccagtgtgcttgtggccagttttgataacccctgcactacctttcgcaacggttccgtttgcggtaaaggtgacgaaagtatcaaatttgcaatctgcttcagtaacagtggcgtcagcgatcgcccaaatgcggccatgagtcataacgttaaccgcgccatcatcgtcatacttgccttcaggcgagtaggcttgcgagaactgcgcaatgcctacaatgacatcgctcgctgatgtcgctggcttaactaccttgtggccgttggaaactttgccagtggaagccaccagtacgccagccttgatatcgccttcagcaacgcaagtgccatcgatattataaagcgacgtatcagcgatctgccccggaacagcaatatcacgcttgcgggaataagaagctggaatctgtgccattttgaatctcctgtttatttggtctggtagcggcccgaaggccgcaaattattagcggcggaattttgcctgcgggtcgatgatttcggtgccgtcaagtttcggtaagccgcctttatcttcctgctcaccgtcttctttcttaccaaagactttcgagcgattgccagccatcttatcagagttggcgataaagtcaaaagaagcgtcgatgtacgaatcttctttatcagacagatcgcgaccgtcgacctctttgatgtaagcaactttcattgccttaacatccaggccgtcacacttgacgccagcggcagaaacaaccgcgataactttctgttttgcgtcttcgtcggctttgattttagcaacgcgtgcggcgacttcatcttcaatgccatcaactttggcctgaagcgcgtcacgctctgcggtgatactcgttacctgactggttgccgatgcaacttgtgcgtcgagttttgcaatgtaagcgcctacgttatcggccacttcaacatctacgccgtcaattttaatgatcattgtttttgctcctttgtggtttgagtcgtcatcataggggaattcttgttcgctatcaagatttaattttgcaatcccggcacgcccacggaacacaagcgccacatgatttacgcgaatcttcgtttgcactgcatcaaagcgaacccaatcagagacggaatcatttttcatctcttcgaagttttccggaaggtcttcatcgaaataatattcgccagttgcgttattaccccaacctttgcgatcgatatcgaccgaagtgtagcccacggacaactcagccgctacgcgctttttggcttgctcgattgactcgccgtcgtaaatcatcaccggaacaagaacaccaatcccctcttctttgccagcgccggagcacgagccaacgaccaggccttttgcgttctgcgcgttcaccatcttatgacccaaagtgatcggcttaccctggtatgaagccagcgattcagcatcaaacacctcagaacgcgggcggaactcgactcgctgcccggttggcgtctggtacgtctgcgcaccgatacgcgccacgatcggagtatcaaccagaaagccgttctcatcgaatcgggccttcatctttaccgtgtcgaacctttgaactcttttcatcatgatacctctacattgttaaaatctggaaccgcccagcacctgcaaccgtactcttcaccggggaagatgccgtcaccattaacagggcgtcgcttaccttctagcttgatatggctctctctctcgcggtcgtccatcattccgaaccaaaagtaatgcgatactttagcatcttttaggcgctgcatcatcaacatactgttaaaagttccgatgattccgcttgcccggttgcgcgaccaactaccataaatagcgtatcgaccttcgatgatttcatcgatctgctggcgagacttgccaatgttgttggcggttctaactttcgttgtccagtcggctacgatatcgcttgctagtttcctgattgacgcttctgcggaatcctgccactttttcagcacctcctgataccagtcttcatacccaccagcaccgaattctttaaggcgcataactgattcgttgttccgaccgccagccgagatcgcaatgatgagccactgcttagaattgaacttataaatggttaacccgatggaagcaagagccgctattacgaccgaaaagaacgtaatggctgattcgctgatatcgtcttccgtctggctgatttcctccgccgtagcgtcaaatttaaggcggtctaagcgatcgcgcatttctaccacgagttctgtcaccgcgtcatgcattgagcgggataactgcctttcacttgcctctggatatctccaagttttaattgccgtgattttcatgaaatttaaatctcctttccgctctaagtctctcagccttagcgtcaatgattgtgcaaaagtaccctagaaagatggtttttctattaaccattatctcagctctgtatttacctcttggtgcgtaccaccttacaccaacaacgccgctcctgctatttgaaggtttagatctgttttttgagttttctttttttgttaccagtctaagattacctattctattatcagtcctattatggtttatgtgatctacaacaaggccgcttggaattttacctttatgcatttcccacactattctgtgagcttggtactccttaccgtttagctttattgagatgtacccattagacactctcccggcgacactgccagcctttacgttactcctcgacttagaccagtacagaaccccatctaagtatttaagatactcagaaaacgggggcgaacccccatttttatcattcatcatccgcctccgtgttgtttaagatctctgcgctttgcgtgctgcctgaaccattggcgcgatccggaagttttttctgtttcggcgcgttgccttttagcttcagttctggaatcaacgccgacagagtatcacgcgcttcgttggcgtcaataacctggtcggtaacgaggccgcgagccgcgttggcgttcttctggaagatatccgccttctccgcatcggtaggcagcgacaacggttcgaactcgacgctgtattcctcctccgttacgatgaactgtaacaggaattctaaaagcggcttgtaatcgtcattgcgcttgcggtcaaccagtttgtagaacgtctgtagcgccgtgttctggcttgcacttacgccaccagtgtttttgttttttagcacgatctcgtgaatgcctgacagggcgacaatccgatccattttcgcagaaaggaattccgggatgcctgaaatatcggagttgataacggtgtactcttcgtcgtccgcatcaatgccgatcgtgtttccgacgccggaattagcatcaacctgcgccatgcgcaaccgggcggcgtactcgccttctttgtcgtcgcagattagcgccaggcctttcgccttccatacgccctgctgcttgcgcttcagtagctgcgttgccagatattccgaatagtcgtagtcaagaatcgcttcaatgatcgacttgttcagcaccgaaccaccagcgccattatttagcttgcgcaccttgttggttactcgctcgccgtcgatgtagtgcatacgggtataatgcaccttgaacggttgcccaccgttaagcggcttcacctcgtacattttaggctttccgaatcgtgggcttcgtgggctggtttcctcctctgcgacggaaacggaatcatggtcgtaaacaacgatcgattcgagcggcttaccacgcttcgctgccgaagtcaacgcgcgaccatcgttaaccatcgccaggacgtaggagccaccatacagccgcgcccagcaaagagcatcggtgatttgcggctccagatttaacccgtcccattctgattggaacttggtgttatctgaaatgccgtttagctggaagccgggagcgaccatctcttccgggatcacgtcaacgattttcttcgccatgccgttttcatgatagaactcttcaacctgcgacattgttccaaatcttgccgcgatagacgcgagtgttgacgcataaccagcgccaccattgaagatctggttgtagtcatccattttaatgttgttcatatttcaaccttgtttaagtgtgggccgtcaggcccacattatgtattagcgacccagctttttcaatcccgcaaggcgtttcattcgctctaccggatcgtcgctcaggttcatttccaggtttgcggcgtcaaacacgttgtcgcaaatatcatcgtgtggatgagaatcgtcatatgtaaacgcgctcatctccgcctcaagctctgcaacgaattggtgattgtccggcagcacgacacgcccacccttgataattggttgcgcatccatagcgcgagtgaccttatctttatcgcgctgcaccgggacgatctcgcccatgccgtttaccgccttcgttaaatcctggattagacccgtaccgctcgccttgtcttcgatgtagatccggcgaaggtttccgcactccttgttccgacgccagcactgcttgatgaatgcttcggcctgaacgcggagatctggcgcttcccattttccgcgaattccgtcaatgaagtagacgcgatcccgatacttgccccaatagcacattacagagtagtcgtttagctccttgaccttctgcgcggtgtccgccgtgatgaacgtatattcgaacttgtccgggcgcggctcgtgcgccttgtcggaatcgccgtaatagcgccaccactccgacttgaacacgttgccacccagggcgatcggttcctgctgatactgcgaaaggaacgtataaagatcggcttcgcgtagcgcaaccaggttctcgatcgattcgttttcctcccaaaatgaccagtattccacgccgtcaatgaccaccgacgggccggaaagcacgtcgcgctcgaactcaggtcgcaaccagtcagggagtgattcgccatattcccgcgttaccatcgccggaataacaatgcgatcgaagtcgatggccatccctccgctcatcatgaaccaggtggaatcctgcgcgtgcaatcgctgctgcacggaaaggattggcgtttcgtcgcctttcttcttcttcgctcgacgggatcgaatggtgttcttcagtagtacgtggtttttctcacgcttcaccttcgagaacatgtcatccggcttgtcgatatcatccagcgcgatgaggccgctaaacccaggtgtcatatacccgccacgcttaccgacaatctgaccgccagacgaacgggaaaccatttccagccttacgcggtcgttatcgtccatcacctgaaattcatcgatctgcttgcgaccgaactttgatggccatagctcctgccactcgttagatgagaagatcttaatcacgcgatcggagttgccttttgaaagcgcgtcaccctgcgagatctgaaggtttcgaaccttccggcatttaagatacgcatacggcgcgaggtggattgaaaacgcctccgtctttgtggagcctggcgcaacgttaacgatcgtgctcttgcgatttccggagataatttcatcaaccgtgtggcaaaagtaggagtgatgccagttccacattagcttttcgccctggatgatctggaaccaaatcttcaggaatagcgaaaagttgcgcgtactcagcgccttaattgccagcttatcggctggcgacaggtcttcccaaatgatcatttcgttcatatctgacccttacagcttatcaagaatattggtcactgccttctctaacttctcttcggtgatctcgttcttatccccggcgatagcgtcgatgttcagcactggcggcttatcgatccccatctctttaccgacgaaagaagcgttaatcatgccgacggcagcaagctgaaatttctgctcatagatcacggagtcgatgaactccatgacgggggcatagttgggatcgtggcggtagcgtgtaagcgttgactggttcacgccacaaaacaggcttaaccctgttagcgtaaaaatgcgcggcttgttcaccccccactcgttaacgtctccctgaaacgtagccgtctccgccgccttgattgcgttatcttcggcccactggaagtaacgctttgcgatatcaaaaaattgttccggcgtcatctctgccgtgcgccccagcacaacgccgaattctttttcatacagcgctttgaagttacctgcaaagtgcgacttcgttacgcgctttctacgttcttcagacatttgtaatcctccttctgtgttgatttgcgagtatatcagattgcgggcataaaaaaacccgccgaagcgggctcttgtatcatatcagtttgtttcgccgattcagcgtcttctggagttttacgaaaggctcgcagtcaacatacggaagcggcgaaaaagctattcgttttgcgacaccttccgggtctccaactctttcccaacgtgctgttttcttgttgtagaacatggcagcaaaagtgccttcatgtacccgctttgaaaggcgctcgacaagatgagccgcgccaacgtgatagcctatgaacagcattaaaaaagcaataatcagagttaacattgattgacttcccttatgtagttgatgttgattttatgcgtgtccagattgacgccggattgcttttttgctttctctaccgcgtcggcggtgtcgttcgcctcaatcgtcatactgaactcttgaatgcaggacttgcaaaagccgcccatttttcttgctgtgagcatgattttatattgcatcataactcctgtgtaaacgcccctagccggggccgggcttgcggatatttgccgcctcttgtgtctacgtggttcaagttacccggtcagtgcgattgcgtcaataggtaactgaatcgtttggctgttttttattcatactcgccatccctgcgaccgaatcggccctcaaggtagccagctatccagataaactggccgcgagtaaccagcgtgttgatttgcgcccaatgtttatcgatcatcttcgcggcgacctgatcgtaggtcttcttgtccttcttgatggcgtcttttgtttctgcggccatctgctttgctatgcgcttcacggcgttgtactgcgcttcattcagtccgaacatttgtccttctcccattctacccaggttccgcgagcaatgaatacttcaacccgcagcggactattgaaatttttgtagatgaagatgaacccttttctgctgtccgtctccacctgcgtaacagggaacgccagcggcttgatggcgtcgtccgaatcgctcatacggataccagtaatcgttgcgccaatcggcatatcttcgacttttgagtattcaggcatacaatcgcactccttaaatttgcgcccgccagaatggcttacatgcgctttaaatggcattagatttcgttaattttttacatggtggcaaggctcgccatctttgacctcgccccacacccggcgcttgttccgttccagcttttccgccaccgcttcagccaactgctcatcactgaatccggcgcggcgcgttgcgtcccataccaacatgatgatatcggcgaactcgctaatgtcatccggcgcttctgcggcctcaatagcctctttcgccaggtgtttgagcggcccgactggcccaacgtcgccaaactggcgatccgaccattccgcgtgctgcgcccgaatattggtgaacgtgtcggccttcacttccggctcctcccgcaggcattgaaagtcgctccacgtcttcgggttgtgctgcatctcacgcaggctcgctaaagcgccgttgatatccatgccttccggccagttcaccttgaacgcttcaggcttgcggagatactcgacaagatcaccaccaagaacggtttgctgcctaaccgcctgctctttggtgtcacatatgaggcggcgcgatttgcgcccctcgttggttccgatagtgtaggtcagcaccaaaattttgttgctcattcttccacaacctcgcattcgtctgcgctcacgctgatattgtcaccagcctggataaactcgctattgcgaggagcgataacacagtaggagccgtcattgaagtagccgtcgacctcaagaacttcgccgattttgaggccgcattcttccagggtaattgagccgtcgccgttaagagtgtctactttggtgattttgattttcattgctgtaactccgtttcgtttcgatggggtaactataccagcttacccctgatcggttttagcaattcgtgctatttggcaggccatccatgactttcagtttaacccactcgacgcgaccctgcgcctcggcaatgcctaactcataactcgctccattctggtgcgggcgaatacgccagcgcctgccgccctcatcgcaccagtaatagaacttcccgcgaaagcgcacgttgtaggtaaagccgttgaaccacattttgatattcatgtatcgcctcaccacttaaaattgcgggaaataatcacgctgccaacggcggaaagtgtaatccagggccagcaaagcacaggataaagatcttctttgtcggtagaatccgccgatttcaggaaggcccgcatgaggaaacagccgcacgcatacagggccagaataagaacaacaagggcaataattgcgtaaatcatgatgtttttccttgtatttgatgggttgccatgcagcaaccccgattcgtgtttgtggttcgtgctattgctgaagtttggcgaatgcgtcggccatcatgcgcaaaactcgcgcgtgatcttcaacgtcatagccaggttcggtgcgcatgatttcccgaaccttctcgatcgtggcgatagccgcctgaagttcaccagtcaggaacgcaacctgctgttcaagctccgcgattcgtgagaatggttcacgcatgaatgattcgcacgacgcatcacttaacgcccaaccgattccggcgcgaacaactgcctttaacagcgggtcggcgtcgtctttggcttggttgtcggacgggatcaggtcaacgatgcaggcccggctaatgaacccgtccccgatggttgccgcgttgatggtgagcgactcgcgcttgctgcaactttcgatcgggtactcaatatcgaagcgatggccaccaagatattgcgaagatctttggtttacgtgatactcgcgcccgtagtcatcgctgaccctgtacagcatttcgccggaacatttggtaaatgcggttgcggtatagcgcttgcctttggtgaatttcgcgtaagtattaaccacggaatcgacggacgggatcaggatgatttttggtttgttcatgggtaatttcctttgttcgttagtgtgtggatagtatgcaccatccccggacgttcgttttagcaattcgtgctatcaaagggcgtctaattcagcctcaatgaattcgtaccactcgtggccgtttactggatcgtgttcggttccatgcagccagtccgtatgggtggaacaaaattcgccggatttgttgaaataatagtcggcccatgaccgcgcccaatcgcctacgcccgcgaacgttccgaacttgcggatgtatgcatcggtgtaaccgcgctgcttcgctatgcgcttcagtgcgcgaaccagcaacttgcgctgcgacgccttcgatactttacgcaggtggaaaagcgcgtgttccggctcatcaccaacgcggatggtcaagtcttcgtcagtgtcaagcgggttgacgatgaattcgttcaggtatccaccctgtattacgtggaatgctcctttcgggtcttcgatctcgacggcatcgaatacgcagccgataaggtggcgctcacgttcgcgggccacgttgacaaccataagtttgacggtgttcattagcggatctccttcacctggtgaacttcgagaaggttggttacttcacggatgccgcagtcttcgaattcctcttcggcccctgccgccacccttaatctggtgaacccggcgtcatcgtcgattgcgacttcaataacctgctcgctcgaaagctcgatgtatgcgcagccgtaggaattcagttcttccagcagtgcgattaaattgtcgttcattgcgttgctcctgattggattgttcacttcagtaacgccactttatcaaatgacgttacggcagttttaacaaaaagtgctattctttttcgccgctgaacgctgcccgatacccacggcggaacccgttaatctcagacaggcggcatacgccaataatcatgcacagcattccgatcgtctgccagcctacgtggtcatgcagtaccaggccgcccaagaagaaggcccaatacagcgcgagtttctttttgcttactttcatactttcacctcaaataaaacgttgttttcatatggtctattaagaaacatcgctatcttttcgtccggcatacggcacgctaaccagttttctcccaactccgttgttttcttgtcgtcctgcaaaatccatacttcatcaaggccagggccgaacctggcttgatactccttacccaccgtgaacagcggaataagtggcccgtaacccgcaagggtgcaaatcaatgttactgtttccattagtagatcccgttagtccaaacgtagccgtgttcgattatctcgcgcagcctaacccttttcggcgatgggttaaccccgtcgccaccagtgtagaaccctgttccatacgcaaaatgaacctgctttgcgaacagtccgccgcgcgcctggatgtaaaggcggtttcgtctggcaaaacttataagcgtcctgatttgctcaaacggctcgcccttaaccttcgagatcttgcacatcactggcttttcgccaaattgcccggttaagcagtggcgatcgaattctgataaacgtatcatacagccacctcaaagctgatttgcgaagatatgccagacgtggcttttcggcgttcgcttcatgagcttgtgcgccttgcgtgccatgcgcttatagtcgcgggcggtaagtttcgttgggtcggcaacgaacgattcgacaatcaacccctcgtaatggtattccggcagccattcccgatgggttcgccactcgttgaaagtggttagctggataacggaatgcaagtcactgtgaaggtgctcccctcgctcgccgtaatagaaagctccgcgaattttgccatcattgcctacgtgcaaaaggtgaatgcggcttttcttgccttcgaagttggttccgacgatggcgacaactgcgtttttgacgacctgtttcattgtgaatctccgttgtttggtgtatggctattatgcccgatctgctgaccgggcgtttagcaaaaagtgctattgcggatagtcgaggctgatgatgttatccgactcatcggccatcatcgccaggacgttcgacgcgccgatgaattccggcttcgtaaccgcccggccagtctcggtgatgtgctgaatgtaggattcagattccggaagaaatgacattaacagcaggtcggctgtcacgcattccagggcggttggattttcttcgtccgatgccctggcaatggctgcgataacctcctgctcgctgattggcgtatcacccaggcgcatcggtgccgcagggtcgttttggtctggatatagtttcatgtttattctcctgtgattttggcgattagtgccagcttatagccttttagcatgatgccttcaggcattacttcgttgatgatggaaaggattctttcccgctcagagatggcgccctgccgcctgtatgcctcagcctccaggtttgagccagtcattgcgtcgaactcggtaaagacggagattaaccccgcccccaggctcactcgcaacacttcgcccggctccagaagtttcagcaacggcctgcggaaatggttgtcgaccggattaacgccgaacttctccacgaactcctccgccgtcatctggatacgccgcccgccatccaggaacatgcgccggatctcggacgaacgattaccagtgaatgtgccttccgccttcgctgcttcctggctccgtccggctggcctggtggcttcaccaaacgtgatggattgcagccattcatggtaagcggcttgcttttctgcgtcgtactgcatccactcggacacgtcgacttcttcgaactcatagcctttatattgcatttgtgtttcccccacatttacggcgtttggtaatgtttcggaaggtgataatacaggccgcaggccgcgccgtcaaagggtttcggcgtgtttggtaagatttgctgtcatcccctatatatccatatatacattttttcgcggcggaacatctaaaaattatggcttgcgcaagaggaatccataacctaaccggagaaatcttaccaaacatatataaagataaagagtaataataataatattattatttatcatatacttactatctatatatggggttatattggtcactttttgcgcaatttttaggtaagattattcctcccccacactcccacacgacgtaaatgttggcgaaacacaactcgacgttttgccagcttcgatcggcaaattgcgtgcatggtgcatacatttatgcaattcgttgcaaatcatgaaacactccaccaagtcattgcacagaatgaaacaatcaaaagcaatcatgattcgtcaaaactaatcaccagggaatcaagtgcaatcacggactattccactattccgaattggtggaataatcagcaatcgcaggaatagcattttttgttaagagccacacgatcgactttgctgtgatgacggctatggctcaggcttctggattccggtcgaagatgttcaggccttcaaagaggcgtacaaggcagcgaagaaagcagtgaaataagcacgaattgctaaacgccgggccgcgaggcctggtatagttaacccatcgaaaccaatcaggagattaaccatgaaagcatttgcggatgtagtcgtcggggataaaattcaatatggcgcaagcgatctgttccgtaccgtaaccgatatcgagaaggggcgcggcgttaatgggtttactgtcttcgttgtgctcgacggcattgcacgctttgcggttgacgctcgtgattgggttttctgcatcgagaagggtcgggtatgaggaaacggcgggccggggaggtggtttgcacctgcgatgcttaccccttccctcatcgaatgttcggcggttcatgcaacgggatcgccattgtcattgccagtgttggcggtgcggagtgccagcattgccagctactgaataactgtcgctgcgaggtgctggctggtatcgagaatccgatcgaatgccattacgtcgccgacttcatccaacgaaacgaggttaaaatataatgcgaatagttaccatttcgaacagcttttcctacatcatcggatcgcctgaagagcgtatcaaggcaatccgcgacaaggcgaccaatgacgttaccgacgccttcagcgctgcggccaaagctgcgatcacgcattactacggtcgtggcccggaagagttcagcgcagacagcgcgcctttcctggttgtcaaaaaggaaggtggtaatgtatggcaagtcaacgacaagcagactggcgagtttattttcggatctgttccgtgccgggtcggtagcaacgatgttaccatccaggaactcggagatcatgaacctcgcgttcagcgcacgatctacatcagccaggattacgcgacctgcgttccggaatagcacgttttgctaaaacaacatggcgggatagtggcatactatccccacaccaacaaaacgaaggagctacacaatgaaccatccgaagactgattccattctcgccgtcctgaacgcgcatggccgcgtcgttctccgcatgaaccgcgcctccggcttcactcagatcacgatcacgaagtcgaaaggccgctacatcatcgggacggttccgggcggtcgcctcgttcagtcctccctggctggcgtcacgctgacgctggaatcgaacagaatgttcattgaggcgtggaaagcatgaaagacaaggttatttactgcatgttcgacggctcaggcatcatgggcctgccgtgggccatcaagggatgcaaggtgtactgtttcaacgccgactccggcgaccacggagaatatagcattcgaatggttcaccccaatatccagtatgttaacatttggatcgacaaggattttgacgtgaagcgatcgattctcggcgttcccgatcctgaattcattttcgcgttcccgtcatgcacgctgttagcgcatagcggaatcaagcacgtaagggaagataatgacgttctatcagccgcagatgatgcgaagatggtcgagcaattaggcaataagtatggttgcccctggatggtcgaaaacccggttggaaaattgtcgtcactatggcgcaagcctgacttctattttcacccgcgcgacttcggcggctatgtttctccggatgagcctgtttggcatcccaaaatgccccactgtgacaattacacgaagaaaacgtgcatatggcacggaaacggttttgtcgaaccgaaacggctcactccgccggatggagtagaaggtgtgaatttcttttgggcctggaagtttttgggaggaaggtcagaaaggactaaaatgctgcgctccattactccgcgaggttttgcccgcgccgtgttccaggcgaattatcgagaatagcacgaattgctaaaactacccggcgaaagtcgggtagcattacccaatcgaaacgcaacggagtaaacggaaatgaaatttattatcttgatgatgttaactgttttgtgtatgtccgggcctggtggttttatctttgccgtcatgctgttagttgttgccgggattattgatgttcgtcatcaccatgtaatgactgatttaaggcttaatcggctgattaatgatatcaaggccgcttgcgaaggcatggaaataaaggtggtgaagaaatgatatctcaaaaactcgccgaagtatgccacgaagttatcaggatgaataatggcggcgcaaccatggctgcgatgcaaaataaaattgagtcgcacgttggctttaaattgagttgcagaaataaagctgactttctggatctggttaacctgtatatcgagatgggagaaagaaaataaatggcgaagtcaatcaagattaaatgcacatcaagccgcgctgttaatatccacgaaaataacctttattccgcccgcgtcgacgatgaaggcaacgtgtcaatgatggtatatgatagcgtagaactgaagaagaagcgcgttattttgtcggtaggcgttagcggcgagttgtttattgctggcgacggcggagcggcggttgcgacgttcatcgaactcaaaaccaaaacgctaaaatgcgtcggccttgaccatagcaacccgatgaaaaaatctttcagtgtcggcaagcgctaccaggtcgaaagcggtcgtgcgctcggtggggttgctggatacatcttcgaccgtgacggttgccgctggacgctgtaccgcgaggaggttggcttcagtgtatcggacggaacgactttcgaagctaaatacctgtgactggttcggggccgtgcgccccgataatccaagcgcgtttttcaagcgtgtttagattatcactggatctcggatttaatacggcatatgattagccgaacgattaaccaatcaggagcaagggcatgtttttaaatgaccgcgtatcaccgcaagatattatcgccatcgcagaaagggaggggatcagtcctctgcgtgttgcgattcgtgcgaacgggtatcgtgactccgtttcattctggccaaagccaaaagatatcgacgtaaacgcggataagtatccaacaatctcgatcgccaatgattatgatgttgtcggcaagctggcgctaaatgcagcgcgttctgttcagttcccggaatcatccgcttacatgcactttctcggaaccgtatccgcagcgatgatggggcgcttttggatcgagtatcacggcagcgagcaaccgacaacactttacgtcatcacgtcgcagccgccttccgctggtaagtctgccattaactcgctggccatcgatccgatcgtggcagaagtcgagcgcattaacgagtcgcgcaagaaagagcgcaagaaaatcatggcgaagttgtccgccaacaagcaggcgcttaaaggggagttgtcgcaatctgatatggtgaaacttttcgaagatcgtgacgaactggaagagaaacttgaaaaattatgtgatctaactttcccggtatccgataccaccccagaaggtctggcgaagattaacaaccgccagggaaactttgccgttatttccgatgaggcgacggcggttaacagcctgttagggatcacgtatggcaacgatggcggaaagaagacgaacagcgaactggtgctcaaagcatgggataagggtcacgtatcgatcgctcgtgccgacgttagcaacaatatgtcattcgaggctttgggctgcatttgcgtaatcgcacaggatgagaccatcgacgccatcatgcaagcgggttctcgcgggatcggtgtctcggaacgtttccttctggttcgtgagcaaacccggttgggtgaacgcgtgttcatcgacgaaaacgggaattcgacctatgagccgatcgaccagtcactgaaggcagattacttccggctgattcatgacattatgagcgagtcgaacattaagttgcaggttactgacgcggcaatgcggagactgaataaggcccgccaggagttagaaccggagttaggcgacggcggcaaatattcgcatactatgcttcgcggtgcgatgggtaagtttgataagcaggttatgcgtctggcgtccgtgattcacacgatccggaactggcagcccggcgggaaacgctcgaagaagatcgacacggcaaccattgacgaagcgatcatcatgttccatgagttgagcaaaacttacctgtcatctgctgactcttccggctttgctggtgagggagcggaaattaaagcgctgtatgacgttatcgccagtcgctgcaaacaggcaaaaggtgttatgaccgtccagggcatttataacgcctgccgcaacctgaagatctttaaaggtcagtccggggtgagcaaaaagattaaggaacgcttattgccgaagatggaggaattaggctttatctgcgtgatggattccgaagtctttatcaacccgtcgttcatgaggtaattgatgttcattcttgacatttacaagttctgcgaatctcgccgggagttcacccggcaggattttgcgaagttcgtttacatgcaccgcgaagcgcctcgcctggcaaaagccgccaacgtgtcgcaacgtatgttcgcctcaatggtatctaaggagtttttagcgcgaagctatacgaatggatacattgacggaaaaaacggcgctgtgtggtgtacggggccggataacagggagataggctttgatttccggtcgttcgaatggatggataacagatatatgtgggagatgatgcaccttgaccaactcagtgatgaacagcttttcgggaaagcaggtggaagatctgataacggaggttcacaggcttgtttgtgtgaaacagatcacaccagaaaattacttgcgtgccgcgctcatcttgctctatcaaggaatggccgcaaccaacacggttgaacatggtcttaacgatgaagacggagtagcgctattgcgcgtcaagaggtacatatagaaaaaggggcattacgcccctttgttttttcgttcccgccaaagacagaacaccccgatcgccagcattactaccccaacaccaccaatcagccacggaatcaggcttccgctttcatcattccggatctcgatcttgtccgccgtaatctggttagcgtgaatgctggaggtcgtcacggattttttgttcgacgtgtcaaccttccctaccgcagactctttgaacgttgtctcctgtttgcttgaggtgtccgttttgttggtcacgccaaccgcctgtttcacgttctccgcgccgacttgcgccgtcatatccggcttgctccccaccagatcggaaaggatcgggacgcttgacgcgcaaccggaaacgatggcggccgcccacacgataaagccgatagccagcgctcgctgaaagtttaatgtgctcatttcagatccttaatgcatagttgatattcctgaacccggcgattatacaagcctttcgacttctccatcttccccgtcttcggattgcggtagtacgtccagcgatatagctgctcgcacgcctcgcgcaatcggccctggttcgttaatttcagcatggtgctgccagaatatgcaccgccgccagcgttgaacgtgaagctgtacatcgacgccctgaaggtgtccggaacatcgactttgattttgctgtcaacggttcgcttcgctacctggatatgcttggttaaaagcgcgtcgcactctgaccgggtataggttttccccttgataacgtccgggcctgtaatgccttcgcacacagttggaacgccagcgatatcggtataaaccgtgtatttcgtgtcctccacttcggggaggaacgcgaccgcgatcgccaccgccgccgcgaatgtaacccgcgttttcattcccattttatttgctcctgatcctcaatgcctctttaatgtcgccagaatcaatcgcctccctgatggctttggagtctttccacttcagccacgtgccgattgaaccaaataagatcatgaaaaataaaccaatggcagcaatgattaattgcccggttgcagatcccgcaagggcaacaccgccgctactattggttgccgcgttgatgaattctcgcatgatatgcaacctctgttagttaaatggtaaggtgatgatatatgcattaggccaaattaagaacaaaaaaaagggaaccaatcaaggttcccaatagttaaggtgatgataataaaggcattaactttataattttaatgcaacatctgacaccatatcaaggattttttgcgcgtcgtcttccggctcgccagtggtcatatcaaaatcgagttcatggtaagtgtcgcaaataagatccgggcgtcgaatatgcttgcggctatcaccctcaaaggtcatgccgtcacgatgcaggcgaacgacaaagacgttaagcgcctcatgcgctgcgacgtgctcgacctcctcatcaaaaccgccgtcgctgacgatgcagttaagcggcgaagttagcgctgaatcgcaaagcaacttgccgaactggcttttgcctaacgttggctttacgaagttttcgctaatgtgaatcatgaattcacgcggagaacggtcgcccaaaaaatcgcatttcacttctttgtgcttgcggtcgtggtatctggcggtaaagcgtgcaaaatcagtagatcccaacacagcacgcgcgatggcaaacattggctgtttgaagctaaggttcttgtattcccacttccgcgaaataatttccgcgatggtgtcttttccgatgcctggcgctccgttgagaataattacatttttcatttgtctactccgtgcgattttaaatgatcttgaagattttcgccgtagtcgcagacctggtaagtcgtaatacccaagccgcgcaagtgcgcaataacatttggggaatcatcccatgccgcaacaatgcgatcaagccctattttgcgtaactcctcctccttgattaccgtgtctttacggttatcgctggcgcggcgcatgattaggctgtcatatttcaccccgtagcggtcaagccaaatcattgtttcggtcttcacctcatcggatcggccagtcaggatgataacggtcattccggatcgataaagcgcattcgccacgtcaatagtgctttggattgggctgtctccaattgacgcgccattaaattcgctccaactttctgtaaggtggagatcttttttcggtagcaggtgcaagcggtgggttccgtcggaaagcgtgccatcgagatcgaaaatacagatacactttttattcatttgtttatcctcattggcccctcgcggggccgtcgtgtttacatgttcgggcgatagatgaatcgaccgacctcgccatattctttgctgtacagaatcaccgcagcctggcggtatgaacgccatccgccgcgtgcggcgtaggcatcttttgcgcctaactggccatgcacttcgtcaatgcctaacgagtgttccgttacagtctggtgatgccagtggccggaatgcgtgtaaatgtagtcgcactggccgaactccttacggaagtcggtagccatcgcagcaaggcgagtttccggctttttcatcgtgtggccatgcgtatagcccagcatggttttgccccacaaggtgcgatgcaggatcgccggactaacatcaacaaaaacgcgaggctcattctcatagaacgcagccagcgctgcgcgtagccagatcattcctgcctggtcgtggttgccttcaatcacctgcacttcaacttctgcatgattgttaagcagtagcgacactgcgcgacgcagcgaacgaatggcaacataaacaagttttgcgtatcggctatcctgatcgaggacgtgaccgcttgccggggttactgcgtccaggccgtcactgtgaaggaagtcaccaccgaccaacaaaaccgccttttgggattgcggagccaccgacacggaataatcaaagaagcggtttagaaccttctcagccgtgcttgtgtcatagttttcgccgcattcgtgcttgtgcgccatcgccccaatatgcagatcgaagatcgggtacagggcaagctgatcttcaatgtagaacttcgactcatccagcggttgcggttcggcccgcggaaggtcttcgcagaaagccgcctgcgctgcctccataagcgctaccatgcgatcgcggtctacttccgacttaacccaccgaacgacctcggagccgtccgcgcgaatcatcgtcgacgtgccttttacaccgaagccgtcagggatatgcttcgcaacgtgggcgtttccgtgtaggtgtccttgtcgcgccaggcgaacgccgcgacgttcaacgcttcgaatgttcatgccgaactcttccgcgatctcgcggtaggttttgccttcctcgcgggcggctaaaaattcttcgtctgtgattttaggtgacataatttatcccaattgaattgcatagttaatgattgcgatcgtaaacagaatcgccgtaaataagatcgcaatatatcgcattcttcacctccccgctacttgtaatatttcttttgctgcttagactcgtggatgaacatcttcagcgcgtctgcctccgctcgcgttgccactgctattcgcgtgcgcttcaccgggcgttcgtgtagataggtgagcttcccaccaaaaataattgatatatctttgatatcgaaatgctttgcgatcttcacgatatcatcacttattcctgcttcttttgcgtgctgccatacggcagcgcgaccagtctctacaatcatcattcgtcaccgtaaatgcaaaaaccttttgccatttgctcatacatggccacgctttcaaggccgtacccggcgcggaaataaatctcaccgaccacaccatcaaggccattctctgaagggttcgccatgtagtcggccatgcacaggcgagacaggttaaccaggtggcgcgatacaacttgcgcttttgctggtacgatcttgatggtgtctgcaatggttttggttttcatggcgtttgctcctgattggttgatggagtaataatacccgcacgcggcgggtattgtttagcaattagtgctgttttgcgaaatactcagcgccttcgtgcgacctgaattccagtagctcgcgttcaaggatggcgggccagtcagccatcgggattccgttatccatgaactcaatgtaagttccgtcaatagtatccgcaaaggctaacttctcctcgtctgttccgatgaagccatatttattaagcaactcaacaacgattcgaagatattcagcaaaagactcgatctgttccattttaaaccccacgtttgcgcatacgctttttagctaatgacgggcaaatctcgctcaccgggatataaagcgttttttgctcctctcccggcttgagtttgcgcatgatgaaaataacacttcctttattgttgttgtcgactggcttcccgcttaatccgttgatgaaggcgaggcgaccggatcggcttaactggttcccgttatcatcctcttcaacatcggcaacaatccagataatttcggcggccatcttctgcgcgtcacggaaccaggcagtagaattgtcgcctggtagcagaatgtcgatctggttgtcgtgctccatttgctcaatggccttgagaataaacggatctggaaacgagtaagggggatttagccagatgtgcttgtttttaccccaccagcgtttaaggcaatccgttttttcgtcgtagaacttcgggcaaactgcgttgcttcggtctgcggcggcgtcgaggtcgtaagggccataacgctcttccatgtatgcgatcaggctgcgatcggtcgcccacttatcgcgcacgatatcaggcgttttgctcccggcgtatctgtttcctgttacctggtaaaacttatcgggcctgacagcctgatagtgtccgccagtggcaagggcattgccaataaacgtttcgcgctccaattgctcaaacgtgatgaatgcgtcacgagtgtctttgtctgtgatatcttttgccattattatttaacctcgcaggttaaggtattatgaaaagcgcccacactaacatcaatagtgtttttgttgacttcataatgagcgtacccaaaaggagtaagcagtttatattgattttcgccagcgccatcaattataacgccagagttctcaccctttacaactttcatatatttgctagttacttcgaacgcttcaccaccgcaatcatatgttttaggtttttcgctgcaaccaataagaccaagagacagaacaactaaagccagcatctttttcattttcaacaccccgttcttcgtttcgatggggtgataatacccggctttcgccgggagtttttaacaaaaagtgctattttatggcatcgcagaaagcgatcttgaattgctcgaagccataggccacggcggcgaatccgccgcgacgccggacagcagcaaggaattccctttgctccttgctcactggcgacgcctgcgccttaccctggcgctttagctcaatggctgcgaacgggtatttgccaccgaacccaatcaggatcagaatgtcgctaacgcccttcagcaaccccatttgatgatcgataacagcgctcgccttgtgcttactcccttcgttaaccgtatgccagaacagataatcagggtattcgtgccgcagccacgaaacgctattcatctgatcgattttctcaagcgggcaagcctttacaggcccgccgtagtattcgagataatcacctttatcagtaatcactattcgtctccaaaatctttgcgtgaaataatatcttccttcttaccgttaacgcgatgcgttacgcgcttcggcgctcggaagtagtgcgcattctcaaggatttttcgcgcattcttcattccgcccagcttgccgcgcattaccgcgtcgctaacgtgctggaagactgccttttgccgccacaacttgccgcaaatctgattctctgattcagggaagaacttttcccttgcggtgaatcgctcgccatcatggttcagtaacacgtaattgaagatgatcccggactgattgcgagtcaagccgatatcgaacccgacaacatcataccagtcattttgcgtgtagtgcttcccggtgagattgtcattggggtctttaagttgcaccccgcagcatctgcactggcgagcaacaatatcgttttcagcgtaacatccctttactttaatctttcctgttcgtgggtctttctggtcttcgcagcgctgcgagatccagaagtattcgcaacgattaccgttgctgtctttgtggatgcatcggcgggcgtactcgctattttctcccttgcataccgggcaaattttcgggccgttcttgctgctcttgcgtctttggtattgtgcctgctcaagaatcggatcgaaatatagctggcccaaatcgtccattgttccggcaaaatcccagacaaggtgatcttctttcacccacgagtaaggtggctgtttttgccagtccttcagaagtcgcattccgcgccccaaaagctgaataagcaacgtaagcgacccgatcttgcgcaatatgaccgaaaaatcccaaaacggaacgttaacgccagtggtaagggccatcacctggaagatgtatttaatctccccgcgattcgccttatccaaaatttcgccgcgtttcttcgagttagtcttctctgtgatgatcgcgtatgtggcgtccggcggtaagtagcttgccgcttccttgcaatgccgctggccagcgcaagtaataagaacgccgtttcgtgttttcgcacgctccacgaccttttgcataatcagcttcgtcatttcgccggattcatggattttcttttccatcttgcgcaattcttccgcgctaaaatcctgcgtaccgtcctgactggagccgtggaattctgaaagatcataccccaacccatctgcctcggtatcgccgaaaatggtgggaacaaccgatccgaactcgacaagatagtttgtgttaatgtcggtgatctgctcgcgccaaaaaccaggctggctcttgtcttcctgtaaaatcggaatgacgccgcgaaactccgaacccgtatagccaacgatgcgaagttctcgccctgtcttctcaaggcacctccgcattaactcacaaatgacgatggtgtactgtgtgcgaccgccgccgaattctacgtcgtcgaatttttcatcgtatgggtggtctgcatcgaccagttccccgttcacgcgatacggcttatccttcggtctgctcatgtactcgaacgattcattgttggcgatcgcttcggccagatcttgccagtcaacctggtggcattcgtcaatggcaagaactgaaggtgtatagtcgcccagcattttaaacaggccattaaccaccgtcccttcagatccgacgacgatcgggaagtatgccgccttcgtgcctaacccggcgcaataaacggagttcggaacatcgaggttactgatctcctcggaatcctgcttcacgatctcggcctggcgagcaagaaccatcatgggtaagttcattgccttgcactgcgctgcgagcatggcgatcatgatggttttcccggcggaaaccgaagccttaatgtaaaacggtgcggtgtagtttgctattcttttggcggtctcaatataagccacagcctgatatggatacggaacgatatttccaacggtaaatctcttttggattgcctggattttgtctgcgtatagatctatttgttgctcaatcgataagctcatttctttttctctgctccgtggttatcatgaaaaccgtattgtttttctgctgcttttcgtgcggcaactgccgactcaaacgacgcaaagtaaccaatgtgtatttgccttccgccaacctttattgttgccctccacttcccgcctcgcttaaaccagcttacgccagcgtgcccgctagtattgccactgttcatcgattggtttttaaggtttccttggtggcttaccagtcgcaggttttcgattctgttatctgttctgacctggttgatgtgatctatctccattccttcttggatcggcccattatgcatttcccaaataattcggtgaacgtataggggtttgctttttacgcttacctgtaaatacccaacgttgttctcgcaccctacggagtcgccagcgaatgcacgactactggttgtaactttgcgaatcagtgttccgccttcataacgaaatagtcgcttaaaatatgctacgtcttcttctgtgcttgccatggtcaatcctaatttgtcattcgcatagttgcgtgtataatacagggaacattttatcatgtttaacaaaaaatgctatgagggttaaattatggaacaaatggcaaaggtggataagcgaaccttgaacggcaacaacggaacgtcgcgcgggaaagataagaagaaacgcaagcgaccgactggttactacgtgctgaaggatgaggttcgagccgggttgactgcgcggatggagctggttattgatgccttcggtggtatcgcgggaacggcaaaagagttgggggttagcatccaggttgttcagcagtggcgtaagcgcggcatgatctcagccgatggcgcttatctcgtgcataagagctaccgacggaacaattgtaaaggtttccgcgcctcattctgccgaccagatttaaggtttgacagcaacggcaagccagttacgcgccgatgcgaccgccgggaaatgctccgcgtagtccgatagcacaatttgtctaaacactaaacgcctgccgggttatcattctcgtgtaggcgttttttatttggaggttacgacgtggatttttacgatgaaaaagaggttttgccgtacatggctggcatgtggcgcgaagcgttgcagaacatttgcggcattcactctcgctacttcaacggaaaacaccaggactgtccgaactgcggcggcaaagaccgattccgctggactgataagttagaaacgcgcggcgacggcggcgcatactgtggcggctgcggtgctgataaggggatcggctggttgatgaagttaagcggccagccgtatagcgaatgcatcaacattcttgggcgctatctcggcagggttccgcaagagtacgtgatcaagagaaacaagcaggtaactcgtgataacgggtatgactacggcaagatggccgaccatgaaagagtgctggcagttttaaacagaacgaaggccgtcgatagcacgcctgtaacgctttatgagggcatcgaaaacgaacatatcaaatcatatcaggtaggcataaaaacccacgagaacggcagacaggagctagttcacgcgctaccaatgcaactcgtgcatgaggatgggccggatgatgagtattgcaacatgctgttcattgatgaggaaggtcgcgagaagatgttagctggcgatctgacattcggatcggtgatagtgaccaatcagagcgacgacggtaacgggccaatttaccttgctcgatcctggattgaggcgatgcacttcaatattgccagttcgttcaagtgtgatgtgtgggcctgcatcatcccttccaatgtcgagatcgtggcgtacaggtataaaggtaagggcggagaaggtaagcgagaaatgcgggtagtttgccgtcgtggagatcgggatatgctggcggctgctgacgatcgggatcttaaagttatcgtcccgaacggtgacaactttaagctcggatttgaacgtaagttgtacaaggcatcgtcgcttctctgattaaatattgaccagaatttaggtaagattgagcaaatcagtcttacctttttttatgcctgaaattcagtggcttacaactggtctaaccactttaggtaagatttagtaagatgaatcttacgtaaatttcgcgcaaaatttaaccaactatccgccatatatagatagtaagtatatgataaataataatattattattattgttctatctctctatatttatcttggtaagatttctccggggtacgtgtctttttttgctggatttcgcgccagatttttcatggatatttacctatagggatcttaccatcttaccgatttgcgttaactttatgaaatgtatggaaaaaaccacgtaagatgcatcttactaaatcttacgtaaatttcgctcattttttgaccaaccacggatagcactttttgacttgcgccgggaatcgtcatgcgtatacttaacgcaacgaaaccacaaatggagcaatatcaatggctgaagcaattttcagggcatacaccagcagtgaattgaccaacgagcaatatcacgatcctaactcctggtgcgcggagtacgttagcggctcaagcctcggcgagatttacgcaacatccccggcgcactggaaatacaaggcgcgcgaggaaaccgccgcgctggcgttcggaacctgttcgcatacctgtatgcttgagacggcaaaatttaatggcgagtacctgcgggcgacttctccgggcgaggttaaagatctgattacgtcgaagtcggcactgtctgcgaagctgaaagcgtgtggcctgattgggacgtccaacaaggattacccggaacttctggaaatggcatatcgcgccgggattgacgtaaatgtttggtgggcgattgaactttgcgacgaaagcgccgcgatgaactccgggcgcaagctggttaaggatgttgatttcgatgccgttgttcaaatgcgcagcgtgatgctggcaaacccgcgacacgccgcatgtatcgaatcgcctaccgcacagcgtgaattgtcaatcttcggtgagatcttcggcgtcaaggttaaggttcgactagatcatgttgacgttgtttccgatcccgaactaatcaaggagtggggattaaacccggatgaagttttcgaggttgtggtgattaccgactacaaaaccacgcaatcttccaagcctgacgatttcgggcgactcgccttcaacttgggctactatctcaagatggcattgcagcgcgatctgttcgtgaagacttacaacgaaaaacgccaggtagttgtcagactgctaacgcaggagaaaaaatcaccgtttgctccgctggcgttcaccctgaccagccagcagatcgagatcggtcgcaagcagtatcaaagcgtgattcatcagtatgcggaatgcgtgaagcatgattcatggccatcatatgagtcaaacgcggcggaagtcgttttgcctactccgcagtttgtgaaatacatgttcccggacgtatacggcacaaatagctaaacactggtgcgcacttgtgatatagtgcgcattaccaatcaggaaaaggaaactttatcatgcgtacatctgaaaaatttaccaccatcgcagccgcattaatcaaggcaaaatctggcttcgtggccgcgaagaaaagcgggaagaacaaccatcttgggaacacctacgcgaatcttggtgatatcctcgacgctatttccccggcgctggagaagaataagattatggtcattcaatccatgatggataccagcaccgaaaaggttatgcacctcgaaacgatgtttctgcacgaaagcggtgagtttatggcgtttcagtacaatatgccgatcagcaaaacagtcgaacaagcatacggttcaacaacatcttacgcccgccgctatgcactggccgcagcgctaggcatcaagcaggcggatgatgatgcagaaattacgaagatgacgccgaaagacttcaaaaaacgcattgacgcgtgcgaagatctcgaatcgctccgtgagatctataagcttgcgaaacaaacgttaacgcctgcggaatggaaaatgacggaagacgatatcaccaaacgccaggcagaactgaaagtcaccccgtctaacggctttaaccctggtaaaccgcaagaggttgcgaaacgggagccggaaaaggtagaatcaaagcctgaaccagaagcgcaagatatttcatctttcaactaatttaaccgggcgggaaaccgccccataggaacgacaatgcatgttgtaacaggtgttatccgaaaggaaccgtatgtcaaggaaggcagtaacaataacgggccgtggaaaatgtacgccgtagacctgtcggagcgaatgaagatccgcaatcgtgatggccaggacgaaacggtttacacgaactaccgcgccgttttctttgccaaagaaaacatgattaagtggtacgacgaagcgctgcaaatggataaggtgatcagcgtcacctgccggacgcttcagatcgtgaaccgcgagcacaacggcacaatttacagccacaacgaaatgattatgccacaactcgaattcagccagcgcgagccttcgcaaaacggcggcaatcagcaatccgggtgggggcagcctcaacaacccaagccgcaacaagcgcctaaaccgcaaaacagcggcgggaatacggggatggatttcgatgatgatatcccgttctaatttgacaactaaaggagccgaaaggctcctttttttatcggttcattgatgctattatctgcgttactcaaccaacataagaggcttttaaaatggcactatacagagaaggcaaagcggctatggccgcagacggaactgttaccgggactggcacaaaatggcaatcttcgctttcgctgattcgccccggcgcgacgattatgtttttgtcgtcaccgattcaaatggccgtcgtaaacaaggtggttagcgatactgaaattaaagccatcaccacaaaaggcgctgtcgtagcgtctagcgattacgcgatcctgttaagcgactcgcttaccgttgacggtctggcgcaagatgttgcggaaaccctgcgctactatcagtcgcaggaaaccgtaattgcggatgcagtcgagttctttaagacgtttgattttgagtcgctgcaaaaccttgccaaccaggtaaaggcggattcacaatccgcaggcacgagcgctgcggctgcggcggcgtctgaaaccgctgcaaaaacttcagagaccaatgcaaaagcatctgaaaataaggcgaagacctcggagaccaatgcaaaggcgtcagaaacagccgcaaagacttcagagacaaatgcgaaggcatcagaaaacgcagcgaagacctcggaggcgaacgctaaatcttcggaaaataaggcaaaaacttcagagaccaatgcaaaggcatcagaaactgctgctaaaacatcggagaccaatgcaaaggcatccgaaaccgccgctaaaacctcggagaccaatgcaaaagcatccgaaaccgccgctaaaacctcggagaccaatgcaaaagcgtcagaagctgcggccaactccgcaaagaccgacgcgcaaactgcgaaggggcagactcaagatctttatgaccaggttgtaggtcttgttgctggcgttcaagcgccagataagctaccgacttcgcctggtggatcgcgggcatggatgaatatcgctaaagttaacggtgctggaagtggtttcgcttttgttcagttcatcattggcggtggatctaattatggggctgcaaatgtcccggttgatatcttttcgctttctggacgtggccttccagcttcaccgttgacaagcgaaaacattgacatttggtttactcagcgcaccctgattgctgccagaccaaactcaggtcgccttaacctcggagttgtgaagaatacagacggatcttttgatgtttatttacactctcctacggggtacacccctgaaatgtggctaaatcgtttgaacgtacaaccaagagggagtgtgattaccgggccaatcatcgatcgaactggttataagtggattaccactgagccaaccgggattgtatataacaacccggcagattatttgctggctaacgatagcacgatcccgcgaaccaacgtagccaacacgtttagccagccgcaggcaattagcgttcccggcggaaacgctacgctgaccctgaacggttgcgtggttcgggccaataacagtaatgcgatcgtgtactcaatccctgaaagtggtcaggggatgtacttcagacctaatggcgatatgaatagcgcaaagcaggtggtttttgatgcatcaaacttcactgttaccggattgaatgccagctttagcaatgccgttacaatgtcaagcacgctgcgcgttaacggggcttctaaccttcgaggcggcgttgatgttaccgcgtcgcagaagctgccactgaaggagacaaccgctacaaccgggattggcgttaactttatcggcgacaacgcaacggagtgttctttcgggattgagaatactgctggcggaactgctgtgttccataactatgcacgcggcgcgtcaaatagcgtaacaaagaacaatcagcttttaggtggttatggttctcgcccgtggttaggatctgaatacacggagcacagtaacgcggccttgcattttttgggggctggcgatgcatctggaaccaatcacggaggctggattcgcttacttgtcacccctaaaggtaagactattagcgatagggttccggcgttcaggctgtcggataatggagatctttggctggttccggacggagttatgcacccggatcttgggcttgtgcgtagcattgaaacgctgaacgctgctgttcccacttttaacgctccaaccaaccaggatgggcgcgggttgaaacttgttggttctccagcgccagaaattaacatgatcgctccgcgagccgggttaacatcagcgccagctattagggccatgtggtgcgatggcgatctttcaggaacctcaagaagcgttggtgcaactcaggctggctcatcgttctatgttggtgcgtctggtcatgatggccagaagttcgactccatgagggttgcaatttcatttagtgccgttcagggttggggtacgaacaatacaccaactgatatctctttcgagacaaccgctgttgggtcgaatgctaggagggcggtatggagaatcggcgctggcggtgcatttgctccggccaccgataactccgttgatattggtagggcgactgttagggttaagcaaatgtacgccgtcaacgggtcaatcaacacctcagacgcgcggatgaagaacgatgttcgagcaatgagcgaccctgaaactgaagcggcaaaagccattgcgaaggagatcgggttctggacgtggaaagagcaatccgacatgaacaatgttcgtgagcactgcggcttgaccgtacagcgtgcgatggagatcatggaaagttttgggcttgaaccgtttaaatatggatttatctgttacgacaagtgggatgagcaaacggtggtttcagaatatgggccagcgaatgaagacgggtcggaaaacccgatctacaaaaccatcccggctggtgatcgctactcgttccgcattgatgagttaaacatgtttatcgcaaaaggatttgaagcgcggttatccgcacttgaggataaattagggatgtaaaaaaggggccgtatggcccctttctttttaatcataccttgcgcaattaatagcaatgcaagtatttttcatatcgacgtaggttagattactggcggctccgccaggagcctgcgttagatatgcggtaagttgcgtgtttgaaccgttaaaaaatgccgctgcgcaatagtcgccctgaaatggtcttgggtaaggatcacgaataacacccacgatcgcgcctaactgaacaggactaacggcccactttccgccgttagtgacgtttagattaaatccagtcccgtaggtctgtacgtctgaaagcgttctggtttcattggtcaaaatcagcgtaccgttttcatcccaaattgcaaggccataaccagggtttggttgtgggaacacggagaaaaaataaacctccgcatatacgttttgcttgccaaaagaaaaaacaacgctgcaagtgttcccgctgtacctgatttttgtaaatgcaccttgtggagatgagccatgaaagaccacgaacggcacgcatgggtgattcgtgtcgtaagttaccgatctcacctcatcggaattggttccacctctcagggtgatgctttgctttgatagcagtgccagcggtatgctttgaggagaaacccaaacattgccgctatcattggtaagtaaaattccgtaatctgccataatcttcaactcatgatttgaacaacaataaagccctgcgtcgccgggtacacacctgattccagcgcattatctggcgcatccgaaacaacgatctgattaccgctaacggtaattcgcctcttcgatgtgccgtactggtcttgatttgcgacccaaaagaaacccaaccttaaaccaggtggaacgttgtaagaccatgttccgcttttctggccttgcgccaaagcaatatatccagcaaccgaaacagggacgatcccatagttgttggggttcccgttcgcatcccaagattgaaagccataagccataaatacctccgttggttaagccgggatttctcccggcattaattttaccatgatccagtgatcctacccaactggcaacgaacgcggccgctaccatctcgaaccgtgatgttctggttagtttgcttgatggaaccttcgccagatgttgaaccatagttgacaaatacgccgtttttatcaagcctccaccctgcaacattctcctgaaagttgttggactgaataacgttgccgatcttcgcgttggtaatcgaaccgtcctgaataagagcgttattcatgaacacctgctcattctgtacaacaaacggtagcgtgtacgcgcccgacgccgcattacggatgatagcaaatctatcagcaatgaacagcacctgcgaaacaatgttgctcccttgcgctgtaagctgtagcgccatcccggagctatactcctggccgttgtacctcaagcctaacttcatcgtgtacatggaaccgacgccattaacatttgcccacgagtcgagtttctggtttagcgctgcggagttctgcccgattttggcatctagtgccgcctcggaacttgcccgcgcgtcgctttcatttgcaatagcctgattaacctgcgtaaaaccagcgttcatggttgtttttacgccgtcaatatcagccgcaaaatctgcctgcaactgaccgatctgcgttgctctcgtctcgctttccgtcgccagggcttcgttaagggtcgtgatctgcgatgtgatatcttcatcaatctgcgctttaagctgcgtaatttcagccgccctcgcttctgattcgttggcaatcagcaccgtagtatgcgcgatctcagccttgcgcttaccgttctccttgcgcataaccctgacgtccgcatcattcgccaaagcgttttgaatgatgctgttcgcgtagtcattgagtttcgccgcgctatcctgcgcactctcctgaagctccttcatcgcgtcgctatccaggatttcatccaggatcgcatctgtgatgatgttaacgtcagtcgaagacataccgcgagcgtaatcagtccattctgaaacgttgccgatccggtctacgcttctggctttgtagaagttcacgtagccagcgggcagaattgaatgccagtattcagccgccgggtaaggaatcagtgtaagcaggcttgcatcctgatcggttccgctttgcgactggtaaagctcaatgtatgccgtgtcttccgccccttctggcatggcccacttaacgcgaatgccgaagatctcattgtccgacgcaaaaaggttaatcgggccttttggcgctccgactttcccagtcagtgtggcggttgccaatgcagaccacggagacgctacattcccgccgctaatgcacctaacgcgggcctgatactcgccagcatagatgccttcgatatcaacctgcgttgtagcagttcgcggaacgttgttccagttcccaccatccttgcgccattgcacctcgtacagttttgcatactgcacggcagaccagccgatcaccatcgtctcgacgctcattccctgaacaatgcgagaaaacgagctaatcgttaagtctttcggagcgcccattgaatccgggtcaacaaccgaagttggtcggtcgtcggtaattactccgttgtcgatcgcgtcatacttgttcgggttgtactgcgtagccgtgatggcaaaggtgaattcgtcgtcatcactacccttttcaatccgggttactacatactgttccgctgcaagctgatcgctctcgatcaggaatacactgtcaggcgcaacgtcaaagttatacccaacgtttagcgtgagtgtcttaccgtcagccgaaacgctggcgattgtgcggcgcacaggcttgccgtcgtcggtattcaggatcagagtgtcgccagccttcgcgtcgcagcggaaagccaggaaaacctgcgttcccgttacttccatgattcgccccgaaagcaccaggttaaaggccgattgccagtgcggatctgcaacgtaaattacatcgccgcaagaaggaatcatgccttccaggccagtcgaaaacgaaacggttgtagcgcttaggttcgtttgcagaatccaacgcccacggcggttcgcctccgtccttctggtacacccgatcgctgtaatgctcgttgggttgtggccgaaccgcatggctgcgtccgggttgaatactggttcaacatcctgttcgtactggttttcttcgtcgtcgaacatgacgttgcacgacgtgtacatcgtcttttcgcttgggaacgtccgaacgaacacgccatcaacgacgttatcagccgtaaacaggtacaccggatcgcgcggcttgtcgacgataatagaaaggctttcaccgttgtagaacgtcattccacggaatgcggaacaaatatcccttactaactggaacgcctcaacctgcgactgaacaactacatccatcaaatagcgcggttccatcccgccgcgattgtccggcacaagctcatcacagtattgcgccacctcatacagcgaccacttgtcaaccgggatgccaagttcgcgctggtctaagccatagcgctgattcatgatcaggtcataaagcacccatgccgggttattgctccacgcccacttaaaaacaccgtcccacgtcccggagtatgtgcgattaatcggatcgtagtttctcggaacctggataatcttccatttctttttgagtgagatagtagggatctggttctggaacagatcgctatcgaactcaacgtaaagcatggccgttaacgggtagcggaattttgcatcaataacttcagcgtaggattcaacccggaaagcgtcgacaactttcaccccgtcagcgtccggcgttactcgactaacgcggataagcacctgcgacgtaaagttttgcggcaggttaacgcgaatgctccgatcgtaaccgccagtcgtgttcttaccgtcaatcttgccagttaggtaggtctgataacttgcaccatctaccgccatctcgatcttgtactcaacaaccgatccgaccatatcgccgttatctttttgagtcagcacgcgcggccataacaggcgaaagcgaatagcagaaagatttttgttcgatacggtaagcgtataaggcgtgttgtgagtgacttcacgagcaacctggaattcagcacttgactcgctgaagccctgaatgtagtcctgcgtttgcgtgccggggcggaactctgcaatcacgccctcatagttgaatgttccatcctcgttctgaaccgggacgccgccaaaatgcaactgcttcaggctgaagtcgttaaccacctcgccatctgaaacagcaagcaacaacttgatcttatcttttgagatcaggttatctggcatttctacgggagtacgtggcttgcttgaaccgcccttgcgggccttgatattagtcatcgtttagcctcctgttaatagtatcgcaattgtacacgacaaaaagcccggaggctacgcccccaggctaaaaagcgaatggcttaattagttgttgtcttctgcgtaagatcccgaaccgaacaacgcgccgccagccaatctgtaaccgtatggcaactggattggataccccgccgctgtggtgttaatcggcccgccgaacgcatacgatggtttattctcaggcgattcgcttgcccgcatgttgccgcccatctgcggtgcgatcatctgcattacgccacccaaaaccattgagccaccagccatgaatgcagccgatgaaaaagcgcccatagccgccagcgagccgccgccagtaaagaaggccgcaaccataatcgccgctccgataacgacctgcaacaacccgccgttctttctggctcttgggatcgggatgattctaatctcccttgccacggcgaaagtagcaaagtcgtccgtgctgattggttttccgtctgcgatgatgccgaatcgcatgtttgaaccaactttgctctgcatgaacggcttaaacccttcaacctggtaagacagcgcccggatacattcagcgactgaatcaaccgcaagtttgtggaagacaccgaaccgacgacccagggagccagatagtttaatcgtctttgtatgtgatgccatgttttagctccttatgcctgcaaattaaaaccttgtgctgctcgtaccatccagaatagatatcccggcgagacagcttaccatatgcgtgatgaaggatgttgttatttccaacgtaaatccccgcgtgattccacttctccgcctgaagctgaaaaatgatcatatcgccaacttcaggctcgccagtgttttcaatgaacccgtcctcttgccagtagtcctggtaaagattctctttgtattccggcttccaccattcgaacggaacccgccgatcttttagcgtgactccgtggcgcttatgaaaatccataataaggccatagcaatcataagcacccaaagcccaggggcgaccaatcagcggacggcgtttcggctcaatgattcgcatatcaccttccgggatggagacaataacccacgacaagccagactcatcacagaagcacaaatctgtggcgctcggaattgtggttgccccgtcgccagtatgcgaatgaacgaaggcgatcggctcgccatccattgccgccatcgcatactgcgtttcatccggcattgattcgttctcaggatctggagaaacgttgtctagtcggtgatatttctgcacgcgtgatttttgcgttaccagcccggcgcattcgtgcgggtagacttccttcgcgtgctgcatgatctgcattttaattttcggagtcaacatattagctaccactcttcaaagttgctgtcgcacaaccgccgaaactcaacggttcattaccaaaacgaagcctgcaagaagacaccaggccaccgcaaacatcccgcgacggatcgtcaaccctgttccctaacttgtcgaagtatccgttctgcccgttgtagtcgcagcctttgccagacttgtaccagccacgctgcgcccaataacaaacggtttgcgttaggcgtgccgggatcattaatccgtccatatcaaacacggatgttaattcgaacgttgccttttgcgggtctacctgtttggggcgctcgatgtagtaaatgaatcgcctaaaatcgccatctttaactctgccgtcgacgtttaacaaatccttgaccaaaacccataccgtaactttggcttgcattaggccgttgtaggcacgaataagagcactcgcctgcgcatcaatattgctaaccgtcaacgttggcttttccactgtgccatcgctcgacattgcgatcccgcccagtccgaacgggcgcggtccgtactgctcgccgcgaaacgtgatcattttgggctgaagcgtcccaccgtttaccgccgctaaaagctcctcggttgtataggcgacgttctcgttatggaatcggtagacctgcccgccgaactttgtggcgtcgatatcgatcagcgttaggatctcgccggggaaaagtttttgtaagcagttcgcaaactcttttgaaacattggctgtcatcgtaagccctcctctaattgactccagatcataggccaaaaaaaagcacccgtaaagggcgctttttgattatctggctgaagtgaagcgttcggcgaattcagccgttacctcaaacaccccgccaccctgcggcgcaaggttaacggagtcggcagttacgacgaatacgcccattcttccatccggtgccttccacacaaaaggctttgttacgtgatcctgacagaagttataaacctcctcccaatctgaaccgccataaacgatcggaaccgtcctgcgctttgtgttaattccgctcgatgccgtttggatgtagccgtttccgaaaacaatcgatcgaatgttgttggagatggcgacctttgccgcccctccttgaatttgtgtacaccatttaaaggaatccactactacctcctcgttttctcattgacgaacttcgcaatgcgcccgttttggctcaaagcctcggtgaacatatcgttcacgatctgccttactccctgctctaaccccttgctatcctgaccggaacccatcgtgatgttaatatcaccaatggtaaacaccatagccgccgacgctgcgacgttgccgccgttggtgattccagatccggaacttgcgttaccaccaaccaggccgccacttgcatagccgcgcattagtcggtacaggttttccgggcctaacctttgcgtcgcctctttggtgaatacgaattccccgccgtgaacaacgccttttggctcatacttcccgccgtcgccagtgtaaccgccgccagaaaatcccttgctgaacatgttggcgaagctgaacgttccaccaccaccaaacgcggcagaaagcgagttaaacagcgccatcttgatgagcatgttggtaatgtcaccgataatgcttcttgcgaagtcgctaaagctggccttaccagtcatgacaaaatcagtcagcacgctcgccatgccgttaaatgcgtttttagtgatatccccgatgttggtgtatacgtcattaacttcgtcgccaatatcagcccacgcatgagtaaacccggccttccagttcagcatttgcgcatcttgctgtgcgtagaatttatcgcttgcggcctgcatcgctttaaatccagggtcacttaaagatccgccgttgtttttccagtcagccgccatctgcgcattggcccggtatctctcctgctccttgctacccattccggcggtatcctgtagcgctttggttttctccgccatctggtttcgatacttggtcgacttgtcaagcaaggcgttcagtcgctgctgctgaacaatctgatctcccacgatggccttttgctctgccatgtacaggatattctttttgttcgccagcatctgctgttcgctttgggtcagcttgcgcttatggcttgcctcttccagcacctgaaatttggcgaccgtctcgaagtagtccttgcgctgctggctgatcttgtcgtcaagccctttgtgctgctgcaaaacctttagctgcgcctgtagcgatagcagttcagcctgatactgctcatcaattttaacgcccgcgtctgcctgctgctttctggcgttgcggtttttcaggatgttctgctcttcctggttaacgcgatccttcgttttgctgctgtacccaccggaaagggttttatccttcgcggcatcaatgtaacccatctcgccttttgcgatccttgcctgctgctccgcaatggtttttgcaagcgtgtcggatttcgctttcgagtccttgattagctgctcctgctgcgccagaaattcattgccaaagtcgcccattcctggaattttttgcagcttccggcctgcgtcaacgatgaactgcgcgatcatggcatcgccatcggcaataagtttcctgatcgtgttaatgattgcggaaaccgtatcaacgataaggtttagcgctccgaccgtgtgatcgcctacccatttccatgagtcagcggcccattttttgatatccgtccacatcgtttctagcggcgttgcgctgtccgcgatatctttaaggcgcttatccatcgtttcagcaaacatccttgtcgccgcctctgctgctgccgtctcgcctttagttttgcgcaaagactcgatataggttagctgaccttctttcaggaaattaaactgctcattgagatcggcaagccccttaacagggtcttttgcgatcgaatcaaaataccctgtgatcgtcttctcgctctcacccgtctgcgccgaccattccgccgtagtcttcgtgatctgcttaatctggttgattgtgtacttaccagaactagcgagcgatgttgcgatttcctgaatgctgccaatcgtagccgatgagtttttgttaatctcttcggttaaggctgtgatctgcccggtggtggtcgcagcatagccaccagtcagcaccagcgcattcgccagttcacgttgcgcactccaggagtcatacccagctttagcgattgccgccagggcgatacccaacgacgcagcgccaaccgttagcgggttgatgtagctcaacaataccttaaacgtattgctcaagccgccgaagctatccttgatttgcccgccctgctgcacagcaaccaaccagattggcatcccggacgcaagggacgttacaatatccgtgatctgcatcggtaactggcgcatggccattttatattgcccggcagaaatgccagcaaggcccatcgcgttctgctgtcgctttaacgcctgttcttgctgtttcagcgcgttaatgaacggggcagcttctgccgatacgcccaattgcgccgccttcatttccagcagttctgcgcgtgttttgccgatggagtcaacctgctgtttcagactggcgacaaaatcacgtccggcgtttgccgccttctgctttgcctctgcctctgcgattgctgcgcgaccttcttcggttagcgccacctgctgacgacgcagtttgttggtcgttgattcgatgatagctccaaggcggaaaaattccttatccggaacaagccccagcgcccacgctttatcaagttcttccgccgcttttcgcaagttggccatttttgcgatcgtgggatcgatggcgcttgcgatcctactaaagctggtttttgatttgtctgtctcttgcttctggcgctgcaacgcgcggttcatttcctcggtctgtgccgtggcccgcctttcagcgtctgcaagcgactgtaggccagcgcccgtttgctggctttggtttttcagttctgcgagtgatcgtaccgctttatcaacctgcgacacgtcaacgccaaacgtcaacccagctactttatcagccatgtttagcccccatatgaaaaaagcgcccgtaggcgcttattttgatttcctgtaaatctccttcaggtattcaccctccaggatttgcaggtcaagtaatgccgcttctcgattgtcgattttatacaattcaaagagcataggcaatgtattatagtcaagccctgtagggccattcatcccgattcgccattgcgtttgcatggcctggaatagctgccagctttgggcggtctgttcatcaaaatagattgtttctagatctgcttcatagtccgatcgccttaaaccgtactcggcaagctggcgatcggttagctcaggctgaagcgtgagataaacagcccgccttaaacttttgcacggtggcccgcaagcgcggccatgtaagtttgcggcagcgccatgacaaatgccgggaagtgagcgcaaagccaggaaatgttttcgtcgttgaactcatcatcaagatcccagccttcggccataaagcggataaactcggcgttaccctttggcgctttatcttcgctctcataaaaatctttcatctcatcggtggagcggtgttttacggtcatggtaatagttgcttctttgccgtccgggcaagtgaaagttacgggcagtttgaaagaagggaggttgccgccgatttgaattttgaacttggccattttgttaactcctgattggtttgtgttattcgctattatgcacaaaaaaaggcgaggcacaagccccgccatttaattacgcgacaaccggaaggaagacgtgagaacctttaagcgcaacgttaagtgttaccgtctccatctcgttaaccgccgtggatggaatatcatcgaaagatgcaattccagaccagtaacgaacctcggaagctcgcgggatatacatgtacatcgctttcgcctgcttgctggcgtcggctgaacgcaaaaccgggtagatcgcgttatcgaactcgtgcgcaaacgtgtagttaagcgtcaccgccgacttgtaagtaggttcggattgttcgcgctcatcacccaggcactgatagttatagaactgctgttcgttgccgtctttgcctaaatcctgaatgcaaggcaattcgacccaatcagtaatcacgctcacactaccagtagccgcgcctccgggatacttgttcttgtcggaggtgtcgaactcttccagcgttgccacgcctgctgccacttcttttacgcgagccaccttgttaacaaagtcgccccaggtgcaatctgtaaagatcacaatatcttttaccttcagcttgccatccgctactgtgatttttgggtttttcgcgtcattggtcattgcggtaaacggaatcgccgcaccgcgagccttctcaaagaagaccttagcaccgtttggtaaatgcatgttgaatactcctgtttgaatgaaagttttacaccgccattatgcctacatatttccaggctggcaagaaattataagcgacgtgaggttccgctagttggatggatagccgctctcctccgtgcggtcgcatcttactgtgaaccgaaccgggaagaaccaacccgtttcgtgcttctgcacgccgtgaacctccgcccactcgctcacatataacttactttcagagtcaacaatcttgccttcggggaaggattttgcaacgcgttgggcgacaatcctcgcgtggtcggttccgatcccaggcttaaagataacgtcaatctgaaccatcgccagatagacccggcatttccttgaaaggtcaaccgatcttgaaccggcctcgacgtaggagactttaaggtaggtctcaccgcccgccggaggtctaaagtcaacgttatctcctgcgacccttaacatgttctcggcggcaaatttagccactgccgacttgcattttaacgccatatcataatgcatttttcgccctcgctcgcttgattgcctcagtaacataaacgcccaaccggatagcaacaacgcccataacgccattgggagcctgctttgaatgaccgtattccagcgcgttcgcatagattagcatgttactgaaccagatcgaagtaatcccggccccccttgcgtatagcgcaatgttggcgttaccgtgctggattgtcttctcgcccgtttggtcgtatgcgttaatcgcgtaaagcggggcacggttaaaggtgatttgccagttaccacggaagcgccctgtatccaccggagaacgcattacaaggtcgcggtgaatatcttcacacgtaaaccttacaacgtcctccagcgcgtcaccagccgccttgcaccatgcatcaattgcacctgtgaattcacggatagtgtaattagccataagtcgccaccctgcgtaaaactggacggtaggcgacaacggttccagttggttttaccgggcgggcattaaccacgcgatatcgctcaccgtccacttctatttcgtcaccctccatgattggcacatcatgagtgaagaacccgcgcttgtcgccagcgaggatggtttcgccattaatgtcacggtcatttacatccctgatcgcgcccttgattgtcgttaccacctcgccgggaatgatatcctccccggtttccgggtcgatgccaccgccagctcctttcgtgtacttgttgaacacgccgtcagcgtcgctgaagaacttaatacccgcgcttgctcgtgcctggattgctttgtagttcattgctattaccccccaaccccgcagcgccgaacgttgccagcggtaagcaggccgaagccaccgccgcgcattttgagcatacgccagtacattttgccccacggcgtagaaagcatttcgttatcgcttgacgccgacacgcgatcgaaggtttgggaaaattccccggtcagggtgaacgatgccactcgctgcgtgtaagaatccaggctttcgccttcttgcttcattgcgccatccaaaaacattaggtgcatggtcataagtgcgatcgctgtaacaatggaatctccgaaccttgatttgcaaacgaactcttcggcaagcgcaacccacgcagacagcagttcatctggaacttctttaagcggaggtgcaaggctgcgcattttgtcgatcacatcttgaattgtgtaattcatggtagctctcctgatatgaaaaaggacgccgaagcgccctttgttggtttttgttattccgcgcttttaggctgcacgatctctttcgctgtc

SEQ ID NO: 12 - DNA, 48759 bp, unidentified
  source 1..48759: mol_type = genomic DNA
tttttgatatcgcaaagcgttacttccagtgggccgaagagaacgcaatcaaggctgcggaaacggcaacgtttcagggcgacgttaacgagtggggagtgaacaagcctcgcatttttacgatcacagggttaagcctgttttgcggcgtgaaccagtcaacgcttgggcgataccgtcacgaccccaactatgctcccgttatggagttcatcgactccgtgatttatgagcagaaatttcagcttgctgccgtcggcatgattaacgcttctttcgtcggtaaagagatggggatcgataagccgccagtgctgaacatcgacgctatcgccggggataagaacgagatcaccgaagagcggttagagcaggcagtgaccaatattcttgataagctataagggtcagatatgaacgaaatgatcatttgggaagacctgtcgccagccgataagctggcaattaaggcgctgagtacgcgcaacttttcgctattcctgaagatttggttccagatcatccagggcgaaaagctaatgtggaactggcatcactcatacttttgccacacggttgatgaaattatcgccgggaagcgaaagagcacgatcgttaacgttgcgccaggctccacgaagacggaggtgttttcaatccacctcgcgccgtatgcgtatctcaagtgccggaaggttcgcaaccttcagatctcgcagggtgatgcgctttcaaaaggcaactcggatcgcgtgattaagatcttctcatcaagcgagtggcaggagctatggccatcaaagttcgggcgcaagcagatcgatgaatttcaggtcatggacgataacgaccgcgtaaggctggaaatggtctcccgttcgtccggcggccagatcgtcggtaagcgtggagggtacatgacgccggggtttagcggccttatcgcgctggatgatatcgacaagccggatgatatgttctcgaaggtgaagcgtgagaaaaaccacgtactactgaagaacaccattcgatcccgtcgagcgaagaagaagaagggcgacgaaacgccaatcctttccgtgcagcagcgattgcacgcgcaggatgccacctggttcatgatgagcggagggatggccatcgacttcgatcgcattgttattccggcgatggtaacgcgggaatatggcgaatcactccctgactggttgcgacctgagttcgagcgcgacgtgctttccggcccgtcggtggtcattgacggcgtggaatactggtcattttgggaggagaacgaatcgatcgagaacctggttgcgctacgcgaagccgatctttatacgttcctttcgcagtatcagcaggagccaatcgccctgggtggtaacgtgttcaagtcggagtggtggcgctattacggcgattccgacaaggcgcacgagccgcgcccggacaagttcgaatatacgttcatcacggcggacaccgcgcagaaggtcaaggagctaaacgactactccgtaatgtgctattggggcaagtaccgggatcgcgtctacttcattgacggaattcgcggaaaatgggaagcgccagatctccgcgttcaggccgaagcattcatcaagcagtgctggcgtcggaacaaggagtgtggaaaccttcgccggatctacatcgaagacaaggcgagcggtacgggtctaatccaggatctgaccaaagcagttaatggtatgggtgagatcgtcccggttcagcgtgacaaagataaggtgactcgcgcgatggatgcgcagccaattatcaagggtggccgcgtcgtactgccggacagccatccgttcattgcggagcttgtggcggaaatgagcgcgtttacctatgacgattcacatccccacgatgacatttgcgataacgtatttgacgccgcgaacctggaaatgaacctgagcgatgacccggtagagcgaatgaaacgcctggcaggattgaaaaagctgggccgctaatacataatgtgggcttaacggcccacaaatcacacaaggttaaaatatgaaagctatcaagatggatgactacaatcagatcttcaatggtggcgcggggtacgcgtcaaccacggcgatgattgcaagcacgttagggaatatgtcgcaaatcgaggagttctatcacaataacggactggcgaaaaagattgttgacgtgatcccggaagaaatggtgtcgcccggcttccagcttaacggcgtctccgataacactaaattccagtcagagtgggacggccttaaacttgagccgcaaatcaccgatgccctctgctgggcgcgcctgtatggtggctcttacgtcctggcgatggttaacgatggccgcatgctgacttcagccgcgaagcgcggtaagccactggaatcaattgtcgtttacgactacgattcggtgtccgtagcggaggaggagaagaacccacgaagcccacgattcggcaagcctaaaatgtacgaggtgaagccgctaaacggcgggcaaccgttcaaggtgcattatacccgtatgcactacatcgacggcgagcgagtaaccaacaaggtgcgccagctaaataatggcgctggtggttcggtgctgaacaagtcgctcattgaagcaattcttgactacgactattcggaatatctggcaacgcagctactgaagcgcaagcagcagggcgtttggaaggcgaaaggcctggcgctaatctgcgacgacaaggaaggcgagtatgccgcccggttgcgcatggcgcaggttgacgctaattccggcgtcggaaacacgatcggcattgatgctactgatgaagagtacaccgttatcaactccgatattaccggaatcccggaattcctttccgcgaaaatggatcggattgtcgccctgtcaggaattcatgagatcgtgctaaaaaacaagaacactggcggcgtaagcgcaagccagaacacggcgctacagacgttctataaactggttgaccgcaagcgcaatgacgattacaagccgctgttagaattcctgttacagttcatcgtaaccgaggaggaatacagcgtcgagttcgaaccgttgtcgcttcctaccgatgcggagaaagcggatattttccagaagaacgccgatgcagcacgcggccttgttactgaccaggttattgacgccaacgaagcgcgtgataccctatccgcactgattccggaactgaagttgaagggtaatgcgccggaacagaaaaaactaccggatcgcgcctccggttcaggcagcacgcaaaacacgcagatcctgaacaacaccgaggagggcggcgatgaaagttaacggcagaattccaaactggcgttatcctgaagcaagcgagcgggatttatcccgcttgatgcaggacgcgacaaccgatctggtcgtggaaatgcgggatcggttagaccgcctgaagttcgacgccacggcggaggaaatcaacgaggcggaagacgatatcaacgaggcggcgatcgcgttctttgctgccgtcattgcggctcttgcctccattgggttgacaatctatagattcaattctaagcagtggcttgcaattgcgatcgcggctggcgggcggaacaacgaatcagttatgcgccttaaagaattcggcgctggcgggtatgaagactggtatcaggaagcgctgaaaaagtggcaggattccgccgaagcgtcgatcaggaagttagcaagcgatatcgttgctgactggacgacgaaagttagaaccgccaacaacattggcaagtctcgccagcagatcgatgaaatcatcgaaggccgatacgccatttatggtagttggtcgcgcaaccgggcaagcggaatcatcggaacttttaacagtatgttgatgatgcagcgcctaaaagatgctaaagtatcgcattacttttggttcgggatgatggacgaccgcgagcgcgagagccatatcaagctagaaggtaagcgacgccccgttaatggcgacggcattttccccggtgaagagtacggttgccgttgctgggcggttccagattttaacaatgtagaggtatcatgatgaaaagagttcaaaggttcgacacggtaaagatgaaggcccgattcgatgagaacggctttctggttgatactccgatcgtggcgcgtatcggtgcgcagacgtaccagacgccaaccgggccgcgagtcgagttccgcccgcgttctgaggtgtttgatgctgaatcgctggcttcataccagggtaagccaatcactttgggtcataagatggtgaacgcgcagaacgcaaaaggcctggtcgttggctcgtgttccggcgctggcaaagaagaagggatcggcgttcttgttccggtgatgatttacgacggcgagtcaatcgagcaagccaaaaagcgcgtagcggctgagttatccgtgggctacacttcggtcgatatcgatcgcaaaggttggggcaacaacgcaactggcgaatattatttcgacgaagacctaccggaaaacttcgaagagatgaaaaatgattccgtctctgattgggttcgctttgatgcggtgcaaacgaagattcgcgtgaatcacgtcgcgcttgttttccgtggtcgtgccgggattgcgaaattaaatcttgatagcgaacaagaattcccctatgatgacgactcaaaccacaaaggagctaaaacaatgatcattaaaattgacggcgtagatgttgaagtggccgataacgtaggcgcttacattgccaaactagacgcgcaagttgcatcggcaaccagtcaggtaactagcatcaccgcagagcgtgacgcgcttcaggccaaagttgatggcattgaagatgaagtttccgcccgcgttgctaaaatcaaagcagacgaagacgcaaaacagaaagttatcgcggtggtttctgccgctggcgtcaagtgcgacggcctggatgttaaggcgatgaaggttgcttacatcaaagaggtagacggtcgtgatctgtctgacaaagaagattcgtacatcgacgcttcttttgactttatcgccaactctgataagatggctggcaatcgctccaaagtcttcggcaaaaaagaagatggcgagcaaaaagataaaggcggattaccgaaacttgacggcaccgaaatcatcgatccgcaggcaaaattccgccgctaataatttgcggccttcgggccgctaccaaaccaaataaacaggagattcaaaatggcacagattccagcttcttattcccgcaagcgcgatattgccgtggcggggcagatcgctgatacgtcactttacaatatcgacggcacctgtgttgctgaaggcgatatcaaagctggcgtactggtggcttccactggcgcagtttccagtggccacaaggtcgttaaaccagcaaccgcagcgagcgacgtcattgtaggcatcgcgcagttctcgcaagcctactcgcccgaaggcaagtatgacgatgagagcgcggttaacgttatgactcatggccgcatttgggcgatcgcggacgcaaccgttactgaagaagattgcgcgttcggctctttcgtcacctttaccgctaatggcaccgttgcgaagggtgatgccggggttatcaaaactggctacaaacacactggcgaatataccaagaacgcagatggcacagttctggtgaaagttcagctaacgcaggacgcaaccgccgctggcgctggccctgctggccccgctggcaagtctgcttatcagatctggattgacgctggaaacactggcaccgaagctcaattccttgcaagcctgaaaggcccgaaaggtgataaaggcgacactggcccgcaaggcccgaaaggtgataaaggcgacactggcccgcaaggcccgaaaggcgataaaggcgacactggcaccgcagcgtaaaaattaggggcttcggccccatttttgcaccagaaaaaaacctttgacggcttaacgattcgtgatattcttcatctcgttaagacaaatacacaaacaggagtttttcagatgactatgaaattagacgcattcgaacagagtgcaattaaggtcgcaatgcagggcatgggcgttgatgccgcaaaactggatgcttacggcatctggactgttaagcagatgactcaattactgaatcgtcagtatgagcaggcatacccgcagaccagcgcacttgagcttttcccggtaactaccgagatctcgccgaccgcccgccgctttgagtggctcgaattcgatggtgtaacttctgcgaaaattatcgccgattacaccgacgacctgccgaccgttgaagcgatggcgaaagagaagtcagggaaagttttccgcctgggtaacgcgtggtttatttccatcgacgaaattaaaactggcgcggcgcttgattccagcctgagcgatcgcaaagcaactctggcccgcgaaggtcatgagacgctcgttaatgatctggtgttcaaaggctccgctcctcacggcatcgttagcgttttcgaccatccgaacattaaccgcatgaccgccagcgcggcttggggtgatgacgcagcagcggctgaaaaggcattcgaagatctggaaggcctgctaaacatgatcgaagaaactacgctgggccgccatcacgcgaccaacatcgtgattcctccgtctaagcgtcgtcttctgacgaaaaagatgccggacactagcggcgactcttatctgacatggttcaccaagaaccacccgaacatcaccattacggcgatggcggagctggaagatattgacggcgcaggcgccaaaggcgtgctggcatacgaaaaagacccaatgaacatgagcatcgagatccctgagcggttcaacatgctgccgatgcagccgaaagacctgcatttcaaagttccgtgcacctccaaatgcactggtctcatcgtgtaccgcccgctgacaattgcgatccttaccgggatttaatcaaaaagcgccttcgggcgcttttttattgcattgcatcatacgatgtgctttaatttgaaacctaaagtaaaccaatggagcattaacaatggccagtaaaaaagaaaccgtagaaaccgtagaaaccgtcgaaaccgtagaaaccaccagcgccgaacaggcgtcgcaggttgttcaactacaaaacgttggtgcatgtgcaattcgctataaaggcgaaaattacgtctatgagcaggtttttgaagtgccggaaaacgaaatcgaccgcttccgccacgaaatcttcaaaggccgggtcgaattctacgacaacccgaaacgcacgcgcgaatacatcgcagcagtgaaggcgaaagcgaaagagatcgtgcagcctaaaagcgcggaataacaaaaaccaacaaagggcgcttcggcgtcctttttcatatcaggagatcgaccatgagttacacaattcaagatgtgatcgataaaatgcgcagccttgcacctccacttaaagaggttccagatgaactgctgtctgcgtgggttgtgcttgctgaagagttcgtttgcaaatccaggttcggggattccatcgttacggcgatcgcattgatgaccatgcacctaatgtttttggatggcgcgatgaagcaagaaggcgaaagcctggaatcttacacgcagcgagtggcatcgttcaccctgaccggggagttttcccaaaccttcgatcgcgtatcggcgtcaagcgacaacgaaatgctttctacgccgtggggcaaaatgtactggcgtatgctcaagatgcgcggcggcggcttcggcctgcttaccgctgggaacgtccgccgctgcggaattggtaggtgatcgccatgaactacaaagcaatccaggcccgcgcaagtgcgggtattaaattcttcagcgacgctgacggcgtgttcaataagtacacgaaaggcgctggcggcggaatcgatccggaaaccggggaagatatcattcctggcgaggtggtaacgacaatcaagggcgcgatcagggatgtaaatgaccgtgacattaacggcgaaaccatcctcgctggcgataagcgcggttttttcactcatgatgtgccaatcatggagggtgacgaaatcgaagtagacggcgagcgttaccgcgttgttaatgcgcgtccggtaaaaccaacgggaaccgttgttgcctaccgtccagttttacgcagggtggcgacttatggctaattatacgatccgggagttcacaggggctattgatgcatggtgtaaggccgctggtgatgcgctggaggacgttgtaaggtttacgtgtgaagatattcaccgcgaccttgtgatgcgttctccggttgatacagggcgcttccgtggtaactggcaaatcacctttaaccgcgccccgctttacgcgattaacgcatacgaccaaactggcgaaaagacaatacagaacggcaaagccaacattgcactatacgcaaaaggggctgggatcacttcgatctggttcagtaacatgctaatctatgcgaacgcgctggagtacggccattcaaagcaggctccaaatggcgttatgggcgttgttgcgatccggttgggcgtttatgttactgaggcaatcaagcgagcgagggcgaaaaatgcattatgatatggcgttaaaatgcaaggcggcagtggctaaatttgccgccgagaacgggttgagggtcgcgggggataacgttgactttatccctccgagaggcggggaaacttaccttaaagtctcctacgtcgaggcggattcaagatcggttgacctgtcaaggaaatgccgagtctatctggcgatggttcagattgacgttatctttaagcctgggatcggaacagaccgcgcgaggattatcgcccaacgcgttgcaaaatccttccctgaaggcaagattgttgatcgtgacagtaagttatatgtgagcgagtgggcggaggtacacggcgtgcagaagcatgaggctggttggttctttccggttcggttcacagtaagacgcgagagcattgaggaaaacggttatccatcagcctgacggatcttagaggtgcttataatttcttgccagcctggaaatatataggcataatggcgttgttaaactttcatcaaaacaggagtattcaacatgcatttaccaaacggtgcaaaggtcttctttgagaagactcgcggtgcgacggttccgtttaccgcaatgaccaacgacgcgaaaaacccaagaatcacagtggcgaacggcaagctgagggtgaaagatattgtgatcttcaccgattgcacctggggcgacttcgttaacaaggtggctcgcgtaaaagcagtgacagcaggcgaggcaacgctggaagagttcgacacctccgacactaacaagtatccgggcggcgcggccactggtagcgtgagcgtgatctctggttgggtcgaattgccttgcattcaggatttaggcaaagacggcaacgaacagcagttctataactatcagtgccttggcgatgagcgcgagcaatccgaacctacttacaagtcggcggtgacgcttaactacacgtttgcgcacgattacagtaacgcgatctaccctgtgctgcgttcagccgacgccagcaagcaggcgaaagcgatgtacatgtatatcccgcgagcttccgaggttcgttactggtctggagttgcatctttcgatgacattccttccacggctattaacgagatggaaacggtaacgcttaacattgcgcttaaaggtgcgcacgtcttccttccggttgtcgcgtaatcaaatggcggggcttgtgcctcgcctttttttgtgcataatagcgaataacacaaaccaatcaggagttaacaaaatggctaaattcaaaattcaaatcggcggcaatctcccttctttcaaactgcctgtaaccttcacttgcccggacggcaaagaagctaccatcaccatgaccgtaaaacatcgctccaccgatgagatgaaagacttctatgatagcgaagataaagcgccaaagggtaacgccgagtttatccgcttcatggctgaaggttgggatctggatgacgaattcagcgatgaaaacatttcctggctttgcgctcacttcccggcgttcgtcatggcactgccacaaacttacatggccgcgcttgcgggccaccgtgcaaaagtttaaggcgggctgtttatctcacgcttcagcctgagctaaccgatcgccagcttgcggagtatgggttaaggcgatcggactatgaagcagatcttgaaacgatctattttgatgaacagaccgcccaaagctggcagctattccaggccatgcaaacgcaatggcgaatcgggatgaatggcccgacggggcttgactataatacgttgccactgctgttcgaattgtataaaatcgacaatcgagaagcggcattacttgacttgcagatcctggagggtgaatacctgaaggagatttacaagaaatccaaataagcgcctacgggcgcttttttcatatgggggctaaacatggctgataaagtagctgggttgacgtttggcgttgacgtttcgcaggttgacaaagcggtacgatcactcgcagaactgaaaaaccaaagccagcaaacgggtgctggcctacagtcacttgcggacgctgaaaggcgggccacggcgcagaccgaggaaatgaaccgcgcgttgcagcgccagaagcaagagacagataaatcaaaaaccagctttagcaggatcgcaagcgccatcgatcccacgatctcaaaaatggccaacttgcgcaaagctacagaagaacttgataaggcgtgggctttggggcttgttccagataaggaatttttccgcctgggcgctatcatcgaatctactaccaaccaactacggcggcagcaggcggcgctaaccgaagaaggtcgcgcagcaatcgcagaggcggaggcaaagcagaaggcggcaaacgccgggcgtgattttgtcgccagcctgaaacagcaggttgactcaatcggcaaaacacgcgccgaactgctggaaatgaaggcggctcaattgggtgtatctgcggaggcggccccgttcattaacgcgctgaaacagcaagagcaggcgttaaagaaacagcaaaacgctatgggcctggctggcatttctgccgggcaatataaaatggccatgcgccagttaccgatgcagattacggatattgtaacttcccttgcgtccgggatgccaatctggttggttgctgtgcagcagggcgggcaaatcaaggacagcttcggcggcctgagcaacacgtttaaggtattgttgagctacatcaacccgctaacggttggcgctgcgtcgctgggtatcgccctggcggcaatcgctaaagctggttatgactcctggagtgcgcaacgagaactggcgaatgcgctggtgctgactggtggctatgctgcgaccacaaccgggcagatcacggccttaaccgaagagattaacaaaaactcatctgccacgattggcagtattcaggaaatcgcaacatcgctcgccagttctggtaagtacaccatcaaccagattaagcagatcacgaagactacggcggaatggtcggcgcagacgggggagagcgagaagacgatcacagggtattttgatgccatcgtaaaagaccctgttaaggggcttgccgatctcaatgagcgttttaattttctgaaagagggccagctaacctacatcgaatctttgcgtaaaaccaaaggcgagacggcagcagcagatgcggcgacaaaactgtttgctgatactatggataagcgccttaaagatatcgcggacagtgcaactccactcgaaacgatgtggatggatattaaaaaatgggcggctgactcgtggaagtgggtaggcgatcacacggtaggggcgctaaaccttatcgttgacacggtttccgcaatcatcaacacgatcaggaagctgattgccgacggcgacgccatgatcgcgcagttcatcgttgacgctggccgacagctacagaaaattcccggcatgggagacttcgggaatgactttctggcgcagcaggagcagttaatcaaggactcgaaagccaaatccgccgagcttgcaaaaaccattgcggaacagcaggcaaggatcgcaaaaggcgagatgggttacattgacgccgcgaaggataaaaccctttccggtgggtacagcagcaaaacgaaggatcgcgtaaatcaggaagaaaaagatatcctgaaaaaccgcaacgccaggaagcagcaggtagacgcgggcgttaaaattgatgagcagtatcaggctgaactgctatcgctacaggcgcagttaaaggttttgcagcaacacaaagggcttgatgacaagatcagccagcagcgcaaagactacttcgagacggttgctaaattccaggttttggaagaggcaagccagaagcgaaaactgacccaaagcgaacagcagatgctggcgaacaaaaagaatatcctgtacatggcggagcaaaaggccatcgtgggagatcagattgttcagcagcagagattgaacgccttgcttgacaagtcgaccaagtatcaaaaccagatggcggagaaaaccaaagcgctacaggataccgccggaatgggtagcaaggagcaggagagataccgggccaatgcgcaaatggcggctgactggaaaaacagcggcggatctttaagtgaccctggatttaaagccatgcaggatgcaagcaataaattctacgcacagcaagatgcgcaaatgctgaactggaaggccgggttcactcatgcgtgggctgacattggcgacgaagttaacaacgtatacagcaacatcggggatatcacaaaaaacgcatttaacggcatggcgagcgtgcttactgattttgttatgactggtaaggccagctttagcgacttcgcaagaagcgttatcggtgacattaccaacatgcttatcaagatggcgctgtttaactcgctttctgccgcgtttggtggtggcggtacgttcagcttcgccaacatgttcagcaagggattttctggcggcggttacactggcgacggcgggaagtatgagccaaaaggcgttgttcacggcggggaattcgtgttcacgaaggaggcgacgaaaaggttaggcccggaaaacctataccgactaatgcgcggctatgcaagtggcggcctggttggtggtaacgcaagttccggatctggaatcaccaacggcggcaacgtcgcggcgtcggcggctatggtgtttaccattggtgatattaacatcacgatgggttccggtcaggatagcaaggggttagagcagggcgtaaggcagatcgtgaacgatatgttcaccgaggctttgagccaaaacgggcgcattgcgaagttcgtcaatgagaaaacgaggaggtagtagtggattcctttaaatggtgtacacaaattcaaggaggggcggcgaaggtcgccgtctccaacaacgttcgttcgatcagctttggaaatggctacatccaaacggcgtcgagtggcattaacacaaagcgccggacggtttcgatcgtttatggtgggtcggactggcaagaggtttatgacttctgccaggagcacgtaaccaagccgtttgtatggaaggcaccggatggaagaatgggcgtattcgtcgtaactgccgactccgttaaccttgcgccgcagggtggcggggtgtttgaggtaacggctgaattcgccgaacgcttcacttcatccggataatcaaaagcgccctttacgggtgcttttttttggcctatgatctggagtcaattagaggagggcttacgatgacagccaatgtttcaaaagagtttgcgaactgcttacaaaaacttttccccggcgagatcctaacgctgatcgatatcgacgccacaaagttcggcgggcaggtctaccgattccataacgagaacgtcgcatatacaaccgaggagcttttagcggcggtgaacggcgggacgcttcagccaaagatgatcacgtttcgcggcgagcagtacggcccgcgcccgttcggcctgggcgggatcgcaatgtcgagcgatggcacagtggaaaagccaacgctgacggttagcaatattgatgcgcaagcgagtgctcttattcgcgcctacaacggcctcatgcaagccaaagttacggtatgggttttggtcaaggaattgctacaaagcgacggcagcgttaaagagggcgattttaggcgatttgtttactacatcgagcgacccaagaaggttgacccgcaaaaggcaacgttcgaattaacatccgtgtttgatatggacggattaatgatcccggcacgcctaacgcaaaccgtttgctattgggcgcagcgtgggtggtacaaaaccgggaagggatgcggctacaacgggcaaaacggatactttgacaaattaggaaatagggtagatgatcccagccaggatgtttgcggtggccttgtttcgtcgtgccgattgcggttcggcaatgaggctttagattttggcggttgcgctactgcaaccttgaaaagcggacggtaatatgttaactccaaaaatcaaaatgcagatcatgcagcatgctaaggaagtttacccgcatgagtgcgcagggctggtgacgcagaaatcacgcgtgcagaaatatcaccgactcgataacgtttcgccagatcctgagaacgaatcaatgccggacgaaacacagtacgcgctggcgtcactggaaggcgagccgatcgccttcgttcactcccacactggcgacggggcaaccaccgttccgagtgccacagatttatgcttctgtgatgaatctggcttgtcgtgggttattgtgtcgattccagaaggcgatatgcggattatcgaaccgaagcgcaggccgctgattggtcgcccttgggctttgggcgcttacgattgctatggcctaatcatggattttcacaagcgccacggcgtcacactaaaagatcggcgagtaccgttcgaatggtggaagccggaatacaaagagaatctttaccaggattactggcaagaggacggattcattgaaaacactggcgatcctgaagttggcgatatgatcatcttccagcttcaggcggagaaatggaatcacgcggggatttacgttggaaataacaacatccttcatcacgcatatggcaagctgtctcgccgggatatctattctggatggtacgagcagcataaggttttaatttgcaggcacaaggagcttaaacatggcctcacatacaaagacgattaaactttctggttccctggggcgtcggttcggcgtattccacaaacttgcggttgattcggttgctgaatgcatccgggcgctgtcttaccaggttgaagggtttaagccgttcatgcagagcaaagttggttcaaacatgcgcttcggtatcatcgcagacggaaaaccaatcagcacgaacgactttgcgacttttgccgtggcaaaggagattagaatcatcccgatcccaaaagccagaaagaacggcgggttgttgcagatcgttatcggcgcggcgattatggtggcggcgttctacactggcggcgcagcattggccgagatgggcgcttttgcatcggcggcctttatggctggtggctcaatggttttgggtggagtaatgcagatgattgccccgcagatgggcggcaacatgcgggcgagcgaatcgcctgagaataaaccatcttatgcgttcggcgggcctattaacaccacggcggcaggttatccaatccaattaccatacggttacagattggctggcggcgcattgttcggttcgggatcttacgcagaagacaacaactaattaagccattcgctttttagcctgggggcgtagcctccgggctttttgtcgtgtacaattgcgagactattaacaggaggctaaacgatgaataatatcaaggcccgtaagggtggctccagcaagccgcgaaccccggtagaaatgccagataacctgatctcaaaagataagatcaagttgttgcttgctgtttcagatggcgaggtggttaacgacttcagcctgaagcagttgcattttggcggcgtcccggttcagaacgaggatggaacattcaactatgagggcgttattgcagagttccgccccggcacgcaaacgcaggactacatccagggcttcagcgagtcaagcgctgaattccaggttgctcgtgaagtcactcacaacacgccttatacgcttaccgtatcgaacaagaatctttctgccattcgctttcgcctgttatggccccgcgttctgaagcaaaaagataacggcgatatggtcggatcagttgttgagtacaagatcgagatggcggtagatggcgcaagttatcagacctatctaacgggcaaaattgacggaaagaacacgactggcggttacgatcggagcattcgcgttaacctgccgcaaaacttcacgtcgcaggttcttatccgcgtgagccgagtaacgccggacgctgacggggtgaaagttgtcgacgctttccgggttgaatcctacgctgaagttattgatgcaaaattccgctacccgttaacggccatgctttacgttgagttcgatagcgatctgttccagaaccagatccccactatctcactcaaaaagaaatggaagattatccaggttccgagcaactacgatccgattaatcgcacgtactccggaacgtgggacggtgttttcaagtgggcgtggagcaataacccggcctgggtgctttatgacctgatcatgaatcagcgctatggcttagaccagcgcgaacttggcatcccggttgacaagtggtcgctgtacgaggtggcgcaatactgtgatgagcttgtgccggacaatcgcggcgggatggaaccgcgctatttgatggatgtagttgttcagtcgcaggttgaggcgttccagttggtaagggatatttgttccgcgttccgtggaatgacgttctacaacggtgaaagcctttcgattatcgtcgacaagccgcgcgatccggtgtacctgtttacggctgataacgtcgttgatggcgtgttcgttcggacgttcccaagcgaaaagacgatgtatacgtcgtgcaacgtcatgttcgacgacgaagaaaaccagtacgaacaggatgttgaaccagtattcaacccggacgcagccatgcggttcggccacaacccaacgagcattacagcgatcgggtgtaccagaaggacggaggcgaaccgccgtgggcgttggattctgcaaacgaacctaagcgctacaaccgtttcgttttcgactggcctggaaggcatgattccttcttgcggcgatgtaatttacgttgcagatccgcactggcaatcggcctttaacctggtgctttcagggcgaatcatggaagtaacgggaacgcaggttttcctggctttccgctgcgacgcgaaggcgggcgatacgctgattctgaacactgacgacggaaagccagtgcgccgcacaatcgccagcgtttcggctgacggtaaaaccctaacgctaaacgtgggatttaattttgacgttgcgccggacagtgtattcctgattgagagcgatcagcttgcagcggaacagtatgtagtaacccggattgaaaagggtagtgatgacgacgaattcaccttcgccatcacagctacgcagtacaacccgaacaagtatgacgcgatcgacaacggagtaattaccgacgaccgaccaacttcggttgtcgacccggattcaatgggcgctccgaaagacttaacgattagctctttctcccgcattgttcaggggatgagcgtcgaaacgatggtgatcggctggtctgccgtgcagtatgcaaaactgtacgaggtgcaatggcgcaaagatggcggtaactggaacaacgttcctcgcactgcgacaacgcaggttgatattgaaggcatctatgctggcgagtatcaggcccgcgttaggtgcattagcggcggaaatgtagcgtctccgtggtctgcattggcaaccgccacactgaccgggaaagtcggagcgccaaaaggcccgattaacctttttgcgtcggacaatgagatcttcggcattcgcgttaagtgggccatgccagaaggggcggaagacacggcatacattgagctttaccagtcgcaaagcggaaccgatcaggacgcaagcctgcttacactgattccttacccggcggctgaatactggcattcaattctgcccgctggctacgtgaacttctacaaagccagaagcgtagacaggatcggcaacgtttcagaatggactgattacgctcgcggcatgtcgtcgactgacgttaacatcatcacagatgcgatcctggatgaaatcctggatagcgacgcgatgaaggagctacaggaaaacgcacaggatagcgcggcaaaactcaatgactacgcgaacagcatcattcaaaacgctttggctaatgatgcggacgtcagggttatgcgcaaggagaacggcaagcgtaaggccgagatcgcacatactacggtgttgatcgccaacgaatcagaagcgagggcggctgaaattacgcagcttaaagcgcagattgatgacgatatcacggcgcagatcacgacccttaacgaagccctggcgacggaaagcgagacgagagcaacgcagatcggtcagttgcaggcagattttgcggctgatattgacggcgtaaaaacaaccatgaacgctggttttacgcaggttaatcaggctattgcaaatgaaagcgacgcgcgggcaagttccgaggcggcgctagatgccaaaatcgggcagaactccgcagcgctaaaccagaaactcgactcgtgggcaaatgttaatggcgtcggttccatgtacacgatgaagttaggcttgaggtacaacggacaggaatacaattccgggatggccctacagcttacctcaaggggtggaagcgttgtttcacaggtgctgttcattgctgatagatttgctatcatccgtaatgcagcgtcgggatcttacacgttgccgttcgttgtacagaatgaccaggtgttcatgaataacgcgcttattcaggacggttcgattaccaacgcgaagatcggtaacgtcattcagtccaacaactttcaggagaatgttgcaggatggaggcttgataaaaacggcgtatttgtcaactatggttcaacatctggcgaaggttccatcaagcaaactaaccagaacatcacggttcgagatggtagcggccgcgttcgttgccagttgggtaggatcactggcgcatggtaaaattaacgccgggagaaatcccggcttaaccaatggaggtattttatggcttatggctttcaatcttgggatgcgaacgggaaccccaacaactatgggatcgtccctgtttcggttgctggatatattgctttggcgcaaggccagaaaagcggaacatggtattacaacgttccacctggtttaaggttgggtttcttttgggtcgcaaatcaagaccagtatggcacatcgaagaggcgaattaccgttagcggaaatcagatcgttgtttctgatgcgccagataatgcgctggaatcgggcgtctacccggcgacgcagggctttattgttgttcaaattatgagttaaagattatggcagattacggaattttacttaccaatgatagaggcaatgtttgggtttcgcctcaaagcatcccgctggcactgctatcaaagcaagacatcactcttaggggggggactaactccgatgaggtgagatcggtaacttacgacacgaatcatccatgcgttccgttcgtggtctttcatggctcttcaccacaaggtgcattcacaaaaatcaagtacagcggaaacacttgcagcgttgttttttcttttggtaagcaaaacgtatatgcggaggtttattttttctctgtgttcccacagccaaatcctggttatgggcttgcaatttgggatgaaaacggcacgctgattttgaccaatgaaaccagaacactttcagacgtacagacctacggcactggttttaatctaaacgtcactaacggcgggaagtgggcggttagtcctgttcagttgggggcgatcgttggtgttattcgtgatccatacccaagaccatttcagggcgactatggcgcagcggcattctttaacggctcaagcacgcaacttaccgcatatctaacgcaggcaccaggaggggccgccagcgatctaacctacgtcgatatgaaaaacacctgcatcgctattgattgcgcaaggtatgattaaaaagaaaggggccatgcggccccttttttacatccctaatttatcctcaagtgcggataaccgcgcttcaaatccttttgcgataaacatgtttaactcatcaatgcggaacgagtagcgatcaccagccgggatggttttgtagatcgggttttccgacccgtcttcattcgctggcccatattctgaaaccaccgtttgctcatcccacttgtcataacagatgaagccatatttaaacggctcaagaccaaaactttccatgatctccatagcacgctgtacggtcaaaccgcagtgctcgcgcacgtcgttcatgtcggcttgctctttccacgtccagaacccgatctccttcgcaatggcttttgccgcttcggtttcaggatcgctcatggctcgaacgtcgttcttcatccgaccgtctgaggtgttgattgccccatttttagcgtagatgttattgactcgaccgctaccccttccaatatcataaccgccatcgcccatcgggacgaagttcccgttgtggtcaacgcaccagcgagcggttcgcgcagttgagcctgccgcgcatgtttcgaacaaaattcgcgttggcgtgctggtttccccccacccctccgtagcctgaatgttaaccgcgccgcgcattgagtcgaattttttcccgtcgtggccagatgcaccaaagaagaaattagaccatgcctgtgcagcgccgatatatttatccgagttacccaggctgccatcgcaccacattgcacgaaccgcaggcgatgaattattagatccgcgaggcgcaatcatgttaatttccggcgcaccatctgctgatacaatcttcaaccctctgccatcctgattggttggagcattgaattttggaacggctgcatttaacgtttcaaagctacgcaccaacccaagatctgagtgcatggccctatccggaacaatccagagatctccgttatctgacagcctgaacgccggaaccctatcgctaatcgtcttacctttgggggtgacaagcaatctaatccagccaccatgattggttccagatgcatcgccagccccaaggaaatgcaaggccgcgttactgtgctccgtatagtcagatcctaaccacgggcgagaaccataaccacctaaaagctggttgttcttcgtcacgctgttagatgcgccgcgcgtatagttatggaacacagcagatccgccagcagtattttcaatcccgaaagaacactccgttgtgtggttgccgataaagttaacgccaaccccggttgttgcggttgtctccttcagtggcagcttctgcgatgcggtaacatcaacgccattgctttttacagtgccattaacaagcacatcaccatttcccgaaatggtcatctggccattcgtagaggtgtcgccatttgggcggaacatcatcccttcgctaccagaaggagttgaaagcacaagcacatcactgttatttgccctaactacacaaccgttcagggtcagcgtggcgtttccgccgggagcgctaattgcctgcggctggctaaacgtgttggccacgttggttcgcgggatcgtgctatcgttagccagcaaataatctgccgggttgttatatacaatcccggttggctccgtggtaatccacgaataaccagtgcgatcgatgattggcccggtaatcgacccattgttagcctgtacgtttaaacgattcaaccacaggataggaatccagccacccggagcatgaagataaatatcatatgaagcatccgccttttttaccgccccaagattaacgcgcttggcgtttggcctggcagaaatcaaggttcgttgagtgaaccaggtgtcaatatttccgcttgtcaacggcgaggctggaagacctcttccagacaaggagaagatatcaaccgggacgtttgccgcaccataaccagaacctccgccaatgatgaattgaacgaaagcataagcggttccagcgctcttgatgttagcgatcttcatccatgattcggtgccggaagcaaccctgcttaacttatcaggtgcttgcacgccagccacaagatctacaacccgatcacgaagattttgcgtctgccccttcgctgtttgcgcgtcggtcttcgcggagttggccgcattctctgacgcctttgcattagtctctgaagtctttgcagcggtttcagatgccgccgcagccgtagcgcttgcgccagcaaattcagaatcttgcttaacctgattggcaagattttgcagggaatcgaaatcaaagttcttgaagaactcgactgcatccgcaattacggtttcctgtgactgatagtagcgcagagtttcggcaacatcttgcgccaggccgtcaacggttagcgagtcgcttaacaggatcgcgtaatctgtagacgctacgacagcgccttttgtggtgatggctttaatttcagtatcgctaaccaccttgtttacgacggccatttgaatcggtgacgacaaaaacataatcgtcgcgccggggcgaatcagcgaaagcgaagattgccattttgtgccagtcccggtaacggttccgtctgcggccatagccgctttgccttctctgtatagtgccattttaaaagcctcttatgttggttgagtaacgcagataatagcatcaatgaacagataaaaaaaggagcctttcggctcctttagttgtcaaattagaacgggatatcatcatcgaaatccatccccgtattcccgccgctgttttgcggcttaggcgcttgttgcggcttgggttgttgaggctgcccccacccggattgctgattgccgccgttttgcgaaggctcgcgctggctgaattcgagttgtggcataatcatttcattgtggctgtaaattgtgccgttgtgctcgcggttcacgatctgaagcgtccggcaggtgacgctgatcaccttatccatttgcagcgcttcgtcgtaccacttaatcatgttttctttggcaaagaaaacggcgcggtagttcgtgtaaaccgtttcgtcctggccatcacgattgcggatcttcattcgctccgacaggtctacggcgtacattttccacgtcccgttattgttactgccttccttgacatacggttcctttcggataacacctgttacaacatgcattgtcgttcctatggggcggtttcccgcccggttaaattagttgaaagatgaaatatcttgcgcttctggttcaggctttgattctaccttttccggctcccgtttcgcaacctcttgcggtttaccagggttaaagccgttagccggggtgactttcagttctgcctggcgtttggtgatatcgtcttccgtcattttccattccgcaggcgttaacgtttgtttcgccagcttatagatctcacggagcgattcgagatcttcgcacgcgtcaatgcgttttttgaagtctttcggcgtcatcttcgtaatttctgcatcatcatccgcctgcttgatgcctagcgctgcggccagtgcatagcggcgggcgtaagatgttgttgaaccgtatgcttgttcgactgttttgctgatcggcatattgtactgaaacgccataaactcaccgctttcgtgcagaaacatcgtttcgaggtgcataaccttttcggtgctggtatccatcatggattgaatgaccataatcttattcttctccagcgccggggaaatagcgtcgaggatatcaccaagattcgcgtaggtgttcccaagatggttgttcttcccgcttttcttcgcggccacgaagccagattttgctttgattaatgcggctgcaatggtggtgaatttttcagatgtacgcatgataaagtttccttttcctgattggtaatgcgcactatatcacaagtgcgcaccagtgtttagctatttgtgccgtatacgtccgggaacatgtatttcacaaactgcggagtaggcaaaactacttccgccgcgtttgactcatatgatggccatgaatcatgcttcacgcattccgcatactgatgaatcacgctttgatactgcttgcgcccgatctcgatctgctggctggtcagggtgaacgccagcggagcaaacggtgactttttctcctgcgttagcagtctgacaactaccgggcgtttttcgttgtaggtcttcacgaatagatcgcgctgcaatgccatcttgagatagtaacccaggttgaaagcgagtcgcccgaaatcgtccggcttggaggattgagtggttttgtagtcggtaatcaccacgacctcgaaaacttcatccgggttgaacccccactccttgatgagttcgggatcggaaaccacgtcaacatgatctagtcgaaccttgaccttgacgccgaagatctcaccgaagattgacaattcacgctgtgcggtaggcgattcgatacatgcggcgtgtcgcgggttggccaacatcacgcttcgcatttgaacaacggcatcgaaatcaacatccttaaccagcttgcgcccggagttcatcgcggcgctttcgtcgcaaagttcaatcgcccaccaaacatttacgtcaatcccggcgcgatatgccatttccagaagttccgggtaatccttgttggacgtcccaatcaggccacgcgctttcagcttcgcagacagtgccgacttcgacgtaatcagatctttaacctcgcccggagaagtcgcccgcaggtactcgccattaaattttgccgtttcaagcatacaggtatgcgaacaggttccgaacgccagcgcggcggtttcctcacgcaccttgtatttccagtgcgccggggatgttgcgtaaatctcgccgaggcttgagccgctaacgtattccgcgcaccaggagttaggatcgtgatattgctcgttagtcaattcactgctggtgtatgccctgaaaattgcttcagccattgatattgctccatttgtggtttcgttgcgttaagtatacgcatgacgattcccggcgcaagtcaaaaagtgctatccgcagttggttaaaaaactagcgaaatttacgtaagatttagtaagatgcatcttacgtgatttttcctatatatttcattgagttaatgcaaatcggtaagatggtaagatccctataggtaaatatccatgaaaaatatggcgcgaaatccagcgaaaaaagacacgtaccccggagaaatcttaccaagattgatagatacagatagagcaataataatattgttatttatcatatacttactatctatatattgcggttaattggttaaattttgcgcgaaatttacgtaagattcatcttactaaatcttacctaaagtggttcgaccagttgcaagctactgaatttcaggcataaaaaaaggtaagactgatttgctcaatcttacctaaattctggtcaacatttaatcagagaagcgacgatgccttgtacaacttacgttcaaatccgagcttaaagttgtcaccattcggaacgataactttaagatcccgatcgtcagcagccgccagcatatcacgatctccacgacggcaaactacccgcatttctcgcttaccttctccgccatttcctttatacctgtacgccacgatctcgacatttgaagggatgatgcaggcccaaacgtcgcacttgaacgaactggcaatattgaagtgcatcgcctcaatccaggatcgagcaaggtaaatcggcccgttaccgtcgtcgctctgattggtcactatcacagatccgaaggtcagatcgccagctaacatcttctcgcgcccctcctcatcaatgaacagcatgttgcaatactcatcatccggcccatcctcatgcacgagttgcattggtagcgcgtgaattagctcctgtctgccgttctcgtgggtttttatgcctacctgatatgatttgatatgttcgttttcgatgccctcataaagcgttacaggcgtgctatcgactgcctccgttctgtttaaaactaccagcactctttcatggtcggccatcttgccgtagtcatacccgttatcacgagccacctgcttgtttctcttgaccacgtactcttgcggaaccttgccgagatagcgcccaagaatgttgatgcattcgctatacggctggccgcttaacttcattaaccagccgatccccttatcagcgccgcagccgccacagtatgcgccgccgtcgcctcgtgtttctaacttatcagtccagcggaatcggtctttgccgccgcagttcggacagtcctggtgttttccgttgaagtagcgagagtgaatgccgcaaatgttctgcaacgcttcgcgccacatgccagccatgtacggcaaaacctctttttcatcgtaaaaatccacgtcgtaacctccaaataaaaaacgcctacacgagaatgataacccggcaggcgtttagtgtttagacaaattgtgctatctgactacgcggagcatttcgcggcggtcgcatcggcgcgtcactggcttgccgttgctgtcaaatcttaaatctggtcggcagaatgaggcgcggaaacctttgcaattgttccgtcggtagctcttatgcacgagataagcgccatcggctgagatcatgccgcgcttacgccactgctgaacaacctggatgctaacccccaactcttttgccgttccagcgataccaccgaaggcatcaataaccagctccatccgcgcagtcaacccggctcgaacctcatccttcagcacgtagtaaccagtcggtcgcttgcgtttcttcttgtctttcccgcgcgatgttccgttgttgccgttcaaggttcgcttatccacctttgccatttgttccataatttaaccctcatagcattttttgttaaacctgataaaatgttccatgtattatacacgcaactatgcgaatgacaaattaggattgcccatgctcacaattgaacaacaaattgaagcctacgcagataagatcccgttaatacaaaagcggttcaccgtcggaaatatcgttccttacccgtatcaggctgttgcgtatattgagaccgcgaagcggatcgcaaaatatgaacatccgttttacattaaggcttcggtttccgccgggaaaaccatcatgatcgccatgctcgcagcgcagtgcaaggcaatgaacttacccatgatggttcttgctcgccaggccgagatcgtgaagcaggattccgaggagatcagtaacctcgacgttccgaactccgtttattgcgccgggttaggcacgaaggcggcatacttcccgatcgtcgtcggatctgaagggacggtggttaatggtctgtttaaaatgctgggcgactacgtgccttcagttctggctatcgacgaatgccaccaggttgactggcaggatctggcggaagcgatcgccaacaatgaatcgttcgagtacatgagccgaccgaaggataagccgtatcgcgtgaacggggaactggtcgatgccgaccaccaatacgacgaaaaattcgacgacgtagaattcggcggcggtcgcacacagtacaccatcgtcatttgtgagttaatgcggaggtgccttgagaagacagggcgagaacttcgcatcgttggatatacgggttctgagtttcgcggcgtcattccgattttacaggaagacaagagccagcctggtttttggcgcgagcagatcaccgacattaacacaaactatcttgtcgagttcggatcggttgttcccaccattttcggcgataccgaggcggatgggttggggtatgatctttcagaatttcatggttccagtcaggacggcacgcaggattttagcgcggaagaattgcgcaagatggaaaagaaaatccatgaatccggcgaaatgacgaagctgattatgcaaaaggtcgtggagcgtgcgaaaacccgaaacggcgtcctgataacttgcgctggccagcgtcattgcaaggaagcggcaagctatctaccgccggacgcaacatacgcaatcatcacagagaagacgaactcaaagaaacgcggcgaaattttggataaggcgaatcgcggggagattaaatacatcttccaggtgatggccctaaccactggcgttaacgttccgttttgggatttttcggtgatattgcgcaagatcgggtcgcttacgttgcttattcagcttttggggcgtggaatgcgacttctaaaggactggcaaaaacagccgccttactcgtgggtgaaagaagatcaccttgtctgggattttgccggaacaatggatgacctgggccagttgtatttcgatcctattcttgagcaggcgcaataccaaaggcgcaagagcagcaagaacggcccgaaaatctgcccggtatgcaagggagaaaatagcgagtacgcccgccgatgcatccacaaagacagcaacggtaatcgttgcgaatacttctggatctcgcagcgctgcgaagaccagaaagacccacgaacagggaagattaaagtaaaagggtgttacgctgaaaacgatattgttgctcgccagtgcagatgctgcggggtgcagcttaaagacccaaatgacaatctcaccgggaagcactacacgcagaatgactggtatgatgttgtcgggttcgatatcggcttgactcgcaatcagtccgggatcatcttcaattacgtgttacttaaccatgacggcgagcgattcaccgcaagggaaaagttcttcccggaatcagagaatcagatttgcggcaagttgtggcgacaaaaggcagtcttccagcacgttagcgacgcggtaatgcgcggcaagctgggcggaatgaaaaatgcgcgaaaaatccttgagaatgcgcattacttccgagcgccgaagcgcgtaactcatcgcgttaacggtaagaaggaagatattatttcacgcaaagattttggagacgaatagtgattactgataaaggtgattatctcgaatactacggcgggcctgtaaaggcttgcccgcttgagaaaatcgatcagatgaatagcgtttcgtggctgcggcacgaataccctgattatctgttctggcatacggttaacgaagggagtaagcacaaggcgagcgcggttatcgatcatcaaatggggttgctgaagggcgttagcgacattctgatcctgattgggttctgcggcaaatacccgttcgcggccatcgagctaaagcgccagggcaaggcgcaggcgtcaccagtgagcaaggggcaaagggaattccttgctgccgttcgccgtcgcggcggattcgccgccgtggcctatggcttcgagcaattcaagatcgctttctgcgatgccatcaaatagcactttttgttaaaaccgcccggcgaaagccgggtattattaccacatcgaaacgaagaacggagaaacatcatgaaaaacttcttgtgggtaatcgcatcaatcggttttggtgttgtggccactggcttcggcctttgggtaattactcttgctggtcattttaagggcttctaaatgaaagatatagcagacaaagacactcgtgacgcattcatcacgtttgagcaattggagcgcgaaacgtttattggcaatgcccttgctactggcggacactatcaggctgtcaggcccgacaagttttaccaggtaacaggcaaccgatacgccgggagcaaaacgcctgatatcgtgcgcgataagtgggcgacagatcgcagcctgatcgcatacatggaagagcgttatggcccttacgatcttgacgcagcggcagaccaaagcaacgcagtttgtgcgaagttttacgacgaaaaaacggattgccttaaacgctggtggggaaaaaacaagcacgtttggctgaatccgccttactcgtttccagatccgtttattctcaaggccattgagcaaatggagcacgacaaccagatcgacattctgctacccggcgacaattctactgcctggttccgtgacgcgcagaagatggcagccgaaatcatctggattgttgccgatgttgaagaggatgatgacgggaaccagttaagccgatccggtcgcctcgccttcatcaacggattaagcgggaagccagtcgacaacaacaataaaggaagtgttattttcatcatgcgcaagctcaagccgggagaggagcaaaagacgctttacattccggtaagcgagatttgcccgtcattagctaaaaagcgtatgcgcaaacgtgggatctgaaaaatggaacagatagaatctttcaccgagtatcttcggatcgtggttgaattgctggacaaatacggcttcattgggacggatgaggaaaagttagcctttgctgacaccatcgacggaacctacatggagttcattgacaacggaaccccaatcgctgactggccagaaattcttgaacgagaattgattgagtttaaatcgcatgaaggcgcggagtatttcgcaaaacagcactaattgctaaacaatacccgccgcgtgcgggtattattactccatcaaccaatcaggagcaaacgccatgaagacaaaaaccattgcagacaccatcaagatcgtaccagcaaaagcgcaagtggtatctcgccacctggttaacctttctcgcctgtgcatggccgactacatggcgaacccttcagataatggccttgatggtgtggtcggtgagatttattttcgcgcagggtacggccttgaaagcgtggccatgtatgagcaaatggccgaaggtttttgcatttacggtgacgaatgatgattgtcgagactggtcgcgctgccgtatggcagcacgcaaaagaggcaggaataagtgatgatatcgtgaagatcgcaaagcatttcgatatcaaagatatatcaattatttttggtgggaagctcacctatctacacgagcgcccggtgaagcgcacgcgaatagcagtggcaacgcgagcggaggcagacgcgctgaagatgttcatccacgagtctaagcagcagaagaaatattacaagtagcggggaggtgaagaatgcgatatattgcgatcctgattacggcggtggttctcactatcgcaatctttaactacgcaattcaattgggataaattatgtcacctaaaatcacagacgaagaatttttagccgcccgcgaggaggggaaaacctaccgcgagatcgcggaagagttcggcatgaacattcgaagcgttgagcgtcgcggcgttcgcctggcgcgacaaggacacctacacggaaacgcccacgttgcgaagcatatcccggacggcttcggcgtcaaaggcacgtcgacgatgattcgcgcggacggctccgaggtcgttcggtgggttaagtcggaagtagaccgcgaccgcatggtcgcacttatggaggcggcgcaggcagctttctgcgaagatcttccgcgagccgaaccgcaaccgctggatgaatcgaagttctacattgaagatcagcttgccctgtacccgatcttcgacctgcatattggggcgatggcgcacaagcacgaatgcggcgagaactatgacaccagcacggctgagaaggttctaaaccgcttctttgattattccgtgtcggtggctccgcaatcacaaaaagctgttttgctggtaggtggtgacttccttcacagtgacggcctggacgcagtaaccccggcaagcggtcacgttctcgatcaggatagccgatacgcaaaacttgtttatgttgccattcgttcgctgcgtcgcgcagtgtcgctactgcttaacaatcacgcagaagttgaagtgcaggtgattgaaggcaaccacgaccaggccgggatgatctggctacgcgcagcgctggcggcgttctatgagaatgagcctcgcgtttttgttgatgttagtccggcgatcctgcatcgcaccttgtggggcaaaaccatgctgggctatacgcatggccacacgatgaaaaagccggaaacgcgccttgctgcgatggctaccgacttccgcaaggagttcggccagtgcgactacatttacacgcattccggccactggcatcaccagactgtaacggaacactcgttaggaattgacgaagtgcatggccagttaggcgcaaaagatgcctacgccgcacgcggcggatggcgttcataccgccaggctgcggtgattctgtacagcaaagaatatggcgaagtaggccgttttatctaccgtccgaacatgtaaccacaacggccccgcgaggggccaacaaggaaaaaccgatgaatagaaatatctgcattttcgatctcgatggcacgctttccgacggaacccaccgcttgcacctgctgccgaaaaaagatctccaccttacagaaagttggagcgaatttaatggcgcgtcaattggcgacagtccaatccaaagcactattgacgtggcgaatgcgctttatcgatccggaatgaccgttatcatcctgactggccgatccgatgaggtgaagaccgaaacaatgatttggcttgaccgctacggggtgaaatatgacagcctaatcatgcgccgcgccagcgataaccgtaaagacacggtaataaaggaggaggagttacgcaaaatcggacttgatcgcattgttgcggcatgggatgattcacccaatgttattgcgcacttgcgcggcctgggtattacgacttaccaggtctgcgactacggcgacaatcttcacgatcatttaaaatcacacggagtagacaaatgaaaaatgtaattatcctcaacggagcgcccggcatcggaaaggacactatcgcggaaatcatctcgcggaagtggcaatacaagaaccttagcttcaaacagccgatgtttgccattgctcgtgctgtgctgggatctgctgattttgcacgctttactgcccgataccacgaccgcaagcacaaagaagtgaaatgcgattttttgggcgaccgttctccgcgtgaattcatgattcacattagcgaaaatttcgtcaagccgaccctgggcaaaaatcagttcggcaagttgctttgcgattcagcgctaacctcgccgtttaactgcatcgtcagcgacggcggttttgatgaggaggtcgagcacgtcgcagcgcatgaggcgcttaacgtatttgtcgtccgccttcatcgtgacggcatgacctttgagggtgatagccgcaagcatattcgacgccaggatcttatttgcgacacttaccatgaactcgatttttatatgaccactggcgagccggaagacgacgcgcaaaaaatccttgatatggtgtcagatgttgcattaaaattataaagttaatgcctttattatcatcaccttaactattgggaaccttgatgggttcccttttttttgttcttaatttggcctaatgcatatatcatcaccttaccatttaactaacagaggttgcatatcatgcgggaattcatcaacgcggcaaccaatagcagcggtggcgttgccctcgcgggatctgcatccgggcaattaatcattgctgccattggcttatttttcatgattctattcggctccttcggcgcgtggttgcgctggcgagattcaaaggcgcttcgtgaagcgctggaagccggggatatcaaaacggcgatgaagatcaggagtaaataacatggggattaaaacgcgggttacattcgcggcggcggtggcgatcgcggtcgcgttcctccccaaagtggaggacacgaaatacaatgtttatatggatatcgctggcgtcccaactgtatgcgaaggcatcacaggcccggacgttatcaaggggaaaacatatacccggtcagagtgcgacgcgcttttaactaagcatatccaggtggcgaagcgaaccgttgacagcaaaatcaaagtcgatgttccggacaccttcagggcgtcgatgtacagctttacgttcaacgctggcggcggcgcatattctggcagcaccatgctgaagttaacgaaccagggccgattgcgcgaggcgtgcgagcagctatatcgctggacgtactaccgcaacccgaaaacgggaaagatggagaagtcgaaaggcttgcataatcgccgggttcaggaatatcaactatgcattaaggaactgaaatgagcacattaaactttcaacgagcgctggccatcggctttatcgtgtgggcggctgccgtcgtttccggttgcgcgtcaagcgtcccaatcctttccgatctggttggtagcaagccggatatgacggcgcaagtcggcgcggagaacgtgaaacaggcggttggcgtgaccaacaaaacggacacctcaagcaagcaggagaccacgttcaaagagtcggctgtaggcaaggttgacacgtcgaacaagaaatccgtaacgacctccagcattcacgccaaccagatcacggcggacaagatcgagatccggaatgatgaaagcggaagcctgattccgtggctgattggtggtgttggggtggtaatgctggcgatcggggtgttcggtctttggcgggaacgaaaaaacaaaggggcgtaatgcccctttttctatatgtaccgtttgacgtgcaatagcgctactccgtcttcatcgttaagaccatgttcaaccgtgttggttgcggccattccttgatagagcaagatgagcgcggcacgcaagtaattttctggtgtgatctgtttcacgcaaacaagcctgtgaacttccgttatcagatcttccacctggtttcccgaaaagctgttcatcactgagttggtcaaggtgcatcatctcccacatatatcggttatccatcccttcgaacgaccggaaatcaaagcctatctccctgttatccggccccgtacaccacacagcgccgttttttccgtcaaggtatccattcgtatagcttcgcgctaaaaactccttagagaccattgaggcgaacatacgttgcgacacgttggcggcttttgccaggcgaggcgcttcgcggtgcgtgtaaacgaacttcgcaaaatcctgccgggtgaactcccggcgagattcgcagaacttgtaaatgtcaagaatgaacatcaattacctcatgaacgacgggttgataaagacttcggaatccatcacgcagataaagcctaattcctccatcttcggcaataagcgttccttaatctttttgctcaccccggcctggcctttgaagatcttcaggttgcggcaggcgttataaatgccctggacggtcataacaccttttgcctgtttgcaacgactggcgataacgtcatacagcgctttaatttccgctccctcaccagcaaagccggaagagtcagccgacgacaaatacgttttgctcaattcatggaacatgatgatcgcttcgtcaatggtcgccgtgtcgatcttcttcgagcgcttcccgccgggttgccagttccggatcgtgtgaatcacggaagccaggcgcataacctgcttatcaaacttacccatcgcaccgcgaagcatagtatgcgaatactttccgccgtcgcctaactccggttctaattcctggcgggccttgttcagtctccgcatggctgcatccgtaacctgcaacttaacgtttgattcgctcataatgtcatgaatcagccggaagtaatctgccttcagtgactggtcgatcggctcataggtcgaattcccgttttcgtcgatgaacacgcgctcgcctaaacgggtttgctcacgaaccaaaaggaaacgctccgagacaccgatcccgcgagaacccgcttgcatgatggcgtcgatggtttcatcctgtgcaattacgcaaatgcagcccaaagccacgaatgacatgttattgctaacgtcggcacgagcgatcgatacgtggcctttatcccatgctttgagcaccagttcgctgttcgtcttcttgccgccatcgttgccatacgtgatccccaaaaggctgttaaccgccgtcgcctcatccgagataacggcaaagttgccctggcggttgttaatcttcgccaggccttccggggtggtatcggataccgggaaagttagatcacataatttttcaagtttctcttccagttcgtcacgatcttcgaaaagtttcaccatatcagattgcgataactcccctttgagcgcctgcttgttggcggacagcttcgccatgattttcttacgctccttcttgcgagactcgttaatgcgctcgacttcggcgacgatcggatcgatggccagcgagttaatggcagacttaccagcggaaggcggctgcgacgtgataacgtaaagcgttgtcggttgctcgctgccgtggtactcgacccaaaagcgacccatcatcgcggcggacacggttccgagaaagtgcatgtaagcggatgattccgggaactgaacagaacgcgctgcatttagcgccagcttgccgaccacatcgtaatcattggcgatcgagattgttgggtatttatccgcgtttacgtcgatatctttgggctttggccagaatgaaacggagtcacgatacccgttcgcacgaatcgcaacgcgcaggggactgatcccctccctttctgcgatggcgataatatcttgcggtgatacgcggtcatttaaaaacatgcccttgctcctgattggttaatcgttcggctaatcatatgccgtattaaatccgagatccagtgataatctaaacacgcttgaaaaacgcgcttggattatcggggcgcatggccccgaacccgtcacaggtatttagcttcgaaagtcgttccgtcagatacactgaagccaacttcctcgcggtacagcgtccagcggcatccgtcacggtcgaagatgtatccagcaaccgcaccgagcgcacgaccactttctacctggtagcgcttgccgacgctgaaggattttttcatcgggttgctatggtcaaggccgacgcattttagcgttttggttttgagttcgatgaacgtcgcaaccgccgctccgccgtctccagcaataaacaactcgccgctaacgcctaccgacaaaataatgcgcttcttcttcagttctacgttgtcatataccatcattgacacgttgccttcatcgtcgacgcgggcggaataaaggttgttttcatggatgttaacggcacggcttgacgtgcatttaatcttgattgacttcgccatttattttctttctcccatctcgatatacaggttaaccagatccagaaagtcagctttatttctgcaactcaatttaaagccaacgtgcgactcaattttattttgcatcgcagtcagggttgcgccaccattattcatcctgagaacttcgcggcatacttcggcgagtttttgagatatcatttcttcaccacctttatttccatgccttcgcaagcggccttgatatcattaatcagtcgattaagccttaaatcagtcattacatggtgatgacgaacatcaataatcccagcaacaactaacagcatgacggcaaagataaaaccaccaggcccggacatacacaaaatagttaacatcatcaagataataaatttcatttccgtttactccgtttcgtttcgatgtggtaatgctacccgactttcgccgggtagttttagcaattcgtgctattctcgataattcgcctggaacacggcgcgggcaaaacctcgcggagtaatggagcgcagcattttagtcctttctgaccttccgcccaaaaacttccaggcccaaaagaaattcacgccttctactccatccggcggagggagccgtttcggttcgacaaatccgtttccgtgccaaatgcacgttttcttcgtgtaattgtcgcaatggggcatcttgggatgccaaacaggctcatccggagaaacatagccgccgaagtcgcgcgggtgaaaatagaagtcaggcttgcgccatagtgacgacaattttccaaccgggttttctaccatccaggggcaaccatacttattgcctaattgctcgaccatcttcgcatcatctgcggctgatagaacgtcattatcttcccttacgtgcttgattccgctatgcgctaacagcgtgcatgacgggaacgcgaaaatgaagtcaggatctggaacgccgagaatcgatcgcttcacgtcaaaatccttgtcgatccaaatgttaacatactggatattggtgtgaaccattcgaatgctatattctccgtggtcgccggagtcggcattgaagcaatacaccttgcatcccttgatggcccacggcaggcccatgatgcctgagccgtcgaacatgcagtaaataaccttgtctttcatgctttccacgcctcaatgaacattctgttcgattccagcgtcagcgtgacgccagccagggaggactgaacgaggcgaccgcccggaaccgtcccgatgatgtagcggcctttcgacttcgtgatcgtgatctgagtgaagccggaggcgcggttcatgcggagaacgacgcggccatgcgcgttcaggacggcgagaatggaatcagtcttcggatggttcattgtgtagctccttcgcttgttggtgtggggatagtatgccactatcccgccatgttgttttagcaaaacgtgctatgccggaacgcaggtcgcgtaatcctggctgatgtagatcgtgcgctgaacgcgaggttcatgatcgccgagttcctggatggtaacatcgttgcttcctacccggcacggaaccgatccgaagataaactcgccagtctgcttgtcgttgatttgccatacattaccgccctcctttttgacaaccaggaaaggtgcgctgtctgcgctgaactcttccgggccacgaccgtagtaatgcgtgatcgcagctttggccgcagcactgaaggcatcggtaacgtcattggtcgccttgtcgcgcatggccttgatacgctcttccggcgatccgatgatgtaggaaaagctgttcgaaatggtaactgttcgcattatattttaacctcgttttggtggatgaagtcggcgacgtaatggcattcgatcggattctcgatacccgcgagcacctcgcacgacccgttattcagtagctggcaatgctggcactccgcgccgccaacactggcaatgacaatggcgatcccgttgcatgaaccgccaaacattctgtgcgggaaggggtaagcatcgcaggtgcaaaccacctccccggcccgccgtttcctcatacctggcccttctcgatgcagaaaacccaatcacgagcgtcaaccgcaaagcgtgcaatgccgtcgagaaccacgaagacggtaaatccattgacgccgcggcccttctcgatatctgttacggtacggaacagatcgcttgcgccatattgaattttatccccgacgactacatccgcgaatgctttcatgttgattctcctgactggtttcgatgggttaactataccaggcctcgcggcccggcgtttagcaattcgtgcttatttcactgctttcttcgctgccttgtacgcctctttgaaggccggaacatcttcgaccggaatccagaagccggagccataaccatcgtcatagcaagggcattggtcgcagtagtcgccccaggttttctcttcgccgccgacagagaatccagtggccatttcgcataacgcctcctcaaccgcttcgatcttgtcggcgtcgctatccatgataacgaagttccacttgccgttatactcgctgcccaggttgattgattcgcgttgaagtttcatagctttggcccctttggctcaattcgtttcgttgaagtcatcatagcaaagccgatcggatggcttttgacaaaaaatgctattcctgcgattgctgattattccactgattcggaatagtggaatatatggtgattgcacttgattccctggtgattagttttgacgaatcatgattgcttttgattgtttcattctgtgcaataacttggtggagtgtttcagtatttgcaacgaattgcatagatgtatgcaccatgcacgcaatttaccgatcgaagctggcagaactggagttgtgtttccccaacatttacgtcgtgtgggagtgtgggggagggataatcttacctaaaaattgcgcaaaaaatgaccaatataagcccatatatagatagtaagtatatgataaataataataatattattattactctttatctttatatatgtttggtaagatttctccggggaggttatggattactcttgcgcaagccataatttttagatgttccgccgcgaaaaaatgtacatagggatatataggtgatgacagcaaatcttcccaaacacgctgaaaccctttgacggcgcggcctgcggcctgtattatcatcttccgaaacattaccaaacgccgtaaatgtgggggaaacacaaatgcaatacaaaggctatgagttcgaagaagtcgacgtgtccgagtggatgaagtacgacgcagaaaagcaagccgcttaccatgaatggctgcaatccatcacgtttggcgacgccaccaggtcagccggacggagccaggaagcagcgaagacggaaggcacattcactggtaatcgttcgtccgagatccggcgcatgttcctggatggcgggcggcgtatccagatgacggcggaggagttcgtggagaagttcggcgttaatccggtcgacaaccacttccgcaggccgttgctgaaacttctggagccgggcgaggtgttgcgagtgagcctgggggcggggttaatctccgtctttaccgagttcgacgcaatgactggctcaaacctggaggctgaggcatacaggcggcagggcgctatctctgaacgggaaagaatccttgccatcattgacgaagtaatgcccggcggcatcatgctaaaaggctataagctggcactaatcgccaaaatcacaggagaataaccatgaaactatatccagaccaaaacgacccggcggcaccgatgcgcctgggcagcacgctaatcgacggacaggaggttatcgacgccatcgccactgcatcggacgacgaaaatccaaccgccctggagtgcgttacagccgacttgctgttaatgtcatttctgccgggatctgagtcgtatatccagcacatcaccgaggcgggccaggcagtgacgaaaccggaattcatcggcgcgtcgaacgtcctggccatgatggccgatgagtcggacaacatcattagcctcgactatccgcaatagcactttttgttaaaacccggtcagagcgatcgggtattatctcttcatcgacaacgaaccgaggacagcgaaatgattactctgatcacctgggaacacgaaaacagcaagccagaagtgcgcgagttcgataccgtagcggcgtgctacaaccttgcggcaaacggtggcttttacaaggcgcagatcgttaacgagttcggggttgtcgattatgaattttaaggcgagcgatgtaaaacctggcgcggtctacggatcgcgcctcaataaccgcctttggcgctgggacggcgaaactatgtggactaaaggcgagggcgatgttatctggcatgaatgcggctggccataccccgccatgagccgcctggatatcgcttattatctttcggttggcgacatgcacgaggtggaaagatagcactttttgctaaaacgccgatggcgagatccggtattatttacccatcgacaacgaactgaggtgatgaagatggataaggttatcaagatgagcgaagttaagccgggcatgatggttaagtttgctggcaaatttcgcctggttctcgcagcagatcgcaaggggaacattcttaccattcgcgttaatggaaaggcccaactcttcgcaccgcagtatgacattgaagttgaagttcgaatcaagtaagcaacctggaaatgaagatgagcaagaagaatccatattcaaccagcaactaccataacgaacacgtcatgcgctggcactggcagaagctcaaagatcgccaccttgcacgccagggaaaataatcacaatagcgccgcttcggtggcgctatatccaaccatcaacacggcaaacgccaggaggaatggccatgccacgattttcagcaacaaccaaacttcgcaccttcgccgggatgccgatcccatactcatcaaccaaagccgtccagggcagcgagcacggcgtatacttccactggttaggcaagtggcgcttcaccgtcattcgcggattttacgtgacctgcgatcgcgtggatattgcagaccattccggcggaaaccatattcatgagttcaagagtcacgaatagcactttttgctaaaacccgatcggggcaatgcgttattattaccccatcgaaacagaggagcaaaaacatgatcggcaaccacaacaacccactcaatgcagcatttcaccgtcgcgcggttgagcaacacttccacgcgctgaaagtggtctgcgacgaaatgaaagcaatgcttgaactgccgtcatgggatctgcaactcgaagactactatgacggccttcgcgtcaagcgtgatgatatcatcaaccgcctgcgcctggctggtatgttcctgtaaggagaacgcaatgattcacgaaattaagtctggaaagcaagtagtggccaccatcacgcagcgccacgttgtagccttccagattaacatccctggcacgttcgatatgcagtcgcttgacgtgccagtttgggcaaacacaatcgccgttgatgccgacggctcgatttgggcctacgagtcgaccgccgaagatgtttgcatcccggactactcgcgcaaagcatgggtggattgcgggccttccgaaaacaagatgcggtcagtcggggatatggattgcttccctgattgggcaaaatcgaagattgaccttcgcggcctgaaatagcacgaatagctaaacgcccggtcagaggatcgggcataatggccacacaccaaacaacggagattcaccatgattcgcacgaccaggccgctacccaataacctttacgccatgcttggggttcgcgcggcgagactgattcacgtcaacgaagttggcaacgtggctattttgtggtttaagcgccactcaagcggggttggcctgagcattgaaagattcgggcgctttaatggcaactcacaaacccactcccattgggcggatggaacttaccactggacgcacgttaagcacgtcaagaacttcgacgccaaatcactgagcgacgacgacgcctggaagatggtaacagacctctttggttatgatgcctgcatggaggtagttggatgatacgtttatcagacttcgatcgccactgcttaaccgggcagttcggcgaaaagccagtgatgtgcaagatctcgaaggtcaacggcgaccatatcgagcaggtcaacacgcttaggggcctggcgatgcgcaaccgcctttacatccaggcacgcggcgacctgttcgcaaagcaggttcattttgcgtatgggacaggtttccacactggcggagatgggattaacccagcgccgaagaaggttaggccgcgcgagataatcgagttcggctatgtttggactaacgggatctactaatggaaacggttaaagtaatttgcacgcacgtcggctattcgccgctatccacctatttcacacctggccgtgagtatgacgccaggttcggccctggccttgatgaagtatggattttgcaggatgaccagggaaccacggaagaagaagaattttggccagcctgccgtatgccggacgaaaagatcgcaatgtacgccaaccgaccctacgaaaacaacgttttgtttgaggtgaaaatatgaaagtaagcaaaaagaaactcgcgctgtattgggccttcttcctggttggcctggcactgcatgaccacgtaggctggcagacgatcggaatgctgtgcatgattattggcgtatgccgcctgtcggagattaacgggttccgccggggatatcgggcagcattcagcggtgaaaaagaatagcactttttgttaaaactgccgtaacgtcatttgataaagtggcgttactgaagtgaaacaatccaatcaggagcaacgcaatgaacgacaatttaatcgcactgctggaagaactgaattcctacggctgtgcatacatcgagctttcgagcgagcaggttattgaagtcgcaatcgacgatgacgccgggtttaccagattaagggtggcggcaggggccgaagaggaattcgaggactgcggcatccgtgaagtaaccaaccttcttgaatccaaccaggtgaaggagatccgctaatgaacaccgtcaaacttatggttgtcaatgcggcccgcgaacgtgagcgccaccttatcggctgcgtattcgatgccgtcgaggtgcacgaaccacttggcactgtgcacgtaatccagggaggatacctgaacgaattcatcgtcaacccgctggacaccgacgaagattcgaccatccgtgttggcggcgagccggaaaacgcgcttttccacctgcggaaagtatcgaaggcgtcgcagcgcaagttgctggttcgcgcactgaagcgcatagcgaagcagcgcggatacaccgacgcatacatccgcaagttcggcacgttcgctggcgtaggcgattgggcgcggtcatgggccgacttttacttcaacaaatccggcgaattctgtgccgcgcatacggactggctgcatggaaccgaacacgatcccgtaaacggccacgagtggtacgaattcattgaggcggaattagacgccctttaatggcacgaattgctaaaacgaacgtccggggatggtgcatactatccccacactaacaagagatggagcctaaccatgaacaccacacaaatcatacacctgatcccgtccgacaacttcaccaaagacgacgacccgctgttagccgccgttattcgcgccgggatcgattgggcgctgagtgatgcctcgtgcgaatcattcatgcgtgaaccattctcacgaatcgcggagcttgaaaagcaagttgcgttcctgactggtgaacttcaggcggctatcgctacgatcgagaaggttcgggaaatcatgcgcaccgaacctggctatgacgttgaagatcacgcgcgagttttgcgcatgatggccgatgctttcgcaaagctccagcaatagcacgaaccacaaacacgaaccggggttgctgcatggcaaccccatcaaagataaggaaaacatcatgatttacgcaattattgccctggtggttcttgttctgtccctgtatgcgtgcggctgtttcctcatgcgggccttcctgaaatctgcggattctaccgacaaggaagatctttatcctgtgctttgctggccctggattacactttccgccgttggcagcgtgatcatttcccgcaattttaagtggtgagatggcgcttgggttccaaaaattgatgcccgccaaatagcacgaattgctaaaaccgatcaggggtaagctggtatagttaccccatcgaaacgaaacggagttacagcaatgaaaatcaaaatcaccaaaatcgacacgctcaacggcgacggctcaattacactggaagaatgcggcctcaaaatcggcgacgttcttgaggtcgacggccacttcaatgatggctcatactgcgtaattgccccgcgcaatagcgagtttatccaggctggtgacaatatcagcgtgagcgaagacgaatgcgaggttgtggaagaatgagcaacaaaatttgggtactgacctacactatcggaaccaacgaggggcgcaagtcgcaccgcctcatctgcgacaccaaagagcaggcgattatgcagcaaaccgttcttggtggcgatcttgtcgaatatttccgcaagcctgaagcgtttaaggtgaactggccggaaggcatggatatcaacggcgcgttagcgagcctgcgtgagatgcagcacaacccgaagacgtggagcgactttcaatgcctgcgggcggagccggaagtgaaggccgacctgttcaccaacattcggtcgcagcacgcggagtggtcggatcgccagttcggtaacgtcgggccagtcgggccgctcaagcacctggcgaaagaggctatcgaggccgccgaagcgccggatgacattagcgagttcgccgatatcatcatgttggtatgggacgcaacacgccgcgccggattcagcgatgagcagttggctgaagcggtggcggaaaagctggaacggaacaagcgtcgtgcgtggggcgaggtcaaagatggcgaaccttgccaccacgtgaaaaattaacgaaatcgaataccgtttaaagcgcctgtaagccattatggcgggcgcaaatttaaggagtgcgattgtatgcctgaatactcaaaagtcgaagatatgccgattggcgcaacgattacgggtatctgtatgagtgagtcggtcgacgccatcaagccgctggcgttcccggttacgcaggtggagacggacagcagaaaagggttcatcttcatctacaaaaatttcaatagtccgctgcgtgttgaagtgttcattgctcgcggaacctgggtggagtgggagaaggccaaatgttcggactgaatgaagcgcagtacaacgccgtgaagcgcatagcaaagcagatggccgcagaaacaaaagacgccatcaagaaggacaagaagacctacgatcaggtcgccgcgaagatgatcgataaacattgggcgcaaatcaacacgctggttactcgcggccagtttatctggatagctggctacctggaaggtcgattcggtcgcagggatggcgagtatgaataaaaaacagccaaacgattcagcgacctattgacgcaatcgcgctgaccggggtaacgtgaaccacgtagacacaagaggcggtaaacatccgcaagtctcgccccgcttaggggcatttacaaaggggttatgatgcagtacaaaatcatactcacggcaagaaaaatgggcggcttttgcaagtcctgcattcaagagttcagcatgacgattgaggcgaacgacgccgccgacgcggtggagaaagcaaaaaagcaatccggcgtcaatctggatacgcataaaatcaacatcaactacataagggaagtaaatcaatgttaactctgtttattgcactgttaatgctgttcataggctatcacgttggcgcggctcatcttgtcgagcgcctttcaaagcgggtacatgaaggcacttttgctgccatgttctacaataagaaaacagcacgttgggaaaaagttggcgacccggaaggtgtcgcaaaacgaatagccttttcgccgcttccgtatgttgactgcgagcctttcgtgaaactccagaagacgctgaatcggcgaaacaaactgatataacacaagaacccgcttcggcgggtttttttatgcccgcaatctgatatactcgcaaatcaacatagaaggagggtgcaaaatgtctgaagaacgtagaaaacgcgtaacgaaatcgcactttgaggggaacttcaaagcgctatatgaaaaggagttcggcgtggtgctagggcgcacagcagagatgacgccggaacaattttttgatatcgcaaagcgttacttccagtgggccgaagagaacgcaatcaaggctgcggaaacggcaacgttt

SEQ ID NO: 13 - DNA, 166692 bp, unidentified
  source 1..166692: mol_type = genomic DNA
tttcagagaactcttcgttcagtgtgaacgaataatcagcttccataatttttaggtagctgttaatttgcttattgaacatcgggatgtacttcttgatgatagctcctttaataccggagtctttcagcatttcagttaaaataccacgacgatatttttccataaccaaattagttttgacgaggataattttatctaattcttcttgtagcagttcaatcttgtcagagttatcaatgaactcctgtgatgctttatcaattgctgctttaatacgacgtgctttatcaactgcagttaaagtcatctgcttcaaattactcatttgatttttgatgtctcttgcacgcgtacgaatagtattatactcgcgagctagttcatccagttcactctggcgcgtctttaactcgccaagaatggtattacattcttcaacatgatgattaatcttagtgattagagtgtcattagaatgcaaatcctgcaagcacgttgggcaatgaccgcctttatcatacagtccaagaaccttggaatatgattcaattttagaccgaattttaaatgttttaccttgaacttcttggattgactctgctgggtcgtctccaattactaactcaagcagttctctctgaagagtttctaattctgctttatatccacgggcttcattgacttgttcatcatacatcgtttgtaaacgagcaacgttatcaccagaaagtttcttctgcttttctgcgtactcatgatgagttttaatttcattagtcaacgcttcacgctgaacatcattaacctggatttgctgattgatttctcttatctgtgtcttgttcagtttgtccatatcagctaaaagagacacttcaagcaaatcttcaacgagctttcgtctattagcagttgataaccccatgaacggagtatatcctgccgttcctaatacgacaatctgcttaaacgatgtgtatgacatgccgatgagactttcaaagtaggattgaaaatcctttgaacttgcggcttcatcaagcttattgccatctcgtaaaatctcaaagacattcggtttttgtccacgtttaatgtagaaactatgaccgtcatactccatccacagttctactacagagtccttcttattgaaggagttaattaattgacctttcttaatatcacggaacggtttaccaaataaggcaaaagtaatagcttcgagcatagtacttttgccaccaccattcttacctgtgattaaggtcttttggcatttatcaagttgaatgtcaatggccgcttggccaactgacattatattcttatacttgacacgatttagtttaaaagtcttcactgattttgtgcctcaatgtataactgtttagacataacctttaaggctttgatatcatctgcggataggtcttcaagtgcttggatatattcttccattaaatccaataagcttttaacttctacttcttcgccatcttcagactcaaccgagttgtcaactttagaaacagttcttaattcatgtactaccttttcaagttctgattcaaacttaggaaggtcttcatcgaccgcagtgataataatgcgtactgcgagattacgaaactcttcaaagtcaatttttccagtaacaggataaatcagttttctgtgccaagtgatttcattagggacgaaatcaaaggttgataattcagtgtcttgaacccagaagccgcgtgggtcgttctcgtcacccgctgtaagcgtccaaggcgttccgatgtacttaacgtttgctgcgcttgatatggtgtggaagtgcccagaccatacttgtttgtactttttgaggaaatctggttccagcccatgagatttcattcctttataaaaataaaagccattaagctcccaatgaccaatgcagtattcagcagacgattctttgatatgcttcatgatttctgatgtgttctcttcacacatccatggacacaagtcaatcaaagtcccatcaaaatccatagtcacgggcttttcaataacagtaatatgcttatacttaccaagaacttcggttgatgcattaggcgtcaacgtattcttgtagtgagcatcatgattccctacaaccgtgattaaattaattccttccttttcgagagattcagctatttctctggcgaattccattgtcttatgagtgatagctttgcgaacatcaaaaatatcgccatattgaataatggtagttattccatgctttttagcatattcaatgtgctgctttattccatgtctttgcacttcttgaacccacgggtcatcagctttaactcctaaatgccaatctccgctatgaattattttcatgtattcgtttccacattttagtagctgcttttgatgctgcaccttttaattttcctaatacccagccgggaggtacattatcaggatggcacatcatataatctataccgttattataccatcttttccctttattatgtccggatgctttaaatttacgtcctttaacatacccaggtggaatatatggtaaaaatgcagattcaccagttaatggattatgagaatgaatgtttcctttaccgttatgacttccatgcaaagggtggttttctcctgatgtatctcttccatgcgagccgtttggagcagcaaaagccatattgaaaaagttttcagatttaaccacatcgtgaagtttttgataccgcaactcacatgcagtagcctcttttcgtgtaggaaattcttctatgatgcaagtatcaaacaaatgaggattatctttaagttctttattatagatttctttatacttcttagatactacagtcccgtgatatccattaagaaattttttctttgaagtagaacctatataaaactgagggagtttatctccctcgtatatggtcaagtaggttacgaacataatctatggtttactgacttcgtcattccaagttgatttgtaaaatataaatgagttatttcatatatactataaaatttatatggatttctgaaatatatgtcgccgtatgcttctctagctccagcaacaatagcttcagatattcccatattatggtcatttaaatatcgttctatttcttgatttatttcgtgtaccgttgttacatgagaatttgggcgttccaatgttatttccttattttgtcattaactcaaattgttctttaaagcaatgctcagaatcttggtgttctaccaggaattcaaatgctttatttcgctctttatcatagagcttctggtcagatgacagatgtttcattcgttcaaagacttcatttttattttcatcattcaaccacagaatgccagaatcatgagaagtcaacggctttccatcaatccggaatttcaaagcatcaccagtagctttatggaacacaggaatagttccacaagcgcctagttctaaatgtgtgtattccagcgaacgctcaaggaatttatccggaagacgtgacagctgatagccaaatccagactgagacatacgctcaagcatctcagagttaacatatcggtcaagaacttgaggattcagacctggcccagttttaacctgatgataatgacggcaatagtcaatttcatagcgttctttgatgttaataaacgcaggactgcgttctaacccttccaagatagtcgttttacctgcaggacgcagatgactttcatgaaagtcaaacatcaagaaatagcctttccacgtagtagtacgaccaatccaacgatgaatatcaaaatcaatggcagagaagtctttccaatacttatcacgaattgctttgatgttcatagcaggttgaaagttataaactggaggagctgagtcagaatcatcaaagaaactcaacccgccgcttggaaaatattcttccattagcacggtgttaaaatcaccgttggagctatgactaaacaaaacatcggcgcgcttaacagtttcttcaagaccagcgtttctacgcagtgacaaggctctatggtcatgttgatatacgactacccgaacctcaggtttaatgttctctatgagcttcttatagttatcaatcgctgcttctggagcgttgacagcaggtactgagttgatgataagaatgtcacatgcgttaagcagagataaagtcttatcgtagtcatctgcaagagacacaggaatagttacatctttatagctatgtgctctattacgagtaaacgctttatctttagcgtaaatgatatttacttcatggccatgttttactaaccactcacggtgctcgagactgaacttggttacgccgcatccctcaagtccgcgagccattaaaatattaatcttcatatgttgacctttgttgttaattttgaatattttaccattcccgtaataaagcaaaagggccgaagccctttaaattttcttgtatacaacataacctgccgcttcacatatacgccgagcttcttcaaagcgtttcagcatatccaccttggcattatgaattgcttcataatcgggagcaggtgcttctctcctagcggtatcacatttataacagaagtaactacgctttggtcctgtataacgttctgaacaattattgcaccggcacgcgtaatttccttcaggccaatcatgcccaggattagaacccatcaaattcgtcatacaccccaattctcttcatttaccattcataccaccgtttaacttggaaggtgtcaacccagacaagagagttcttatctattagcttacatccttcggtagaacctaacacacgatattgattatctgctacttttactgccattgttccagtagcagtgttcaaagtaaatcctgcgtctttacgaacacgtttaaattttacttgtaccagcatttagaatgtcccaaactgatttacgagaggtattccagcaagtcagaataatctcatcattaaaaggttgttttaaaatagtacgcagtttttcaatagcatacttgtaagcagggaaattgttgtctaataccgcgtctccagcatgagctcgtaatcgctcaagttcacgacggtttttacgaacaactttgttggctcgagcaatagcttgttcttctgcagcttccattagtttctgctgcagttcgtcgcgctcttcctgggtaatattgttcatgttattcctttggatggtaatttatttcaaatgtgaattcagtatcagtccaattataactatgttcaattatagcagaatctgatctgaaatcagcgtcatgtggatttttcgggtcaatgtgaatatcaagatcaagcacctcccttaaatacatctttagcaaataagggatagcgtctaggtcttgcacatcttctaaaaacccgtcgaggttaatcttcagcctcatataaaaattccagattaggtccatcacttgtaggttcgctctttttagcagaccctggcgccttataagcggtggattcatactgcgtcattttatcgtagatgtcctgaataaaggtttcatctgctaacgcaaccatatcatcgtcccgtgaatcatacacgttgtggacaaaatagctgtatttctttgccatttctttgcgttcttttttgatacgctgaacgaatgcattgaaacaagcttgggttatatacgcatgcgggttatcatacttagtttcatcgaagttgattaagcctttaattgcggcttcaatcccgtctgaaatcatttcttgcttccaggattgggtgtatcctgaaaagttgaaacgcttactcagaccttcagcgatcagcataatagcaaggccgatcgtatcgttctgttttactactcgagggccgccagcagcttcagactcacgacacttctctttccatgcacagattgatttatacagttccttgttatttacataattactcatattgcctcttcgcttcaattaataatatctattataacaaatttgggaagcgagaggattaaagcattacttaatcaattcagcacatgcaattaatttcatcatgatacgataaaaatcattatacgtgaaatttagcggaacatcaataacggcttcaaaatcttcaaatacacgctccattccataaccagcgatatcatctgattcagcataccagtacgttccatcttgtgcaaaagttatttggctattttcaagacagaacacacctttaatattttcatgtgtaagagtcaattgaattttcatagttcacccttcataatacgatagcattggaacagctgttccatgatacgtttgaactcaaccaaactaagttcaaaccaatcagattcatctacttcatgcatcatttccatgaatgaagagtataaactttcataatgagtttcatttaacatagaggcatgcgtttcccaatacatgccctcttcattgtcaaaccaaacacccatataagaatctatagtaaatccgccaatgccttctactacaatcataatttggtttactttagccattctttcaccgagtcaatagcatcttcaaatttagagaaagcatccacggatgtgtattcattctctccagagcgttcataaatccaaaacgcgtcaaaatcttcttcaatgatgaattcaccgttaggagtttcaatcgtatttctgccgtcaggcgttttagatatgaaccatccaagaaaaccaacttctgcaatctgttcttcagtcatttagaatttccaccaattgattatagtttaatgcctttccagaagaaatcataacattacaaaatctgtataatgcttcttttgatactttatacacataatcagaagttgttataatgtatgaaatacgtacaaatgttggggatttttctgccaattcatacgccagttttctagctctgccaatatcatcggcaaacttggtatcagcaagcaaaatactatcaaatacccaacggttagtaaaaatttctgtgtatagaataaccttacgcatcaagatactctcgcagttcttgttcgtttaacccttcttgccacatctctgacggagatggaagttggctgtctagagtggatgaatcaattggaaatactctgataattacgctagtatcttcatcccattgatttgcgagtatccgtttagcctgactaatatcaggctcagaatgagcccggatatacttaatccttctatgccatacaccggtaggaatagatgcgcacacgatatatgaaatcatttcgccgccttaaccgctttaacatcgcggaagcctttcttacgttgattcttcatcttacgaatagtgctttcagaaatttcaccgatacccggcgtgattggttctacaccgaaggctttgatgccaaattcagacagaagataagcaaccactaattcacggatgcgggctttaccaattttttggccttcttctttcatcgtaccgtgaagctcaacttcccactgatcaagcaaagacggagttacacaacgtccttcttccagcattgcagatactttatcataagcaaaagagttcagtacgtttttgattgcttgggacatattaatttcctcagtaacgattgttttgacaaaggagattctaaatcaaatctcctgtagcaaatcaatctttgagagattttagctcttcgagcatatcgtagtattctttactagcaaccggagctacagtgcagttgtagctattgaattcatggtatttcacgaagcgttcaagttgccactcaatcagattgttaattcggtgaagcagaaccccctctgaaccgacgtagacaaccacttcaaattgaagcccatcccaaattctggtacggacgatatcacctacagtaaaagttttcatgcgatgtaccaatgttcgttttgccaaggctcacccttgtaccagcgagtcatatcatatccgttctcgtcacggatagcgccattacgcatatagaagtactcgtcatcagtaaaatactcatgcttaacgatacatcctttactcatagcttctagagcttcttgccaatttaaccaattcatattttcctctcgagttaaacggtatgctgttatccgtcgatagagctatagtatcactcatcaactagcttgtaaacaactttgtgaaaggagtttagaataaaagagaggtcccataggaacctctaaatgaagggtatagaaatatacagaaggtggccaagatgaccttagaaaggaaccggttaatcttctatgatatctgggtcatgcccagcagcaataagattggttttgaatgttggaatgtcatactgcttaacgttatccataaaaatgacaggataccgaatagcaagcgatggatagcacccgatgcgtttagcaagtgactcaatcaacggacggtcataaaccggttggccgtcaacctcgttgattacgttatagaactcatacggaagttgcagcttatcgagcaagtcacgaactgctttacatccagggcatctccaaacttcttcagggatgccatagatttctatcatagttcagccttaatctcagaaatcaatctttcaattaattcaagtttatccgctgtagtcataggataaattttgtcaacagtggcttcttcaagatagcaacggtcagcatcgttaagtatacaccactgatcaaaatcatcagcatctatgctaacgccgttgaaggtcttaactcgttcaacagacccgtcctgtgtcagagctgttaccaaaaatggtttaaacttaagcatgttgtagaattcaacatcctttgacgacgcgctatttagccatttatcaacagagtcttctttaaacttgtaccacttatcgcaacaaaataattctatcatttcatgacctgttgaagtttggcagtcagagtattaacacgcttctgaaattcttcattagacagtttttcatctttcttggtaggattaatccaatctgcgatgataataagaacaataaacggaattgctacgaaagcacctgccgttaatgcaaccaaagcgataacgttagaaataaatttacgaatagcattaatgaatttcataattttccttaaatagttaagatgaatgctgtcatagccagaaattctggtccaaacagttcagtagccatgtggttcagagtaaacataattttgtaagtcagcatataaatttcctcaatcatgtgtccaggtagaaccgtttcttacccagagtctttggttatcagaaccacgccaatttttagtggttggcagtgattgctcgtatttcccatcaattataacatcaatgtgttgtagcaaatctaagtctttaatatcttcaaatttatatcctgtccacatccagatatctttctccggaaatcttgctttaacccaagaaactaaatttgaaatctcttcccggttctgcggataaagtgggtctccaccagttaaagtaagaccttggatatacgatttgcttaaatgggatgcaagctctttaacagtattcatagtgaataactgtccgttacgagcattccatgtactacgattataacaaccttcgcatttatgcaaacatccagtgacgaagagaacgaccctacatccagggccattcacaaagcaacatggatatattctatcatagttcatttatatatttccaattatagccttcaacacttttgcgttctccatttaaacattttaaaatatttcctttactagaaatgttaaaatatttcgcagcatccggtatatagttaaatgtttttaaaagaacaccgtttttatatgcaccaaatacattgagagtatatttttctcgaagacgctggtgctttcttttcataatttcaggattttcatacgccagctttaatgaatttttgtgccgctcttttacttcaggcttttgcattgctagcttagttaatctagaaattttgcttctaactttatcgtctttcattgtatttgataaatttaataaagttttatttctaacttcaggcttttgcattgctagcttagttagttctgcatgtctttttctaaaatcatcattcttccacatggtcttagacaattttgacatagaatgatgaagcagttctctttcttttgaatataatttaagaatttcatccaattcgtcagtattaaatctactaacgtttgagtttatcattctatgaaaggcataacacattttaccgtttccggtttttgccaaataatagtgagctaacgcatggtcatagtatgataagttaacgatattccatttatctgatttatgctcaggaaatatagatttaggaagcacatggtgtgcttccgtctttccttttattttagaattattgtaatttctttgtattaaagctgtatacgatagtaaatcgttgtcatcttcgaatattgaagatagcttatcattcacaaagtcagaagggtagattctgtcgaaattcattgaaccttacctcattacgtgcttctacttctgcatcatatttccagggttcatcagtttgaatagccccagccgataatccactttcggggtcacgggttatagcaattcccaatggatgcagaacctctttgttgattttccaaatcaatccccattcgctaagttggttccaatcaacttgcttcattggtttctctaacatgttttaccctatgcataatttctttgttcttaccaagattgaacccgcgctcagaaggattaccaagatagccacaagtcctacgaattgtattcattttctttggatcagtttcaccacaaattgaacatgtgaatccgttttcagtaggtgtcatctcatgagtagaaccacaagaaagacatttatctactggcatattaacaccaaaataatccaacttctcgatagcatagtcccatacagcttcaagaccttcaaggttacgcttcatgtcaggcagttcaacataagaaatatgaccacctttagcaatggaatgatatggtgcttcacggtcaattttttcaaaaggcgacaggttttcttctactgacacatggaaactattagtgtaccagcctttatcagttacgcccttaacatcaccaaacttggcttggtcaatcttacagaaacgatagcacagactttcagccggagttgagtacagactaaaggcatagccggtttcttcagtccactcgtttagcttagtgttgatgtacttcaggacgagtttaccgcttcctttaaaagtaagcatatcaaattcgtgaatgccaatatatcctaatgaaattgaactacgtccatttttgaatagctcaagaatttcatcatcaggtttcatacgcacaccaaaagcaccttcctggtaaagaataggagcaactgatgcagtaacaccttcaagggatttaattctagttaaaagagcttctttacaaatatcaagacgttcatccagtagtttgaacagtttattactgtcatccgaacttttataatttgcatccagagctatcctagggaggttcagtgttactacccctagattattacggccatcaagaacgggtttgccagaagagtctctccaagcaccaaggaaacttctacagcccattggagatacaggagtttctgaaccggtaattgctctattatttcgagcactgatgatatcaggatacatacgtttagctgcgcattctaatgcaagctgcttaatatcatagttcgggtcttctttacgtagattaatgccttcttctacaaacatcacaagctttggaaagattggagtaattccatcgcgtcctaatccacgaatacgattatcaagaatagctcgttgaattaatttttcttcccatgacgtgcccataccaaatgtgatagtcacaaacggagtttggccatttgaactaaacaaagtattcacttcatattcatatgcctggaaagcatcaaatacatctttttctgtttttgaaatagcataatcttttactaatgctacttgatatttgcgtgcatcacgtacatgtttagcgaatgtcttctccacataaggagcaagaactaaatcaacattagcaaacgtagttccaccatactggtgagatgctacttgcgcagtgatttgcgccatgatagcggtagctactccaatactcttaggagtttcaatttgagcgttaccaagtttaaagccattctgcaacatacctttcaaatctaccaaacaacagttggtgaaaggtaaagctggactgtagtccatatcatgaaaatggataacaccttctttgtgcgcttccattacagagaaaggaatgacctgattggcgatatgtttagatacgataccagccatcaggtcacgttgggtaggaaaaacacgagaatctttgttagcgttctcgtttaagaggtccttgttggttttattaataagtccctggatttctaattcgatattcattttaaactcttacgaagctgcttcttgtattttgaagcaagttgtgattttccatcactttcctcgtatgtaaacccgtgcaattccatttcagcaatcatctcaggtttaccaagacgtgaaaagcgtttagccatatcggcaacatattgcgggtgaatattactgtctttacgattctggcggagatagaccagcaaattctctaaccattcgaggtagtcaatatcttgaccttttaaaccagagcggttgaacttatgcttcatttggccttctgccgcattacacaggttacagagcaagcctctgacctttcctgcattgtcaccttctaacgcatggtcatggtcgaggtggttcttttgaatatcctcatctaaaggacgtttgcagcaaggacataatccgttctgtgcctgatatagtttttctttttcttctttatataacttaccggttaataacatactcttacctcagcgattagataagagtatttatagttaaattaacgagtagctactatatacattatgattagattctttgatgcagaacgaagtacagaaagcatatatgccttcataatcgtctacagtgaactcaatgtatgaattagtttcttcatgaagaagactcattttagtccaagccattccattgatgtcatcgtcgtaatagcctccactaaattctactatatcgccaacttcataccaatgactgcgtaaaatttctcttgtaacacgatgaatatcagcgaaatcgagaatttttactgtaatagttttagtaatgcacgatttagacatggcgaactccaagacgctgttcaagggcgacgatgtaatccgcggctttttgcattaaatcatactcttctgaatcacaattttcctgcccagcaaaggcgtaaagagctctggtaattggaacgattgcaccttggaaatgattaagtttaatttcagaaatcagaggaacatcttcaccttgaccgatttctttaatttggtgcatcgtatcttcgctgtagaaacaccagaaccaagattcgccgtgtggagttgggtcgttaatagtaatgattttatttgtcagtaaatcaataactgcagtgattcctaccagttcaaggtcgtcttcattatctgcagaaataacttgaaacttaaatcccggaatgaacataggaaattgttcgctcagttcatcatcattctcaataacttcaaactgcttaccaataagccccattcactttgtcctcataatcaagcaattcatttatggtaggttcagaggtattataatcctcttcaggaatagcatcttcctctggctcgacagtttcccaacgagccgcataccagggttttagacctttgctactttgcatggtgttggttcagaatcattagcagaatcatgttcaatacgccattcaacttcagtgcgagtaaccactttttcatgacgagtaacgatatctacttcaggaggactataataccaatcagtatgatatgaacctgaacgggattctgataccatgaaatgaacaccgcgagcaggataataccaaatttgagtacggtcttgatacttacgctcttgtgtccagtctccatcttctactaaaacaaagatttcttctacatcgtcatctggagcatttggcggatattcaaaatcgtagttgtcgtcccagccaccagtgacgccagcgatatgcttgatttcttttactaattcagcgttagtcattttaacctcgtagcttctgtaaatcttcatcatcaatccagctttctaaaccggatggaagcgaacattcaatttcccacagcaattcttcaattgcttgcaggcgttcaagctcttctgctgaaatagttaccatgcgtggagcttttaaatcgccaatatcataactcatagttcttcctcatgttaatcataatttaaccatacactcgccgtatttccatttagacataaccttaactccattagagtaagttacctctaccttcgctcggtgattcttaatctgcttaatttcaccagtttccaatccaccgtagccataataaagagctacaatatcaccctcccgaaggagggttccacgataatcatgcattgaatttgaatttacggagttcatcaaaaccgccgatatgtgtaccgtcaggagcaaaaatctgaggcatagttaatccaacctgtgattcacgacctaaacggcgaagcaaatcactgataaccacttcatcaaatacacctttttctggcattacattgatgaatgcatactcttgtttcttaacatcgagcagacgctttgcattatcgcaaaatacacacttatgaatgctgctgtcgtaaccaaaaaccgtgaacatcttcttctatttccttaaatacttgagcttgaacttggttccaactcgggtgtttatacgctttataaacgttaatcattccaaggcgcttcgtgacttcgccatcaattgcagcttgggcaaaatttcttccacgggtcatagctcctttgagattggagctgttagcaatttgaccagtctcattataataaaccgaatacatgagtagcattactcgttcggcttcttccatatatcgtttacgagccattttcagccttagtagttataactaatgttttaccatctaacgcgtcgagaatatctttgatgcaattatctggcattggttgaacgctagctaattgcttggcaatatcatcaggaattcccatgcgaggaatatttaatttgctaaaatcaattttatccattagcagttaccgggaagtgttctgccaatttagcagcaatggcagcgttaatttgatcagcgaaattcttattcattgcgttaacaatgatttcttgaattcggagattagctctttcaatagacatcttaatacgaccttcagcttgcttaacagcgtcatcaatagtttgacgaaccatatcatcaatagcatttttagcgcatgattgggcagcgttacgcatcatctgtgacatttcttctttagcagacatatcattccaaccgcgagtatggaacatctgctgaacttgcttcttaacttctgctcggacatccggaatagtcacagcagcaatattaacttcagattgtactgcttgcttcagcttattctgggaatcttttaacaccatttctttaacgatgttattgattaccgattgctgcagttgagcacgggctgctgtaccttctgggaataactggcgtactgcataagtatctaatttaatgtcaatcattttaattttctctcaaatttatgcttacaagtccgacatttcattttcagaatatcggttgtccaatcaacaagctgtacttgaatactaccacatttttcacaaggcacaacttgtttacatgcagcttctcgacggtcaaccatttcaagacaagctttccagtcaattttaaattcaggcacgggtggatactcaaactcaatttcaaggtcgttatcatcaacgaccatgtcttcttttaattggtttttcacagtaagttccgggcatactcgagagattcataccgctctttgtactcattaagcgatttgactaaatctgccatcatcaattcatgcttacttaattcagcttcttttgtatcaataaaccgcttaactgattccatttcggcagtaatactattcttagcgatttcaatatgatttactggtgttaacggaagaggcttaacaacattgagatacatatgtgctacatcttcatcaataactggggtggtgctcaatgttttgggaaaaatcttaaatgggtccaaatgcacttcaagaacagatgagttttcaccttgctgtttgcaacatgattttttaactacgtccatatgctctaaagcagtacgaacttgcgctaaaagcgcccgagccggatactttccgctggacaaatggctgttaatatgaattcgtacagtgacattgtcaagttcttcggcacgaatgaatgaaacacccttaggatttctagaactagtagaagatacctggtatttcacacggtcatcgcctttaagtaagcaaattgaacgattaagaatacgacgcaggtttgcattaaattcagagcagaagatttgagcagcgctacggtcatgtctttcttcagttttaaacgcccctgccgcaaagctataacgctgaccgtaaattttagcattgccgatagcaaactttttgagctgtttctctgctgacattgcgcctaaccagcgagaacgacgaatgttttctacaacaaaaccagcataattggcttcatgcgctgccatgctatttagcacacgacgagctacattaccagcaattgctacgttataagcagctggatttaaatcatgtaaagctgccaaaacctttacgtgcttctcacgctttgacaacccctttccattatgcttatcaaattcaccagctacaaacatctttaattcattcttattcattatcttttcctctattttggactgggctcaaagagtatctcaaaatctccctgaacccattatacaacaattattcctcaagcattataactttgcttgggcgcttatagaaagcatgagttttatcatctttagctaattcaaatgtagcagtaaactgtactttgcctctgtattcaaacggaatactttttggaagggaaccgtaaaccgtagctccattctcaagcacaaccatcatcttacattgtacgccgtaatagtcttcataaacttttactgacgttacggtaccagagacagtcactcgtccttccggtgcatcccctttattcttattcagctcattgaatatattatcaaagacctcttttgaatgttcctggatagcctctaagatgctcttatgggctctaacttctgccataacaacatccgttccgtcttgcaatttccactctttatatggaatgcgtacttcaagaggataaccatactcgcgaagttctttgtactccgcttgagttaagcggagtttccaccaaccgtggtcacctgtatactcaggcttatccagcgaatccaattctgtaacatacggcaagtaactgcctgcgtgataagcttcaacttcacctaattcattttcccaaagataaccatcaaagggagcatgagggcgatcatctttgccccaagtaggagctacaactttatcaaagtattcacgaccgaagcgggtcttcgcccatccagcattcaactcctcggcgcgtttttcaactttcgctcggtgtgcttggcgggctacacgattttcttcaacaagtgcagagataatctcggttaaagttttcattttattctccagtttggttgacgagaccatcttatcaacagcctcgccgaaagtaaactactttgtgaaaaattttctccaaagcataactgcgtctctacgagatacttctactgctcctagagcaatcgcttgcttacgacgaacatctcgtaaatcataatgtggaactcgcttatcttggaaccaagaacgcttcattccgatagcttctgccatagcgtgtaactcatcaaggttgtcgctaaacatatgacagttctttacttgatgacctctcattttccaaccatgattcatcaagacatctacgtatactgtcatttctgattctcgatgtaggtttcaatgatgaactgtgctaaacacagaagattatcttctgaaggagaatctactaaattctcaaccatttcagaaatagttccaaaagcttcttcagtattgaacatttcttgaagttcgttccaagtaggtgctttcatttcaatctcctcattagttaacgaagctatcttatcatggcttttctaagatgtaaacaacaaaagggcccgaaggcccttaaaaagatcggaaatcactgttaaaccatggcgactggtgttgtcgccgcttaagcaatttcagttggtatttcctattgtcttctataatcatcttagaggcttttagctcttcagccaatgagacctgtttacggtccatcaagatgaggttctgggtcttctgggcaaacgtctgaatacctttgagacattccacagattcctccatccctcgtttatacttggttcgggcagcatttaactgcccttcgtaatacgcatgtatagacactatagtactaaacaccttttacctcaataacatctaagataatatcttcaacgtcttgctcagggaatgtcacgccattggtctgcccatgctgaaatactgcttggtacgctgacggcgcagaaattcgggttgaacgttctttattgtcatagcatttgccatcaataaagcgtttaaatttaacttcataggtttttaacattattacaccttagcataattgacaatttgttcacggtcagcaggccaattcaaatcagagcgctttttgtttgaccacgcaatattttcttcagcccaatgaagtttagccgatacgctcttttgtacttctctgatggcttcttcaagataaatgcctaaatctctcgggttagttccttgagttttaaatgcattgagcaaaatatttcttacaacttctttaaattgattttcaacttccgggtgaataaattcacgatatccgttgcacggatatccaaaagcatctaccatacgagtagtactaaattctttgttcataatccgagagcctcgcgttcatcaggatttaatttagccaaagcggcttctttaattttttccaaccgtttacgcttagcttcaggtgtttcttcctggacggtgatagcagcctttttagggaatgtccatgattcaccattttcatcggtgaatgtaattagttctgttggcttacgattaactgtaccatctgagccccaccaagactgccccttgactgcttcttcggcaacgcaatatgaaccataataaccaaacaactcactacggcgatcgtctggtgaaacatacgctgcataggcttcactttctgtcattacccatttcattttagcacctcataacgaataagttcaatacgatttttaagctcttggtatgatttacgccaaggcttataataagcatttaaatcttggtgctgtttatgcatttcgtctaaatgctttactgcatcctgcacatttacaaggaaagtatcaaataccttattagcgtattctttcctgagctcaatgaatggaggagcacgaaatacatttaccattacacgcagttcatgataagaagaatggacttcagctaatacatttttcttatcgccaaaattaaacttataaagtttttcacagattgcttcacaggctttctctgctttacccttaggtttacctgcaaagatgtgtcctggcggatatactttaatattgtttaaccaacattcaatatctttaatagctgctaaactcattgtacccacgctccattttcatcaatgtaattaatccactcgttaatagtccaggaagaggtatcacctttaggagtatcagcgatatacattccgcctttaaacaaaacacgttttacatcattagaaattaaagtagccattatattttcctcagttagggaggatttctcctcccgtttaaattatttcagcattgttacttcagcaatttcacgccagtttttacggtcagtcgcgacgaaatcaccaatataaagagcagtacggagagatacgttacgcagacggtttacgttatctttcataaattccaaaacttcaataacttcagaatttcttaacccacggttctgtaacatagaagtagtcattattacatcttgaactcggaccataatctcttcattagtgtgaacaccaaggtcaagataaacagagcgtgataccagagcttgaagatgcggagcaagtttagaaccgcgctctaattcacggtcaatatcaacgttagtgataaagaccacagtaccttcaaactcaaactcattaggaattcctttatcctccaagaaagaagatgcagtactccagcatactttacgtttctcccctgaatctaaagcagctttcagaaggttaagaatgtccatatcagagaatacatctacatcatcaatgagcagaactgaatttgcttcacgtgattcccaaagacggcagtataaaccaattcctgagattttaccgttcactgatttataatcaatagcgttagtatcatgagcatgttgtaatgctttgtccaaagagtacgtcttaccgatacctgctgctccggagataatcagagaacgaatattcccatgaattaaaccgttagtcattaatcccataacgttaaagcgtttcttgatacgctctttcatttcatcaacggattcaacaacttcaattttagcagctactccgtcaattgtgatatcatctttgaatacccaaacaccacgctttttgccgttcagttcaacaaagactttaccatcaccctggcgagaatcttcagcacttaagctatccgggaaccactcaccgagtaactcatacgtacctgaaatctctttgccgaagtaaatccctttcttgatggtgatagttgacattttattctccgttactctgttttgttttgatggagctatagtatcattctacacctccaaagtaaactactttttaattatttttctaaaatttcattgatatagtaaggacggacctttgagttaagatagaagtcatctacaaaatcaatcaagttgtcagtttcaccacggatgatagcaagtttagagaacgcttctcctaccatcattggttcaaattctacgccgtgagcctcagcagctttaaaggctttatcaatgttgtttacgacgatttctaaagttttcattttattctccgttatctgtttgggtggtacaggtctatagtatcaccagctcgcgagcttgtatactactttatgtattcttttgaaacaaaaagaggagcccgaaggctcctcagttatgcgtgcttgttgatagcattttctgcgatacgctttggaagtttacctgcccagcggaagaacatgataatcgctccggcaataaacgcagggaaccaaaagatgagataaaaccaatactctcctgctttctcgatggttccatttttgattagatgcttacaaacagaccaacccacgataaagtaaattattgcaacaacgattggcactactatgctccaaagtaaaatcatatttcagcccagtaaagtgataaccggagagtttctccggcccatgacataaaacgatgtacttgttttcgagtaggtcgagcagagaacttagcattctctctacgaccagtctctctacaaactgcttccaagtaccaccgtctacctttatgaggtcttccataattcaagaagaccttcattgtatcatttgtagtaagaattgtggttttcaagataaaccttctcgacgaaatcgtcccagaatttcatgtctactttcttaggcattccattcttttcggcttgatgagcaagacgctctactgcgtcaacggtcgtttccaaaatatcctgaacttctttgaacggtaactcaccagctttgattttcttaatcaagggagcctgtgtcagaggatatttaaggtcaccggtggaatagatttcttgcaactgaagaccaccacgaagggcatgactcaatgctttccaatctacaccttcattggcttctgccttacgagcacgttcgccatattcagcatcaagcttctcaagggagtacttcatttccttaaccgtgatagttgtctggaatttacgacctaacacattatagaaatactgctgacctgatttatggtctgtaaaggttgtccactcaaggaattcacctaccggaagacgatcggcgatgtccttaactttccaacgatcgttaatgcctttctgcttaggacgatcgtcatatttccattcaggaacatctcggataacatccaggactttatgcaaatcagctaaacgagaacccttaacgccatacttaccagcctgcttacggacatatccaagataagccttcatgtccgtggtatagaaacgagctcggttgtcttgaatgaatttccatacttcaggaaggtcagatgcaactaccaattccggcggagtatgcagcatgtcaagtgcaactgtttcaccgtcagcagcgagtttgaagaagtatttcaaactgaacagctcatggtcaatgtcatctttagtatttttggttgcactgttattcgtattacgattagtatgattcatcgcctgacacattagaatatcacgcggatgaggaacaaagatttctttgaaatccacatctgattcaggagttgaagtaccgtatagatgcgaaccaaaataagattttacgattgttttcataagtagatatgattccctttagcgaatttaactaatgcattagaacgcttgacggcttcttctgctcgagttttatcagtagttctttttgatgtacggtaaacattaccaattttttgactagtgtaataatacactacttcacatgtatggtactcttgtccatcaggatgctgctcacgacaggtttcttcacgcagtgtggtttcatacataggaactaatgcccaatcaattcctgtgctaatgattgccacctggatgtcaagtctgttccagcgaaacgcattgatatatcctaggacccgtgattctgggtccatcattgcgaatttaatgttttcggctgaagccagaggcatttgtttcacaatgctcatactaagttttttcttagtagttacgagttcaatttccatgacccgccctcataatatatgtctaaatcaatgttatctttgccgctgtacttgccagtcaaaggaataaatttaaccgtaatcttttcgccgtcatcaaaagtaaattcggcaatagggtatgtagaaattataccacgttcggttttagcacgaaatacggcccgaaggccgttcacaatataaacttgatcattcttcactagttttaccttctacataatcaatcattgggcagactttccgcttgcgagcttttaaatactggacgaataccgacggttcagcttctgccggaagacccgcttttactcgagcaagttttttggtatactgtttctgattgcgatagcgtttaaatttttctaaaccaaaaataaatccaaacgctatagctgcaaataaaagcacaaatgctgctataaccactgcgccaactggtactgctataacatttaaccaaaacgtggataaactaatacctatccaagcgagaattcctgtatctgccacaatcggccaaccgaacatccatgcaacagaaccgatgaatgtgataatcgctgaagagaatagaacatgaagtactgttgtccagaagtatccacatagagtttttggcattttccacatgttgtcagatttaaaccacaggttcattttgaaatgccaagagtttttattaatattcattatcagtccttcatagttggaatcattgcggtaagatatttgaccagttcaatagcgtcgcttttatcaatagctacacaatctccgtcacgttcaatttcgatgatagtattatgttcatacgtgtggaataccgtaagatacaaatcaataacatgcgggctttcatcttcaattactgcatcgcctttacgggattttccgtcccatactaatttactcgccatcttttgcctctatcaagaattgaattaatgaatcaatttgtttagtatcaagatgaattatatcattgccttgttttagcacgatacgactcaactttttagtgaaatacgaattcacaacctttacatgcacatcgctgtacggattatctaaattggtactatcaagaatactttccataattacctcaattgtgaatcttttgaaccgcgacgattataggcagaagtcattactgtatcccactttccttgacattctacgcaccgttgacagcctttaaccaacagacgacgagctactgggatttcctcatcacaatcaacacagaactcttcggattcccgctgttcttggagttgtttctgaagacgggcccattcaatcccgtcagctattgtagcttcacgagttgcaaatccgtcatctgatggaccccatccattcatttcaaactctccagaatcatttgcaccaaattatatgtaaacatcggatgctggtattgtaccacaatatagatgataagtaaaacgtttctcattcttcgccatcatcaaagtcgtagtaataataatcacaactgtcaagataagaatccataaattcttgttgacggcggaaatcttcagaaggggtcagtctgtctgcatatgcttgatcatctggatcgctgaacttatcttcttgcaattctttaatgaactgttcagcttcttcacgtgtccaaaacccacgattaagattatgaaccgaacgtttttcacctggcttgaatacgcccatatcatgtgcagaacgctcagttgaatagctttcagtttggccagcatagttttcatattcacaaatcaccttgaagaaaggagattttcgcgaatacacaccacgaagaccgagttcaacatcatacgtgcctgatgcaacaatgtaacgcgttatttcgccgcttttagtttctgtgcgattaacaccacacacgtgataaaagatttttccaggttgaagctcggtagttaacttaatcataatgtttttctcgtttggttgttgatatgtttataatatcatgtaatgaagggaagtaaacaactttttgaaaagaaaatgcctcccgaaggaggcggagggtattactgcaatgataacaaatacttagtcttgtagcatagacctgtaatgtcatccagaacactttggagggcggcaggaactgacttgtagataccatcggccttagctagaatgaggtctagcatttcaacggtgtcctttggcagctctttctgtgatggtaaagccggtgtataactcttacctgagaatcctaaccactgctcaccaaaagcatctatcaaatctggaatctcgttaaagaaaacttcatacgctttatgtctggcatacgatttggtatcaaaatgcgctgaatgaaaatacgcctgagacgccataagtaaaccgatgaattcatcttgcggagtaagtttaccgtcctttacaaaatcattgaacttcattatcgagttgtatcctcatacggttagcgtattcttcacctgctgaacgtcctaaagaatcgcaatctttagaacaagactcgctcttccatttactttgtacgaaagcatagaactgttcagactcttgcttactaggctccttaaatttagcataaacttgtagagctccctcaacatacgaattataatctgaaatgtcgtcgtgtgatgcagctgggaatgaaatcccgcagcccaacaccagggctaagcaaatgtgattaaaggccatacggcctcctattatttttgtccagtattacgtttgtgctgaagtacagccttaacttctttgaggtatttttccagcttacgtttacgggtataatctgcttttgaactatgttgacgaatttcttcctgaaggtgcgaaataccatgcccaatctcacgacgaagttcgtccagttgttctacagtaagattacgaagttgcttttcacttaaatgctgcatatacacctcatcagttagtaatagtatttatataagtatgtgttacttaatcccaaagccattcgcagatgccttgctcaatggttctagcacctgcttcgtcccagttatattcttcatcatacttcaatgcacgtttaatttcggctttatgaaataaacgcggaaccggcattgcataacgggtccaacgtagagttttccagaatccatcgcgctttgatttagcaatcagtttcttggcctctagcggtctttcccgattttcagaaatacgcagttcaacatatttctgttgggtttctttatctttctgagttttaacgtattcgttatagcttttaatataagcaaattcgttattattctgatcgttccatttggaagattttactacatgccagcctttacggcgaattgttctagacattattacctcgttaagttaaagtacctcaacgatagtaaaatcctgatttgaaaaatttaatattcatgaatagattaccttacatttacatttggggcattcaggttctttattcttaagacgcttggtagctgtctttggagcagtgttgtaatcatatacatgaagacaacggtagcacatcacatattttttcatattaaaccatcaacgaaagcaatattacgtacatcaagaatccaattatgagtactagtactataccacttgctatggcaaataagctactcatgtttaatataacacccattcatattagcaataaagtctttaccctgtgccaatactttacattcggaattaagacgattttgtgcttcttctcgtctatcactttgtatagatgctgctacaccaatccaaatgaatagcatacccataattagcatcaggatagtgttatacgttcttggcttcattataaacacctaccagttcgcaccagtgtttacgacaaagagaaacgtatttgtcttcaccaccaagttctactacttcaccatcggtaatagcatttccgttttcgtcaatacgagctaccattgtagccttacgtccacagtggcaaacgcccttgagctcaacaagtttatcggctacagaaagaagagctttagaaccttcgaataactcgccgcgaaaatcagtgcgaagaccatacgccattaccggaacatcatacaagtcaacgattttacatagctgaagaacatgttcagcagtcaagaattgtgcttcatctacaaatacacaatgaatatcacgttgtgtttgtgcccacttgaaaaattcaagtatgtcaatagattcgtctactgtattagcttcatgacgtagaccaatacgtgatgttacctcggtggcagaatctcgagtatcaatggcaggtttaagaatgagagttcccattcctcgttctttgtaattatgagctgctgtaagaaggttagccgatttgcctgcattcatgctcgcgtagttgaaataaagctgtgccattaaagtgtctccataaaatcagaaatagcattcttagaacgaatgagttcatcgtattcttcaggtagaccatttccgtaaatggcactaatagctactacttgctcagcacctgcataatcgtcaatcaactgccacagtttagttttttgctcttcagtaatcatctatttacctctaacaaaacagatttagcttttagcctcttcatattctaccaccataatgtcaatatcaggggttgctaaattaataagtttctcaattagttcccaatcaccgccagcaataccggctccaatttttggaatgtatagaggacgattataaacaacacgaccagaatttagctcatggaatgcattaaaaattgcgccgtaatcaacatttggacctggcgcatactgggtgtatagattatagcaatatgcagtgccttttttgtgaatggctcgagtatgagttccaagcttagctaaattgttgtcataataacggtcttcatcgatgtcaatatcgagaattggaggatatgctttagcaagttgtcctgctacaccagcacccattgtagtaaagcaattacacccatgagcgatatcgcactcatgcttcatgaataattctacaatattacccttaatatatccagtaatcatttattcacctatggaattttatatgttgcatattcattaagattattgtatactcttaaaaatatagcattgttacaattaaggatagggttcagcactccttgttctttaggatgcattactccatcaacagaaatgccgtcactctgcattccacatccgcgagcattatactcaacatgtggaactatcacctggtcatctttatcttgataattataaaatgacattagcaattttctactactaggcacaaatgctatttcaatgttgttcttgaatgggccattactttctattttagtaccctgtgctgcaagtacagtttcaggatagcctgggagcttttcccaggcattaactgaaaatgcacagcataataaaatagctgcttttttcattttgacgatagtcctgacatataacgagccattaattggtcacgatacattaaacatatattttcgttaggagcattgacacataaatctttcatgctgttagccttgcgatttattagtgtcgtccattttgccgggctgcgtgaatcttttactccatcgctgaatgctgaatctaattcaagcgctaatatatcaacacattcagaattcgtattacaaaatgttttagcaatacgaagtgaatccgacattgaattttcagcattaacagagaatgccaatactaatccaagaagcgcggcgtactttatcattattccacctttatatgtagcattttatgtttctttaagaaatgagctttctctaggacatctgacgcataagagtttcctcttttgacattccatcctgcgttataactagcaagagcttttcgcatgttgccgttatgtatatttaaccaatatgaaagctcaatatatgcccactccgcagaattccgtctggatttaagcatttttcttatttcagaatcactaaggtttttaccttccagtttagctctggccttaacggtgggtaagtaattttgaaaaaccccataagaatgatgcccctttcctgcttttaaattggctcctgccgaagattctttccatgatatagcagccattatatatcctaagccgttattatcgtatcggttatgcggagatttttcctttccggatttttgatattgttcaccaaaattatatgcgtaatgcaagttgtcaagttgaacattactgaaagttggctcagacccaaaggccgttgaacataaggccattagaccgataagcgcttttttcatgtttacctcaattaatgtgtataacttttgtgctgattttacctttcaaacgtttatcattaacgaatgccatacgacactttatactaggtccttttcctggtcttggaatatccatggtaaatcctagccacagatttccatccgtaatttctaaccgcattggcttatactcgatgttttcatcaatgtcctttgggtcaattggaagccaaggcattgctaagaattcattaatttctttaagatgattaggaattttggaaagaacagagaatacatactcttcatcaatttcacgttggatagcacggtccaacaaatgatcagagtacttagtgaagaaaggctctttaccctcagccttagctcgggcacgaactgataaattcaaagagcgaaaagcttcctcaaacttacgacgcagtttagttctgcgaatgaatacttctgggttagttgacatagttcattctcctttgtgtgtagggccatagtatcatggcccgtaaggaaagtaaactactttttaatatttttcttctggacagaacactgcacggcaagcccacatagaagcttccttcagtttctgttttgctgtacgaatctgggcaatacgctcgtatgcttcatcgagtacctgcttaggttcattggctgacacttggtaattaattaatgcctcttcttcaagagcagtaaagataagaccaagacgggtctcagcgtctttgatagcattcactttaccaattttttcattggtatgtggcttgtatcctttaatatcttcgattgacattatagtgcctctgtgaaagtacgagcgataacgtcgcgctgctgttcaggcgtcagggagttgaagcgtaccgcgtagccggaaacacgaatggtcagctgcggatatttttccggatgctcaaccgcgtccagcagggtttcgcgacgcagcacgttaacgttcaggtgctgaccgccttcaatttttaccgctggctggtattcaatttctacttcacgagccttgtagccataaaaagtttcagcatccgtaatagtatcttctttaagaacttttgaaacgattactcgtgcgtcatcaccgtcttcgatgtaaatggtgcctttaagttcaccttcaagaatttgatatgctttcatatttcctcttaattagattctttattccaaccatgcatatatgcagtaactacactcattttattccactcaagtagaattactgaaccaatcgcagaagctttcaactaaatgtggaggacaccttataacaatttcagccattgcattgttttctcttgaatgcgttggtcatatgtgattaagcttgaactaatcacgcctttgagcttgccagatataaactcaattctaaaattaggatagcgattcatccacttcgtgttaggagcgttagaaatgaattctgcacctttaaacggaccagacagaaacttgtagcgcttgtactcaagcaggttgccagccgtaaccattgttattaattgcttcatatcggcaaatcctgtattttccatcactgtaatcatatcaacaatttctgtctgtgtcatcattgcattcctatcacgaaaaataaaggtaaggtatcattaggcatagaccatctgatagcttcctggtacatatcatagaacttcatcatatcgggaactttcattggttcttcaatgataattaatgctcttccaaactttcttcctctaaacttgtaagaggaatcattggatagaaattccctgattgtcatcggaacaattgatttagctatctcgttagccggtaatttattaattaaatgtgatgaattatattctcgtagaatataattcatcagttcagatgattgtgtgtatcgagtagataagattataaccgaaccatcttcaagcaaccaatcggtagcgaattggcataaggctgcggtctttccggtttgtcttccaccgtctagacgaagggtaccgtactctcgcataaggcaagacggttcataaaaactgtagttgggattattcaatcgtctgtctgcagcgtctctgaaagcatgcatcagggtcaaataaatgggagttaagtgtttcattttagattccagttaaaggggccattccttggcacatgtttaatccatcgacacactatgtaaaccccttaccgcacttgcgctcgaccttattacaggtagggaaagctacttcactcagaggactcgacgttcatgaggagaggtcgtgttcagctttattaggaattagttttaattacgggctgcattagcaacggcgtaagcgtattgaacattagcgtctttaaacgtacctttagaggtatctaaatctgctttaaatccgcctttagccataacctcggcgaattctttacggaaagccattgcatcaagacctttccaggctgatttgtgcttggcaaattcacgaccagcgaagttgacagccttagccaatttattatcaataacccatttaccagctttaggcacaaacaccgggcctttctgcttagagaatagttttaaattccagcggcgaaggtctccatcggctttaacaaaatctgcgtccaagttactagcaacaacatcttgaatatggccaaatttaagtccatcagcttcaatatttaggtcgttacgccagcgaagtccttcccaggcgaaggctttaaagtcagaagcctttgtagctaaatatcgctcaataggagctgttttagggtcaaagccgtttcctcggtaggtccactcatctttattaatgccttggacctttcctacagaagcttcggtgataaattctttataggttttcattttatatcctttaagttaatgcgtgtcattttagtgttctctatgtttgtatgagaacactatatcacaactatcgtaaaagtaaactacttaattgatttagcgtaacgaatagcgccgcgatcgtttacgaacgcaatcttgccattacgcatgtacatggtaacagtacgttggtaaccgttagaagttttgccagactgataacctactaatgcaaagttatcttcaccaggtttgttctgcttagacttaatacgctcatgaccaagtgccattaaggagcgtgcatcgccagatgctactgccttacgagaagattcatcttcaaccgaagagacaaaatcatcgaatgaatcaaacttggcatggctcttattatataacttgccgtctactacgtagttatatccaacaacgtccatttcaatttctgtaccatcttctaacgtggcggtcatcttctgaccttttttaaatttcagaagattacttccaacagattcagtcattacgccaactgttgctaaacgggattcatttaaaaattcttgataggttttcatttattttccttgataagcggcccaagttccggtccgcatagtttcaattacacgacgagcacgattaggtgtctgacgataccaacgtgaatttgccagttctttggcagcagcatcccattttttagcgagtaataacttcattgaagctgggaacccggctacaccagacacacccatttggaataccatgttaattagagctgctctacgaacatcatctaatacattatataccgggtttaatgtagcattagcaacaatacctttaattgccttctcaacatctttggcaaaaattacttctgcctcagcctgagtaatttgtccacctgtagaacgacctactagcttgtccaggttagaaatagctaaagattttgacgggtctttagtcagtaagtggccaataccaatggtccaatacccttcggtatctttataaattttgctgtcatatccttcatcgatacgcaacatgccaaaaatatccataaggacctcctattaaattataggagtatttatttggccctacacttggctataaacatctcaatgctgcaatcttcatacggcgtccatttacctttccaccatacataatctcttttatcgtcctcgggcaattcactaaatcccggatatagctgttctgctatataatatgctgattttgtatactcgccgtcaccgaagacatatcgtgatttcaatagtatacgcgacattttatctctaggatgaaatatgctaacccattttccatcgtgaataaatcgtagctcatgcttataaatgtgtggaatgcctaattcaacggcttcttccatagtaacctcactgggctgtgctatacatctgtgtcatgattttatacaaacttggtcccatcacatatttccattgagaaggtttaattaaagcaaatgcgtcgatttccgggaaagaaattccattttcatctttatggtaagctgtgcaacagcaattcttaaacacttctgggctcacagggagcatatatccaaacaaatggatatccttattgctgtcataatcatgtcgtccgaggtcatataagaggtcctggtcaaacccagtaaaccctgtttcttcctggcattcacgaatagcagcttctttcggtgtttcaccaggttcaacatgtcctttcggaatatcccatctagagcctctgccctggacatatgtatttgtcatacgacccatgaaaagccgtttgtcatcggtaaagaataagattcctgcactgagttctttcattggcattcattccaactttcttcaagaatatcttccatggcagtatagaccatagactctagtacaccatcacaattatatgaaccctctaccgagaaatcacagataggtccattaataccaagtagttcttctttaagtgaaatctcgataccgctcagtgattcgttatcactgtaacacagaaggcgagtatcaccgttttcaaattttacatgcactgcaacagccattatttcatctccttaatccaggacaaagtttcattacgagaatcatctttagatttttctttctttactttgggtttatcaaatacaccccgctgccgctgggaaacgaattgcaaccaacgagcaagcattgcaaaccaagttccaacacctgacatccaacctaaatagaacaaagtatctccaaagattggtgaaaagaagtaaaaaccccaaaaagtcccaaatccaacaaaagctgaaaatgaaaaccagataagcagaaataggaaaaaatacccaggctcatcgtctttaatcattccacggtaacaagttttaatcattttctgcagctcctaatccaggtgttgaaatcttctttttctttccacttcttgtatttcatacggtaagctaaaaatgtgcagcaattaatcaacgcaataattagcatccacatgaggctgaatgcgaaaacacctaaaaataaaagcataatcataaactctgagacgttcaatccaaagaatgtccctccaacaattacaaaagcacaatataaaatccatgtcacgattccaaaagctggcgccagcccatcttggttccaaaacccgtcaggtttacattcattcattttcttctcacctctttaataaactcaaacgactttttgcggttccattcaagagttaaattcttgcactgttctttccattcagcctttcgttcacagttatgcttaacatactttacccaacgaaatagttcaattaatcctagaccaagtaaacctattaatccccatgtaagtaatattacattcactaatgatgtactgctaatttcagccaaattcattacgtcgattatgataagcgttatcatagttccagcagcacagaccatccccggaattagaacataatcagtttggtcaaatttatagacataattataaacgggaggttcgcttggcagatataagttactcatttctgcaccctctcacggcagtatttgataaattcatcaatgattaattgtttgcctaccatgttgttagagtcaaacatactcataacctttggtggcaattcattaatgcagtaatttaagtaattgatgtaatcatctttagatgtcacatatttaactaggttaatgccaagacgatagctatttttattatgaataatctcaataactatggtgtacgttgttgaaccagaggtagaatatccatcggcattagcacgggctgatgttagatttgatggagaatcgttgaaagaataaattccgtaccgaagtgcaaagatatctacaagcttaactccatcggaaatagacgaaatgctagaaattaagtttttcagcttggaatagtctttaagaacgatagctcgaggcaaaactgtagtgttatacccgttatagcgagttttccaattctcaggccgagtatcaagacaagcaaatttctcgagaatatcagtgatttcttttgggaatcctgctgcaattaattctttaatttgaggtgttgccattggaatatctccagcgcattcatataacattttattatccaaataggggcccgaaggccccggtagattatttcagagagttcagatattcctgaacgtcggcagaggtggtctcgataccaggctgactaccgttgaaggtttcaactttcatcatgatatcttgtacatcaaccttagcgagttcagcgatttcaatcacatcatcggcagaggtaatacccagcgcgtttgcattacgagtttcacggatgtattccagtttaactgcaaggtcaagacgctgttcgtcgagcttaactacagtttgctcaatttgtgcacgcatttctttatattcagcggctttggcgcggagagcagttgcggtacggcgatacagaagaccaagcttagctaaagtttcaaccggagcaccttctgcaagaagacgacgaatttcacgctctttagaagcaccagcctggtctttttcgtcggcaagtttcagcagacgtttttcttcatttactgatttaacatgcgtggtacgcagtttagtaatttcatcaataatacggtttgctgccatcgtatactggtcttcaatagaggtattccgtgcaacaaaggtaccaaatttagaacggatgaattcaacaagttttttcagaatagacattttatttcctcagtaggtagggagttcattataactccccaaaattattagcagttaattactgcttcaattcgtttggttaaagcactagcagtttttgcgaatttaatttgaacagtttcggtaggagcttcttcatggtaaactcgaacgtagtactcttcaacagcaggccaatctttacgaacatgcttaatcaaatctttaagttcacgagtttctgctacattgaacactgcgtgttcatgttcacctttaatccaaatcgcgcgataacgatcaggagtaccgtaattgttataaccacgttcaatttggataaagttgaatttagacattttattctccgttactctgttttgttttgatgtagctatagtaaccgagttgactagcgttgtaaacaactttatgcacaaattttcaaataattttagggaatctggaaggactttctggagggtagaatggatttatacagcttggtatatagaaatgcccagacgacctctagaaggtatctgggctataattgcggtattatcatatactaaaaagccccgtccgaagacagggctctgagaatcgacagcatcacctactggcagatgacctgctaaattcattcctttgaactcggaggcatcagtctcatccaaaggagtatagcgtcaggaggttatgcttgcgacagggaacaaccgactagcggcaatggacgaaccattctcttctatctgacgactcaacgagggcatacgcaagtttcccttcgaatttggtgccgattgcaggagtcgaacccgcgacatcttcattacaagtgaagcgctctaccagctgagctaaatcgacataagacggaaataaggattcgaaccttatgtagttgcacagacgtatctgccgttgaattcctcactaagtttaagcaactattccggggtcttaatttggtgcaccgagagggattcgaaccctcaatccttgcggcgggagattttaagtctcctgtgtataccagttccaccatcgatgcgaaatggtcgaggcagaaggattcgaaccttcgacccacagtttagaagactgttgcttctatccactgagctatgccccgagattgttcaggcaggactcgaacctgcacgcttaggtctgttgcaccggtttccgccttactgactcgggtaccaaccgagggttcaaacaagctattccggtcgtgtctaccgatttcaccactgaacaagataattatattactgattatttatagcatttctcaaacgataaagttggttgcagaattcacgttcagtcaaaatcgtttcagaaattttatttttgcccatgctgtgagtgagcgtagcattcctggtagcagccaaagcttttctgaatccttcatttttactaagtgcatcgtatgctcctgttagtaaattctgatacgcttctgaggcacggtgaataggaacacctttccaataaagcgtttgtgttggccaccaacgtttcttcttacctttgaacttagcggattttccgactagtgtacatacatgtgcttgcatttcaggcgaagaaaatttgagggattgcaagaatccctccattgaggcacattctacgccatcatagataaatttatgaggagcaaagttgctcaaagcacatgatggatatgaactacctgaaccaatatccattacttttccttcacgtatttcaaccaatcaacttttaatgggctttctttctgcttatacgtaattccaacatggaatgcaaccggagcgtcaggaatacgaatttcttcttcaatgttgaagatttctactttctcaaatactcgcatgaaatcatagtcatattcaattggattacccaaccaagcctgaatagcatacataacttcatttgaacaagaatagtggttatctaaataagcatcaaactcttcgtctgagcaatcatatgcaggaacatcaacaccaaagaatttcttggaaaattcaggagttacatacttctgttcagtatgaagcttttcaagaattgcttcatggttgtaatcattatttccaagacattcaccgcggcggccacgagaagagaaccattcaagaacatgaattacttgattaatctcttctttttctaagccataaaccatttgggtagaataccgatcagcatcgttttcccaagtggtaattgccattgctaagcctttaggaataacttgtccaaatttaatatgcattttaatttcctcagttgataatttggtgaccctggcaaagactcgaacatgcaaccaatcccttatgaggggaacgctctaccaattgagctacagggcctttatagaaatcttatgacttttataaaagccctccgaagagggcgcctgtcgggcttatccacctgctaggcagaattactcacacataaaatcagctacttcccagaagtcattttcaactgctactttaactactggagaaatttcagacgttttaatagaaacaattacatcacctgcgacagtttctaccagaccaacaattttctcgctgcgagcaacaaatttactcaccggatgaaatttaccggtagcagcgaacatagcttcttggtcaacaatcagtgcgatacgtttcattctttttccttgtttgttttgatgtagtaataataacaggttattcttgtagcattaaatctcgaaaatcgttccgttttcccacattgttgcgaacataggagaaaccttaacgaatgatttgcttcgcattgcaacgtagtcgttatctactttagccaatcctgaagcaatatcagtaatacggccacacttcatagaaccgcgaccacctttattgtatgtgcgttctccgtagaaaacgatatcaccaacttgtacttctcggcctttagaatctttcatcatattttgcctgctgaattcgtttaaaatcgttaacaagttcttttgggtctgacacattgttaaatggaagaacttgacgtagtttacttactttacaaccagaatgataagcaataacttcttgaatatcacgctcactgaagtattcatatttaatcagtgaatcatatcggcatttaatccagacccacatacctttgcgttcatcaaatgcatatgcaaagtcagcgttaatcattaaatctcgtttagcacaagatgaaagccctaatgctaaattaaccggtccatccaaagacagcttcaccgtaatagcgtttacgtcatttgatacaccaataaaaatattcattctatttccttcgcttgtttttggccttcttgtcgtgcacgagaacgtcctgctttatgcagtgattcgtaatatgctcgacgtctatcaatgttttctgtgcgatatgctttcccgaaatgggatgttttgaagccgtaatatttcataatataattctcaatggcaagtgattggacggtatgcccggcctcgaaccgagtcacattgactttgcagaatccatgtgtttaatatatcacccatactcgatagcatatctgaacgagactgcaatcccgctactcagcttacgccatcttgtattgtgtcataccgttaatttggtctccatagaatgactcgaacattcgacctttccatcccaaatggaacgctctaccagactgagctatacggagtaatttggagcatccagggagaatcgaactcccatcttctgggtggaagccagacataatatccgctatacgatggatgcaaatttggcaggccctgaaggaatcgaaccctcatcactgggtttggagcccagcataatagccgttatactaagaacctgctatttggtgggagtaactggactcgaaccagtcaccgctcgattatcggtcgagagctctaccaaatgagctatattcgcgaaatggaggaagcgatgggattcgaacccatggaccgccttccgacggcctccggttttcaagaccggtgcaataaaccaactctaccacgcttccgtattatttcttaatttttcttccctttctccatccttctggaataaggtcagtttttaaaatctttttactttcaatttcattagtaatccacatggttccaaactgcgaatttttattacccgcttgagctaattttagcttttctgaaatcttatttttagtttcagaagtgtgagattttcctaacatcgaatttataaaatttttaggaatttgtctttcacccgatttatattgttctttcatagattcagaaacctttttagatatttctgaatagtctctgcgtttatttgattcacttacgccagaagaacatatagaagaaaaatctgggctgttacagatgtggtcccaaccgccttcgccgccgagcttaagattatacacattgccctttaaaaattcttcagttacaatctcagcttcctttgcatacatttcttctttggaagaaagctcaaacaagatttctttggaaaaattgtgctcaccatgctttgcaatggcgtttctaattatttttcctgaacccatatatccatcatttttatttgtggttttatgagctccaacataaacagctccattaattaaattagttattttataaatcagataatgcataaattctcctttgttgagtataattatacattgttcctttctgattgtaaacaaaaaggtgaccgatgggagttgaacccatgactacgagaatcacaatctcgagttctaccaactgaactacggccacatcaatattcactccatccatcatgaggacttcatacgaaattaagagaagaatgatcagttcaacccctgtagacgcgttgaatgaatattaatttggctggactatctggattcgaaccagagataccggagtcaaaggccggtgacttaaccgcttgtctatagtccaattatttggaggcggaggcaggactcgaacctgcgcgtgtcgggatatgagcccaacattctaccaactgaagttaccccgcatttatccgggttcttgaagtactaacaagtagcttgatgtagaacacgctaaagatataatcttacgaatatagagcttattccgtgggaacaaacagcttcgtcctcggcattatcttacaggactcaaactcatcttcaagaactgccacgttactttataaacttatttatgaactttctagcttgagtatgactaattccaagtttatttgcaaattttactagtgcaccacgctgtgtaaaatctatagaattatacaggtctattcgcaaagaaatttcgtctgcatttaacttgtgtgcatggttttctgatatttttatttttgtttcatcagaatggttatgtccagtaaaaccagtagatattattcttccgttagcgccagcgtctttagcgttttgcgcattagttgcgcaatagatgttatctaaagaatatggtccaacatctcctttacgacacatgcaatagttatctgatgctctaccccgcaaatgatatttgccagtagctttccaccatgataaccattcatcaaatgtcaatttaaattcaatacctcttgatttggcatgcactttttgcatgcggtacttttcataatctttcatgttgctctcgtatttggcagtgctgacgggtgtcgaacccgcgatctctcccgtgacaggggagtgtcttaaccatctcgactacagcactataattcgctttcagagatactctggcacgatgccgaagcaaaggggaacaggactctcatcaccttggtaccagatgaatcttgtttagcactctgttctaagatgtatcccttgaaagcgaactttcaacgccgtaagaaattataacatgaacaagcattaagcaggatgaaatcatactccttaatacaaacgccatgccagggatttctgtgccgacgatttatcagaacgtcttctgacttcttcatttggcgggccgtgcaggtatcgaacctgcctagtcatttctgacacggattaacagtccgtcgcttaccctctcagccaacgacccgaatttggtagaacgtgagggatttgaacccatcgacatctcgattaaaagtcgagtgctctaaccagctgagctaacgttctatataactatttataaatcttcgtgcttgggtatgcgtaacatttatggctttggcatatctgttaagagctccccattttgtcatgtccattgaattatatacttcaattcgtgaagcaacttcagtgtctgtcagttttgaagcgctattttctgaaatctttttacgagattcttcagtatgatgttttcctttaaaattatcacacttgccgccataaggttttactccatttttaacagcatctcgtgcattatcagcatttgtagcacaaaatacatttgttggagaataaggacctttgtcacctattctgcacatgcagtattcatgacctttacgtccacgctcagataattttccggtagatttccaccattcaatccaagtatcatacgtaaattcccaaggaattccacgatacaatgcattatatctttgttgttcgtatttaattttcataaacactctaaatttggtggggagtaatggagtcgaaccactcgagccttttgagcaacagatttacagtctgtcccgctacccctacggtctaactccccaatgggtaattttatttatactgccctaaaattaatcagagcagttgatagattaataataacaaagaaaacctaaagcatattacacaatcggtgagctctttgatttaaccaggaataccctatgtggtgaatccatatgagagagcaatacccggtgctcaggaattggacttgtatggaaaggaaccacacgataacctttaggagtaaatcctagcaaaataccaacgcttgctgcagaaagtgacccaccacagtagtatgatactaaatcaccaggctggatttcattgtcaagagaatcggttttggtatgtttaggcgtaactaaatcattaggaattggaacgccttgtgcatcatagtattcatgggcaagaatcttataattctcttgatagaaagtattaaatgcagctctgatattcatcacaatttcctcacaattaatctttgtatgcttcagttgaacctttagcaacggtttcaaatcgggaattcagtatctcaaaatagtcctgatacgttccctggagggcttcatagcattcttctaccgtagagtagacacctctaatttggtcagagccaggagcaggataataattagaccaagttaaaagtgcatacattacttacgtttccagctgtagtgagccaaaataagaagcactgcaatagcaagtagtgatgaatgcagtgctgccagtagtgcacctagtcctacacccaaagtaacataatcatacttagttacttcttcacggtgtaaatcatagtttttgatgaaccactgcttaatctttttcatgtgctattttatccattatgaaagaaatgatacccattagaaatgcaacacttaacactgatactgtttcaggaagagacataaaggctgcaccgataatgccaaaacctaacgctcccatgcagatagttgatgcaacatttctaattaattcacaacgtttcattttattctcctcaagttgatagggttatagtatcactactacaacccgttgtaaacaactttgtgaaataaattcctatttcaaatcttctgaccagtccagttttagtggctcttggtactctctatcaagcactaccggcacttgaacttcaccctcgaagtgagctggacctacattgtagctgagagtaatgtgcggtgagtaatctgggaaatcatgagttgctcccagagctcttgcatattggtgacggaattttaagtattctgaatctagtttaagaactagtgtacgtccgtcttgcgtgtcccatacttcaagtttacctgatgtagcaacttcaaaacttcctgaagcacaaacgtatggaacatgaactcttgaatagcatatcgtcgtatgaatcttatgacgaggtacaggattaggaaccttcaactcacgctgaaggtcctcaatagcatcaagagttttctcagagaatttagcagctacatatagaccagtgctaaaatcactgaagttcattaggcatcagcttcttcagtagtttcttctgcgaactgcgcttcgatttttgcaaccaggtcatcaagtttaacctgaccatcttcgctgatttcaacgccggacacagcaatcagcttctgcagtacttcttcatactgtgcacgcagagcagaaaggccttggatagtttcagacaggtcaaatacacgaactttcagagtatcgacttgggcttgcagttgttcagtagtcatttttgaattcctaatatagtgttgatttttgaataaagttcttctagagaaccgtcgttagttattacgatatcgccttcgcgaatcggaagtccacgctctgtgacgtgagtatcttttttagaaccttcttgctcaggacgaactacatgaataactgtagcacccatcgccctggctacatcaagttcatggtcttgacgagtatctggtacaatgaaataatcataatcaccaaaagtatcagccataaccaaagtaaatcgttttacccaatacatgcgatcgagcttatcacagacaatgtcagtcccaagggtctgcatgagacgacgaattgaccatggctcaacaggtttatttattacaactttacggatgacttccatcgtatcaccgtcaagtattttacgcttgctatcataaaccacgccaggtaaaggcaaatcatgatgaacatattcaatggcattcgccataatacgaatcacgtctttagtagacagatttaaatcctgctcacgatcgtaatcaataccttcaatcattgaccgagtaatgcgaggaaactgacgtgatgtatcgcgataccactcagtaagcattgcatcagccaatgcatctttaattggacctgctaactgatgctttgttgcgttatagttatccataatgtagtcagcagttgtatctttgccactacgttttttaccaatcaaaaataaaagcttcaaattattacctcatagaaggatgcattcccataaccttttgctgatactgagattcacgagtatcattgacagaaggtctaccagtaattattataccatctttttcaacttcaatgtatttgtactgcaaagttgctacacataccatggcagggtcagattcttcagttaaagaatactcaatttctgacaaatcacttacccatccaccgatatagcgaatagttaatacgatttctttcttatcgttatcaagcacatgcattaaaactgcgccaggaaatccttcaccgccattattccatccagactttcctcggtcaatgtaattctgacagcttaacatccatttgtacatctgtacccatgaatcaaggttttcgtctactaaaaatctaacaggaacagcgtcaaattcaaaggtagacccaggcaatttagcacggtgcatgccttgtggagaacccacagtatcagtagcaggaatatgaattccaggaactacagctgtttgaagattagccttaaaggcctgagtgaggcccccgtcagggacctctaatataaagttagttgtgttagtttgattaaacagtccagtagacattatgatttccatacagaagtagcagagtagcgtttgcctttcgacatgaactgctgcagtggtaacatgactacattcgcccaatcagccggttttatctcaattaaagcaccctttatattaccaggaatatatgctttaatcattttgtcagcgccagcaaatcctttaacctggctccagtttatctttaatctggtcttattagatatcactggcgtattagcatactgtttcagaagttcttctaaaaactgctgacgagcctttggcggaatgtagtgaaggtttaacccatacatcagtgtggttgtaccttgctttccaagaccaagataaactatcaaaggaaatttatcccagaatggaagagtgtctttgtgcttagcgtcatacatgtaagcatatagctttccaggttgaggcttggttacagaatgaccacgtatatttttctttatagtttctgcaaaccatttagcagatttattgtttactgctgcgccttcattacgaattttatctttgatagaactacggaatgaatttaccatcacaagagcacgctcttgtttggtcattttgttagcaggttttttctgaatttctgccactttaactgcagctttaattcttgacgcatgacgagccattgctttactgaacgtagcaggatttattcctttactttcagcaaatgattttgatgtcatgccttttttacgagcagcagagtattcaactcctaatgctacccattgattttcactacgggatttagctttaggcgattctgcagcttcagtgataaattcaaatatagccatcagcctttccatcctaattttttaagtgaatcttcggtaattaacctaaattctatacccattttactggcagtagcttgagctgctttccacttatcaacgtttacagaccatgtgtaaatttcatcaatgtaccgtttcttcgctgatgtcgtcaactttgtgggtttgaccggaggtctagtttctttcttcggcttaacttcaaaaaagaactgttgaccattagaaaacttagcccagaaatccatgaaataccggcgtttctttccatcagcattgctgaagtatggaatgactacctcttcgctgttccattgaactacatctggatgattgtcaagccatctcatcatgtactgttcccacgtagaacgataagtaatctttctgaagtcgcctttatatttgtggagattctgcggcatgaatttgccggaatatgccatagtggcctccttataaatactgttattaatatttataagaggataaactatgctcttctcattttttagtccgatagattattctgcaaagaccgtaaaaggtgctaaggcaaaagctatcccaaccgctgacatatttcgtaattatcgcaaatatttcgacactgtagcagaaaactatcttttacaaacatattacataagtggagctcctagaccagaagaattagcacatattctttatggaaatagtcagctgtactggattcttttaatgtgtaataatgtatatgacccattcagagattggattaaaacccaagatgcatgctatcaatttgcgcagcaaaaatatgcagatgtaggtggagaccaaatactctatcacgtggatgcaaacggcaatcgttattataacctcgagcaatatcctgaaaattcaggcatttggtatgataaaggggactttaatcatcagtaccctcaatatactggggctttagctggtgttgacatttatgaagactctattatagaaaatgaaaaactgcgccaaataaacattatcaatcctagtgatattgaagcatttctttctgatattatacgagaaatggaaaaagcacctgacagcgaatacgaatcaggccgatacaaatcccagactaccatcggagaagttttatgattgaaatgaacgattcattaaaatggtttactggtgttgttgaagacagacaagacccgttaaagcaaggaagagtgcgagtacgcgtttacgggcttcatccgtttgaaaaggtgcaaggagctataactggtcttcctaccgaagaccttccttggatgtcagtgattcagcctacaaactcagctggaatttccggagttggctcatctataaccggaatggttgaaggaacatctgtatttggcttatggcttgatgaattcaaaacagcaggattagtaataggaacatattctgcgcacagaaaaactaagccaaactacacggaaggtttttctgaccccacaggtcaatatcctagacaggttgggtcagataccaacccactagttcaaggcgatgaaactgggtatagtgctgtaccaaatatcatccaagatagaaacttggatattggcattaatcctgacgatgctgacctaagcgatattcctgaagacccaaatcctgcaattacaataacagatatgcttaatagggatgaaggtcttagattgaaggtctactgggacacagaaggatatcctaccataggtattgggcatcttatcatggcgcaaaaagtacgtgatatgtctgtcatcaataaaacattatcaaatcaggttggtcgtaccgttacaggaaatcctggtatcattacaatggacgaagcagttgcactatttaagaaagaccgtgataaaatgctttctgacattaaaacaaattcacgggtaggacctgtatatgctaaagtcaacaagtcaaggcagatggctttagaaaatatgagctttcaaatgggtgtaggcggtttagcaaaatttggtaaaatgcttgatgccatgttcattggtgattggaaaaccgcttatacagaagcaagaaactctgtttggtttaatcagacaaaaggtcgtgcttctcgtgtttccatgattattctaacgggtaatatggaatcatatggagttcctgctccaaagccagaaggaaaaaacctgtctgctgcttacgtagaaccaaagtctggaggtaatcctgaagacccatggactccggaagattcaagaattcttttcaaagaacctgagtcttcatataatggtcagtatccatatgttcacacaatggaaacagaatcaggtcatatccaagagtttgatgatacacctggctatgaacgttatcgtattgttcacccaacaggttcatacgaagaagtagctcccgatggacgccgtaccagaaaaactgtagctgatttatatgacatgactcagggtgatggaaatattttaatctctggggataagaaggttaacgttggagggaacgagacctattataacatgtataatcgtcgacagcaaattgatggcgataacacgctttatgtacgtggaaatgaaaccaaaactattgaaggcgatggtactatttttgtcaagggtaacattaagatagtcgttgaaggaaatgctgatatccaagtcaacggtgatgccactactaaagtagatggcaaccacgacgtgaccgtcggtggtaatttaacttggcaagtagcaggtactgtgaattggaatgttggtggggcttggactgaaacaatggcttctatgagctcaatcgcccaaggtcaatacactgttgatggttcacgaattgatgtaggttaatcatggctgatatacttcctattaatacaacgttacgtgaagtaatagaaggtgaatatgttgagcagtactttactgctcaattatctactaacgaaacattaaaatcaataaatattatcgactatcaaccagtatctgatatctctgtgtctgaaacccattataaaggtaattataactcagtttttacttttggaaacgatgtgcttaaataccgtgaaggtgatgagctaaagtccgcttcagcgtgggaggatttacctaatcccaaaactgctgatttgtatctatggaaagcccccagaacactagagaagacatttacctatacagttgagataatatatacagtgacagaagaatcgtctggaggttcatccggaggttctagcgctccaatcataacagaacataaaaagcaaaagatttactctcaaacagttaaaggcaactggagtagatggggcgaccaacttcgtgcttatgtatatgcggggaactaaatggctggactatcatttaataaatgcttaactgccgggcatagtgcgtatcctccgacagaagttaatgctacacaaagtaaagtattcactggtggaatagcggtattagttgatggcgactcaattacaccacacaccaagacggttgaccctcatgatacgcatggaggagttgttcaacctcgcacatccaaggtatttgtaacaggcaaaaaagctgttcaaatggccgatccaatttcttgtggcgacactgtcgcgcaatcaagctcaaaggtattcatacactaatggctattaaagaacccttaaattatcagttaacgcgtactgtaaacgctatcccagacgcatttactggagcaacattcgatgaaattaaaaatcagcttattaactggcttagcgggcaaaaagagtttcaggactttgattttgctggttcgcgtttaaacgtgctattagacttattagcatataacactctttacatacagcaatttagtaatactgctttatacgaaagctttattggaacagctaacttgagaagttccgttgttcaagcagctcagcaaaacgggtatttgccaagttccaaatcagcggctactgcgtctattatgcttgaggtaactcacatgaacccgagcagcacgttgagagttgtaattccacgaggaactaaatttttagcatactcaaaatccgataaagccaacccatataacttcgttgttactgaaaacgttgtggctattcgtgataatgaccaaaaatattggcctattgtcaatttggcacagggacgtattattcgtactcagttgtcatatgacccgaagaaacctattgttattcgcgaccaatcaattgaccgcaagcaggttaagctgtgggtggatggcgctgaatggactaactggacagaccgatcaatggttcatgcttcgtctatttcaacgatttattatatgcgtgaaaccgtcgatggaaatacagaattcttctttggtgagggtgtggcagaagcatctgtggcaggaggagttcttgaaagcaacttcatcggcggattgaagcctactaagggtgcgcaagtcgttattgaatatattcgtactgacggtgaagctgctaatggcgcgactgaatttagttatgcggatactctgcaatatatcgtagtaaatagaatcattgaaaactggtcagattctcctgattatgttggcgctgatggcggtggtgaacctgaagacatcgagcgtattcgtgagctcgcccagattaagcgcgaatctcaaatgcgttgcgtgtctaaaactgactatgaatcattcgttagttcacgctttggttctatcgtacaggctgtgcagtgctttactgatcaggataagccagggtatgcgtttattgcaattaagccaaaatctggactgcagttaactgcggttcaacgggaagacattcaggattatctaaaacctttctgtcttgctccgattactccttcggtaatgagcccagattacttattcatccgtcacaatattaaagcctcttacgcgctgaataagttgcaagaatcagagcagtggttacagtcaaaaattatagactcaattaatagatattacgttgatgaagttgaaatgtttaacaaaaatttcagtaaatctaaattattgacctatattgatgatactgaccattcaatcatcggttcttctgttgatattcagatggttcgtgaaattgtcaactatttcactcttcctagcgcaggtattaaatactataatactattactccgcggacgttacgttctggtgatttggtctttactgttaccccaactgctgaaccgtattcagttaatattatcggaactgacccaaataaaaatggcaaaggaaatatggttattggaccatttaagccaggtgacattaaagagaatactcatatccagccatatactgaaaacgattttgatagaaataccgtcggcgaaagaactcgttggtacaaaatcggtgaagtagattattatggtgataatatttactggagccttggagctattggagccgatcctcttcaatttgaagaccagagtattgagctttactctactcctactcaggatatcatattcgcccgcgatggaacacttatcgtatttgagaatgaccttcgtcctcaatacacaactattaaattggagcctattactcaatgacaattgcaccgttcgtcaccagcttacgaattcataagctatctgcgaatcaggtcaatattcgttgggatgacgttggtgcaaacttctactattttgtagaactggccgaaactcgaaatcaagcgggggaaatcatccccgctgataatttgagttggtcttcactgggttataccgcggataatgattggttcgagcaaaatcgtattgaaccgcttacctattataaaatgcgtgttcaaactacgtcagcaggatttgaaccgtctgaatgggttgaaacagaagagttccaaacttttgaagaaaacgcgtacacgtttgagcatatgcaagaattcagtttagtgaaagaattcattaagcagaagttttctttaaataacatgtcgtatgttaacttcaacacatctgccatgatggcatctttgatgactgagtcttttcaatttagtcctgaacattctcatttgtcagctattgaaaatttcgtagtaggcgaatctggatatcatgaaattcagggacctattgaagcagtctgtgttgataaaaatagaaccatgctaggagaaatagacggaattttgtatctgtttgaaagattccaacatatggttaaagtatcaaacgataaaggacagaactggcaatacgttcagttatttaatgaccgtgtaggaaatcctgtttcacgagtagtcatttatcaatcaagtaccacatcatatgttttaggctatgataaaatcttttacggaaggaaatcatctgacgtacgttggtcatcaaatgaggttaaatttagcgataacgaagtcacgttcgctaaattgggagaccagttaaaattgggatttgaagtagagttatttggtacatatgcatcactacctgctgatgttaccaaatatgcagaagcctttacatgcaatgatgactatttgtacgttgttgcaaaagacactgtccgtaaagttaaattaaaagatgctccaatagacactgaccctttaagccctacatttggtgaaaaggtgtttgaaaaggaagtatctcatataacaggcaatcctaaatctgtatgctttaaaatggattccgttggaggcaaaatctttgcccttattaccggggaagttaaaaccttaggattagacccaacagacccaaggaacgttgtggattctgcaactaaaggcgtctatgtttataaggaaggtacaaatacttggaagcgtgtatttggtaatacagatgaagaaaaacgtcgtatagagcatttatggacgtctatgtcaactgacggaaaggaaatattcttttcatcagctaattttaagacaacagagtacacccaggatattgaacttgagacgaaatatccagagttgatttctaccgcagtaaaaaatgttaacccaattcagtatcactctgataagcattatcacatgatgagtttccgagcggatgaattttctggttgggaaacatttgttcctggaccgatgaggttttatgctgaaccctggtttgtatggatggctcgcgatggtaacagatgctggataagcacagctgaccacgcagttgtcatttataatgatattctttatcagaaaagaatagatatggctgcacagggaactaccgagcgtgttctttcggaagtgtgggataaaggtgacgcaacgttttattgtcctccggtttcatttaacggatttttgcagtatgcttctggtatcatgtttcacgagccagacggaaagctgataggttattatgcatttgattatcgggttcgtgaccaggtaacgcttaactggaaaccaactgatgtaatgtttaaagcgtttctgcagaaccaaacgcgggaagaagactggacacctgaacatactccaggcttacgtgacccagatttgcgtccgtatcttactaaaatgatgccggatagttacttattgcaagatagtaattttgagcacttttgtaagtactatctccaattcctttcagatggaaatggaacacattacaacagtctcgttaatcttgttaagaacaaatatcctcgcgaagaaaatgcatgggaatatctgtggtcagaagtttataaacgcaatatttatctgagtaaagacgctcgtgacgctgtcgtccgtttctttgaagcacgcaagaatgatttctatgctaccaaaggaattgaagactcatataagttcctgtttaaacttctttataatgaagatgttgaaattgacatcgagtcaaagaatacgacagaatatgacattattgtagagagtacaaatatttctgacgatttagttggtcgtacgatttatactgcttctggtcgtagtaatgtgacgtatattgaacgagaataccgggatggtcgtctgttgtggcgtattactattcacaacttatcaggaagatttattgaaggacaagaaattaaatcggaacgtacggactttgagggtattatagttcaaggtgttcgtggaaaggatatgctgagtaataacattgattatataaaccgcagccgttcttactatgttatgaaaattaagtctcaacttcctacttctcggttccgtgatgatgtactgagatttgttcatccggtaggtttcggtttcattggtataacactgttgacaatgtttatcaatagcggtttaaatatgaagcatgttgaaactatcataaataaactcaagaactataaatgggatgcaggactgccatcagtttatcctgatagagttgctattatcgcttcagatgatacaatagaaagagacccaataactaatgagcctaggtattcttcacgggctcaagctggtgaacctttcccgttacctgctaactataatcaagaaaataacaatagtgttatcgctggacaaaaccctggacaacgacgtaaaccgttaagtcctacgtttgaccaatcagcagtaacgtttgccaattatcgtgatttagttaaccaacgtcttaaagacgatgcaggtaatcctcgcgatcctgaaaatccggcacaggtaaaaattgatgagtaattcaacaagagcaagttcaacgcgtagcacaatttatcgtgctatcattacatctaagttcagaactgaaaagatgtacacattttataaatcgattggtccgggaacggaccaaaacacactttttgtttcatttggcaaaagcactccatggtcggataatgaatctgaacctggatttgcacctccatatcccgctgataatgaagatggcgtagttgatgtttggacaaatatgatgggcgcggtcaaaattgaatcatctatgcttgattgtgttgttccaagaagagactggggtgatactagatatcctaacccgcgtacatttttgattggcgacattgttgttgctaactctgcgccatataacagaactgacgctggatttggatggatggtatatagatgtattgatgttccaaaagacggaatgtgttcaattggaaatcttacaagcaaagacgaatgtattaagcttgggggtaaatggacaccatcagctatttcaggttcagctcctcgcggtcgtggtgatgcaaatggtaccgtcgatttaggtgatggatatctttgggaatatctatatgaaattccagctgatgtatcaatcaacagatgcacaaatgaatatattgtagttccttggccagaagagattgaagaatctccagctcgttggggatttcaaaacaacttaacttggcaacaaaacgactttaacctaatctatcgtatgaagtgtaatacgattagatttaaagcataccttgatgcaatttattttccggagtttagtcttccaggaaatactgggtttagacagctgtcaattataactaatccgcttgaagctaagccaatgccaaattcacctaatgttaaggctgaaaaaggttggtatagtgcttctggtcttgaaagacagtcaggtgaaatgatttacatggaaaatcggcaacctattattcgttcaatggaccaaacggaagaattaaacttaattttcgagttttaattatggggagccttcggctccccatttttatataaataggactatactttgatatgaggttaacctatgtatacagataaaggtaaaaaaataattgacgtcggtgagattggtaacgcttctaccggcgacattctgtacgatggtggtgtgaaaattaatgataacttcgacgccatttacaacgccttcgccgaccaacgattatttgcagctggcggcggagcattgaaccaaaaaattcatgcaacaagctattatcaaaagataaaatttggtgatgctaactctgcagggacagttccaatgggggcatgcatagatgctgactgttcagaaggcgcagttcaaatacgtctttcaaagggtaaagcgggagaagctgtattcatcgtaaatagtaatggctcagcatcaaaagctagatccataaaaataacaacaaacggtgaaggcgtagctgatgcatttaaagatggatcgcgagagttagttatcaacaccccaagatgcagaattgagttatggtgtgttgaggtaaaagctaacggtgctgctgtttgggattattcgatttcaagtatgtttggcagcacatattcgccattagaagctacatataatttaacaagttctcctattaatatccgcattggatataatgatgattactccaccgttaaattgttattaagcttcagtgcaaatccaggtggtcaaaccatcaaaaggcaatcatctgaagtcatgcttatgattgacccgactattacttcatcagcgccaaacggaagagtatttgacacagaatatgcagtgttaagaagtggtgaatcatctgaaaatgaaaagatgtattctatttcgtactctattaacgcgcagaaagatttaatatgcacagcttcaacatcttatggaaacgcacgtttggcagttaaagttattgctacacagaccgtaggggtatctcaataatgaaacaaaatttgatagtaggccaatcagtagatgatgggtctggtgattacctccgtaaaggtggtcttaaaattaataacaactttgatgatttatattcagagttaggtgatggttcagttccattcgcagcaggtgcatggaaaacttttaaagctagccctactggaactactttaaatgctaagtttggtcaggcctttgctattaatacccaggcagcaagagttaacgttcagcttccaaagggtacagccaacgactataacaaagttattaaacttcgtgatgtttggtcaacctggcgattaagcccaatcacagttattcctgctcaaggcgatacattaaaaggttcagcttctcctaaaattttcaatactaacttccaagatttggaattggtttattgcgcccctggtcgctgggaatatattgaaaataaaacagtagataagctaactaatggcaacttaagtactgtagcgaaaaaatcaattattgctactgcgggtcagactgactttcttaacatttttgatggcgtagactataacgaagactcacttaacgtatatcgtcgtggtaatattttatactacggtgaaaccagcgttatggataaagctaatgctgactacggttctcctggagcagtagaaggtcaattggtagaattaaacggtaaagacattcgtttaaaagttccatgtgttgaaggcgaagtaataacattcgaaaccttcttagatggaattggtgtttatcggtcttcatacaacaagttggctatccagatacgagattcagcccagactacatcccagacgattcctgggtcaattatagtagataaccttgctactctccgcagaatcactctggatgacatgggtgtacttccaggcgtaggggtaaatcctaactcgcttgaaatttcattgaacggaaaggaattactcgaagctggaactgctggtcttcctttattttattgtgaaggcgcggaaggcggatacgcagaagactgtataaacaatggtggtcaatgggtaaattctaaccaagattatagactggaatttgactcaactggtactaacgtcgaagctattatttttggtgaggcgtttgaagataaagaccttcttaccgttcgttggttcaataataacatcggtactactatggatattgacgatatcatggcagaaaccgaccaagtgtatatgaatgctgagcaattagtaactctaaaaaatcgcattgaatacactaactatgatgaaccaaatcagaaaaatatgcgtcctgtcgctgatgatgttatgattaaagtcaataacattgcagcattctttgacgtaatttatccgattggtactatctacgaaaacgcccataaccatgcaaaccctgctgactatatgggatttggggtgtggaagctttactctcagggtcgtgttactgcgggttggaataatgattcatctgacccttattttgcgcgtaacaataataacctaaacgaaaacgggcaaccatcgttaacagcaggtggaacagttggtgatttgacatttacattaggaaaagaacacattcctgagttaatgtcaagggacaaagttctaatttcagaccctgaacatggcagcgtagttattggcggatgtcaattagacccagacgcacaaggtccaggttattctaaataccgtgaagacactgttgcagtaaacaatggtgtagttccaaatgacatcactaaaattcagccaacaatcaccgtttatcgttggattagggtaggttaaaatgactattgaaactaaaactcgtgaaggagctaaagttaattcaagattaactgctttttcagaatatcgtgtagacccacagaatatcgctgtgggaaataaggctcctatagggagcctaacctttgaacaaatggatttaggtgtttggtatccaaacgcagaagctgctattaatgatttgatgtcattacagtcagcagaaattggaactattatttgtaatgacaccggaatatctccacaaccagcacagcaaattacgcgtgctactttttcaggcgtagtttcgttagaacctaaagaagacggttctgatggtgacccagtaataattcatattctcggattgccgattagaattgcgaatggtgatgacttcgcagctgtagctaccaggtggtatgataaggtaaaagaattagaagctgttggaaaggtggttcaacaggttactcaatcacctgcaactcctcagtatgttgatattattcatctggattatcagaaccataattttgaaacatataaaaaatatggtttaactgttgagtttactgttacttcacctgctaaagcgggttatggacaatgggacgctattggtaacgaaactaaaaccttcggtgcaaacacatttacattccactattttagaaggatgggataatggcccagaataactataatcactacagtgatttggccaaatatacgatatttgacccagcaaatacgcaatggccagttgctacaaaagacgtccaatcagcgttagcgttgattggaagctgggcaagaactgacactggattacctgcagcatctccaaccgtagcaggtataattcgtacagctacacaggccgaagttgaagctggaactgtaggtaatgctgcggttaccccagctacattaaaatccacaattactcggcctgaagcaactaccgcaattcttggcttaacccgatacgcaactaataccgaagccgcagcattaacagcagcaaacagaactattacagctgctgctcttggtcatgtgtttaaaactgtgaaagcccaagaaaacgtagatggaactgttaggttaacgactgcagctcaagctcaagcaggaactgatgaaaccactgcagtaactcctaagcgtgttgtagaaatgattggaaagttcagcgtcagtcctcctagttatacctctgcaacagaaagcaacttgggattagttcgtgtcgcaacccaagctcaggtagcagcaggtgctgttcacgatggatacgcagtaactccaaaaaccttcatggcatcaaaagcgtctgacagtgtatttggtatagtaaaatttgctaaagattcagatgttactacagcaacagctaataacctggcagttactccaaaaagtttgcaagcgttaaaatcaaccaaggataaatatggattaacccgattatcaggttctccaactactgattcttcattggcggctgctgcgactgatgctgtctttaaaactcgtagaataaacggaaaaactcttgataatgacataacaattactaataatgatattaattgttatacaagacaagaatctgacgggcgttacatgccagctggaaccagagtaggtaatgttacttgggttgaaggacaatcttggattagtcgaggtgcaacgtttacatgtaatgcgccatgggaagcttctagtagattagctctaaatgttaatgtaaaatttgagcgtaacaacgacggatatgacaatcgtattttcagatttgttgtaatagttaacggttcccaatggggcggtgaacttactcttaacatcgaaaatactaaaggcggacgaaatggtcattcatggagatttgaagcttacgcatctagcaactttttcttcaataacattcctccaaatgccactgttcaaataagaccaacagaagacagtcgtattatattttatgactgcatgcttacattctgtacaaatagaccgtaaggaataatatgaccaaactagtagattcgcttccgttcgtagacggaattccggaagattttcaacagagaattaactggataaaaaatacagagcctcttaatggggcttcaacccgctatggaaatgatggagaactgaatagagcctctgtgcagattcagaaaaatgtggttcaagtacataacgacttgagtaatgttggaactgctgtagaaaatattcaagtagatgtagaccaaatcaaaaaatcattagaaatcacaggttcttctgacgctattgagcaggtttatatcaataaaaagaatattgaaaagcatgatggacaaattcttaaattagaagaagacaccgaaaaacttcgaactgaccttgattttctcgaagaggatgtaggtgtttatgattctagtaaagatgactattacagaacagttcgtgataatatagtttgggttaaacgtgaaattggtgcgtatcctgggcaagatattaacggacagccgaagcaagactctccgggttctggtatgaaataccgaatcatcaataatgcgtcagctatagtaaaacatgacgagcgtattcaggcgctagaggatgcatacaatgattcagacgtaggttctctgactattgaagtaaatgacctgcgtaaagaagttggtcctaaatccggagctacgtcagcttcaatttatgcaaggcttgtgaataacgctgatgctatttccgcagctaataatgaaatctttgctattaaccaagccattgattttaccaatccagtaaaaattggagctcgtactactagattagaaaacgattatcgtatagttgacgcaacacttaactctgcacaaaccgggttagttcctcgtgtcaataatattgatgctcgtttggggtcttctgataagcctgatactattgaaggaaaaattagttctctttcaactgaccaaggatacatttctgatgttgtaggacgtgatacttcatcagggcttcagggtcaagtagcatggataaaccaacaggttggtattgttcctagcgagcagccgattcctcctggatcagtcttagcaagattgaccaatgttgaagggatgcaaaactctcagcagtctgctatccaggacattcaagtagaacttggcaataacaacgaagggttaaaaggttctgtatttacgttacagactcaaatgaatggtgacttttcgtcagaaaatccagttcaacgggatggtgtatacgctactgtagtagaattgcaagataaattcgttactgcagttactgacgtagaacaaactggggcgtatctccgtaaacagggcgaatggtttaaaaaaccttcatcaataggtgaattcagtaaaaaagatttcactgttgatttaagttctgacgcactggtaaatcctaactcattgatcgcagcttcatttaatgctggcattcgtattgtcgatgatattattgtcgatgacgatggcgtattttgcgtagaaactgatacagttatcgaagcttctgattcagataaaggcgtgaaaattgttattctcgttaataacattgaggtgttttcatacggacttggtgttaaggcggtaacgggcgagcagttgattaaaaccaagaaactcgttgatttttcatctggtgatgcaatcaaaatcgtgtatagagctgcttcagaagaatcgcaggttcttgttaaaattaaatctttggatattactattcatccagctgtataacaaaagggaccttcgggtccctttttcgtataaatataatataaagaggagttcatatgtcatacaacacatacaacccaaaaacgcttaaagacgctatacttcgacgtctaggagcgccggtaattaatgtcgaagtaactgaagaccaaatttatgattgtattcaacgagcattagagttgtatggtgaataccactttaacggattgaataaaggttatcaggttttttatattggaaaagacgaagctgacaacgcaagatttttaaacggtgtgtttgatttgcgcggtcgtaatgtatttgctgtcacccaaattgttagaacaaatgtaggttcattaacttcaatggatggtaatgcgacatatccatggtttaccgactttctaatgggaatggcaggaattaatggcggaatggggtcaagctgtaataaaagttatgggccaaatgcgtttggtgctgaccttggctattttactcaattgatgacttactggtcgatgatgcaagatttgcttgctcctctcccggattattggtataactctgataatgaaatgcttaaagtaatgggcaacttcatgaagggtgacatcattgtctgtgaatgctggaccaaatcatttatgaatacagatgtgatggtaggcaatacggcaggatacggatttgccgggccgcaaactgctgataattggggattaggagatagataccaaaatcctagccttcgtaataatggccaatatgccggagaaggtaacacaaacagagaaggcgcgtataacaaccgctgggtaaaagattatgctacagcattaactaaaaagttgtggggtgaaattctgtttaaacaccaagggctgcaattagccggtggagttactgttgatggccaaacacttaaagtagaggcccaagaagaaatcgagaggctccgagaggaacttgatttacttgacccgggttgtcctattctgttggggtaaaagatgactacatttaattctagtttattcgctcgccttgaggattaccgaggatacaataaaactaatgagacagaaattctcaatccttatgtgaatttttataatcacagaaatagccaaaccctggcagatgttttatcagctgaggctattcaaatgagaggaattgagttttatttccttcctcgtgaatacaacaacccagatttgctttttggagaagacccatcaagtaaattcaccaaggcttggaaatttgcagcttacttagattcctttgacggttattctggtgataatacattctttagtaagtttggtatgatggttaatgatgaagtcaatctgactattaatcccaatttattcaagcatcaaactaataattctgaaccaaaggctggtgacctgatttattttcctatggataattcgttatttgaaattaactgggttcagccgtacgatccattttatcagttaggtcaaaatgttcaacgcaagattactgcgcagaaatacatttattccggtgagcagcttcaaccagagttgcaacgtaatgaaggcattaatattcctgaattttctgagcttgatttagaaccaatcaaaaatatagatgctcttgctgatatttctgacgtgcagtacgcagaaagcaatgaaatcaataaagaagcttctgaatacgttcatccgtattatgttaataatggaagaggacttgagtctcctcctaaagcagattcatttgatgacggatttttcgaataaataaaataaagatgggacctttgggtcccttaggagaaatcatgtttggacatttttataattcgtccttgcgccgatacatcgtgctgatgggagatttattttctcatgtgcaaattgctcgttggcgtgaagacactggactaaaatatattaaagtacctatcacttacgcttcaaaggaaaagttcctttctcaactcggaaaatggactgctatccagtctaccgagaataaagcaaagatagaaactgttttgccaagaatgaatttgcacttggttgatatgcagtacaatgcgatgtataaaacatcacaattaaacagaaccaaatcatataaaaccccttcaaaaattacatctcagtataatcctactccgattaagatgatttttgaattgggaatttatacacgcaaccaagatgatatgtatcaaatcatcgagcaaatcgttccttattttcagccgcattttaacacgactataactgagctttacgacaaagacacaagctttaatcgtgatgttagaattgtattacagtcattttctcaggatgaagctgttgatggagataatatcactcgtcgtagattagaatggtcgctgatgtttgaagtcaatggatggttatatcctcctgttgccgaagttgacggcgaaattagaaccatttatttagatttcttcgctaacagcaaagagctaactccagaaggaaactttgaatcagtagatagcgaagtcactccacgagatgttcaacacgaaaattgggatggttctagtaaacaaacttattctcacgatattcctattccggtaaatccggaggctcctggaccgagaggtgaaaaatgagtgaattacaattagatatggctaaattattagacatcgaaggaattcctggaatagaaggacaagaaattccagtttatgaaaaacttgaattagttgaagttaaatctaatccaaatgaccgtaaacctgacctcgaagatgactattcggtcgttcgcaagaacatgcacttccaacaacaaatgttaatggacgcagctaaaatatttttggaaactgctaagaatgctgactctcctagacacatggaagtatttgcaactcttatgggtcagatgactacaacaaacaaagaaattcttaagcttcataaagaaatgaaagacattacttctgagcaggttggcaccggaaagggagctaatcctcatcaaggaatgaatattcaaaatgcaacagtctttgtagggtctaccgctgatatgatggatgaattcggtgatgcctatgaagcacaagaagctcgagagaaaatagtaaatggaacagactcaaccgtttaacgttctgagtgatgcccatcctttaaatgacgggaaacaggtggttattcgccacccgtctgaaatggaaacgaaaattgaaaatggagttcgtttctttaaatcgcaatgggatgataagtggtatcctgagaaatttgaagactatcttaagctgcatgggatagttaaaattcgcctgcaaggtgaagacccagcgcattttcaaacgtttaaggataaaaataataagcgcactcgttatatgggattgcctaaccttaaacgagcaaatattaaaatgcaactaacccgtgaaatagttgcagaatggaagaaatgccgagacgatattgtgtacttcgcagagacctactgtgcaattactcacattgactatggtactatcaaagtccagctccgtgattaccagagggacatgctggaaatcatggcagccaaacgtatgacttgttgtaacctcagtcgtcagctcggtaaaactactgtagtagcaatctttcttgcgcacttcgtgtgttttaataaggataaagcagtaggtattcttgcgcataaaggctcaatgtctgcggaagttctcgaccgtactaagcaagcaattgaattacttcctgactttcttcagcctggtattgttgaatggaacaaaggctcaatcgaattagataatggctcatctattggggcatacgcttcgagtccggatgctgtccgtggtaactcctttgcgatgatttacattgacgaatgtgcgtttattccgaacttcatcgatgcatggcttgctattcaacctgttatttcatcaggtcgtcgttctaaaattattatcacgactacaccaagtggattaaaccacttctatgatatttggactgcggcagttgaaggtaaatcaggctttacgccttatactgcaatttggaactcggttaaagaacgtctatataacgacgaagatatgtttgatgatgggtggcaatggtcacttcaaactatcagtgcttcttctcttgagcagtttaaacaagagcactgtgcggaatttcatggcacatccggtactctcatttccggtatgaaacttgccaatatggattggattgaagttactcctgactcgcacgggttttataaatttaaagaagcggaagcagaccacaaatatattgcaactcttgactctgctgaaggacgcggccaggattaccatgcactaaatattattgacgtaactacatctgaatgggaacaggttggagtattacattctaatacaatttctcacttaatcctcccggatatagttattaaatatctaatggagtacaacgaagctccgatctatatagaacttaactctacaggtgtttctgtagcgaagagtctttatatggatttagaatatgagaatgtcatttgcgattcaatagttgatttaggaatgaaacagacgaaaaggtcaaaagccgtcggatgttctgcactaaaagaccttatcgaaaaagataaactcattattcaccatcgtgctactgttcaagaatttcgtactttctctgagaaaggagtatcctgggcggcagaagatggatatcatgacgatttaattatgtcactcgtaattttcgcatggttaacaacacagcaaaaatttgctgatttcgtggataaagatgaaatgcgtttagcatctgaagtttttaaacgcgaattagaagatatgaacgacgattacgctcctgtagtgttcgttgacgccgtgaatagcgcagaatatgcgcctcaagaacatggtctttcatttgtataaataataaaaagcaaacaacattgaggatatatcatgcctttagtctctcctggaattgagctcaaagaaacgagcgtacagagcacggtagtacttaacgctacaggtcgtgccgcaattgtcgggaagttccaatggggtcctgcatatcaagttactcaaatcactaatgaagttgaactggttgatatgtttggcggccctaataaccaaactgctgattactttatgtcagcaatgaactttctgcaatatggtaatgatctacgcaccgtccgtgtagttaaccgtgaagctgctaaaaacgcatctccattggttgataatattgaatggactatcactactgctggtagtaactatgaagttggtgataaaattacggttaaatatgcagaccaagtcgtagatgacactggttcagttactgaagtagatagtgacggaaaaattaagtcggtgttcattccgacatcgaagattattgcatatgcaaaaagcattaatcagtacccagatttagggtcttcgtggacaactaccattacttcacagagttctggtgtttcagctgtaattactttaggtaaaattatttctgagtctacagttttactgactgaacatgaaactgctcatgaagaaatgacaaaaaccgaattccagactgctcttgctaagtataaaatgcctggaattgtagctgcgtatcctggcgagctcggaaatcagttagaaattgaaatcgtatcaaaagctgcatttgataaaggtgaacagctgacgatttattcggatggtggaaaacgcgcttcgactgcaaaagctgtatttggatatggtcctcagaccgatacccaatatgctatcattgttcgtagagatggcgcggtagtcgaatccgcagtattatcgacaagccgtcaagacaaagatatctacggaaataacatctttattgatgattatttctccaagggttcttcacgctatatatttgccactgcgcaaggatggcctgaaggattttccggtgttattcgtctgggtggtggggtttcagctaatgaatcagttactgctggcgatttaattcaaggttgggatttatttggtgaccgtgaagcattgcgtgtaaaccttctgattgctggtgcttgcgctggtgaaactgatgaaatcgcaagtacagtgcaaaaacatgtgtcgtctattgcagatgaacgtcaagattgtttagcactcatttcaccaccaaggtcaacgattgtaaatattcctctgacccgtgctgttgataatttaattgattggcgtcaaggtgaaggaagctacgactctgcaaacatgaacatcaatactacgtatgcggcaattgacggcaactataaatatcagtatgataaatataacgacgtaaaccgttgggttccgttagctgctgatattgcaggactgtgtgctcgtactgatgatattgctcagccttggatgtcaccggctggatatcgtcgtggtcagattttaaattgcatcaaattggcaattgaaccgcgtcaggcacatcgtgaccgcatgtaccaagcaggtattaacccagtgactggtcaaggtacaggtgaaggtttcattctgtttggtgataagactgcaaccactgttccaactccgtttgaccgaattaacgttcgccgcttgtttaacatgctgaagaacaacatcggtgattcttctaagtggcagctgtttgaattaaacgataactttacccgtagttctttccgtatggaaaccagccaatacctcgcaggtattaaagctctgggtggtgtatatgacttccgagttgtatgtgataccacgaacaacactccggctgttatcgaccgcaacgagtttgtagcgagcttctatatcaaaccggccagatcgataaattatatcactctgaacttcgttgctacggcaactggagcagattttgatgagttaatcggaccacagtaatatgaaccccaggacattctggggtcatctaatctttagatgataaattatattaccgcaaactttaatagcctctacgatgatgtagtcaatcgagaggctatataaatatctataggaaacaacgatggaattaacagacatcactcgtgcgtttgaatctggtgactttgcgcgtcctaacctgtttgaggtagaaattccttatctgggtcgtaacttcagtttcaaatgcaaagcagcaccgatgccggcaggtatcgtagaaaaagttccagttgggtacatgaaccgtaagattaacgtcgctggtgaccgtacttatgacgactggactgttaccatctataatgatgataaacacgaagtacgtaaggcaattattgcttggcaggctcaggcccacgctcaaggcaatgatatctctggtatgactccagctgattacaaaaaagttgctactgtacgtcaatttagtcgtgatggcaaaactatcacaaatgaacacaccattaccggtctgtggccaactaacgttggtgaagtacagatggattgggattcgaataatgaggtagaaacgtttgaaactacctttgccatcgactggtgggaataatgctatggggcttcggccccgtatcgaagttctgtgagttatttgcttaaatatctgacaaaacttcgatataaatatacttatagataatttcggagactccaatggcctttcatattttggacttattcgctccgtgggaaaaacgcgacgaagctgaatataagcaacaaatcaacaatgacctagagtcaatcactgctccaaaatttgatgatggagctcgtgaagttgaatcaaacgaaaacgaaatccagtataattcattcaaccaaatgatgtttggttccaatgaacctggaatgaaaacaactgctgatttaatcaacacttatcgtagtttaatgaataactacgaagttgacaatgctgttgaagaaatagtttctgacgcagttgtatacgaagacggtcatccagtagtttctcttgatttagattctaccgacttcagtcaagcaattaaagaccgcattcttgaagaatttaatacagttttaacatgccttaatttcgagcgaaaaggagccgaccatttccgccgttggtatgttgactcaagaatattcttccataaaatcgtcaacaccaagaaaatgaaagacggaattcaggaactgagacgtcttgacccgcgcaacttacaattcattcgcgaaatcgttaccgctgatgacgctggtactaaaatcgttaaggggtacaaagagtatttcatttacgatactggcaaagaaagttattacgcagatggtagattatattccgccggaacgaaaattaaaattccacgcgatgctatagtatatgcacattctgggctagttgattgctcaggtcaaaacatcattggttatttacaccgagccgttaaacctgccaaccagttaaagctactagaagatgcgttggtaatttatcgtattactcgtgctcctgaccgtcgtgtgttttacattgacactggtaatatgccttctcgtaaagcggcagcccatatgcaacatattatgaacacgatgaaaaatcgcgttgtatatgatgcatcaaccggtaagattaaaaaccaacagcataatatgtcaatgacagaagactattggttgcagcgtagagatggtaaagcggttactgaagtagatactcttcctggtatgtccggtatgagtgatatggatgatgtccgttactttagaacagcattatacatggcattgcgagttcctctttcacgcatgccggatgcaaataatcaaggcggtgtgcagtttgatgctggtacgtcaatcacacgtgatgaacttgattttgccaaatttattcgtagattacagcataaatttgaagagattatgcttgatccacttcgcactaatctaattcttaaaaaagttttgtctaaagatgagtgggaagacgaaataaataatattaagattgtgttccataaagactcatatttcaccgagttgaaagatgctgaagttatggagcgtagaatcaatatgctcacaatggctgaacagtttatcggcaagtatatttctcataagacagcaatgaaagatttccttcagatgtcagatgaagaaattgaacaagaagccaagcaaattgaattagagtctaaagaggctcgcttccaagaccaagaaaatgaagaggatttctaatggaaaattatatttccgcaattgaatccagagacctcgtagcagccaaaaaagcttttggtgcaattatggctgaacggacatctggtttaattgaagagcgcaaaaaatttatcgcagcgtctgtcatgattgagggtgaagagcccgatgaggacgaagatgaagacgacgaagacgaagataagtctgatgaagacgaagacgaagaggacgagtaatgcttatactgcctgaaaatcatgaattagttatcgacactgtcgaagctcttcttcctgaagcccaggcacgttttgataagttgtccgcagcgctctctaaagatgatataaataaaattgtagagaatcttgttgtttctgagcctgatttagcagttgctttaggttcaatcaatgaagctctccaattgaatgaattcatcgttaaacatgttgattctaaaggtactattacacgtactaaggatcgtaaaacacgtgagcgtaacgcgttccaaacaactggactttctaaagctaaacgccgtcaaatcgcgcgtaaagcagtaaaatcaaaacgtgctaatccatcgactcaaattcgtggattacgtaaacgtaagaaagcacttaaacgccgtcaggctctggggctaagttaatggaaaacctcaatgaacaacttttaattgagcattggggtcaaccgggcgatgtaattgatggtaaacccatgctggaatctattatcgttgaaggcgaaaatgaatctggcttaaaacctggcctgtatatcgaaggtgtttttatgcaggcagaagtagtaaaccgtaataaacgtctttatccaaaacgcattcttgagactgctgtaagtcgttatattaaggagcaggttgctactcgtcaggctctaggagaattaaaccatccacctcgcgcaaatgttgacccgatgcaagccgcaatcattatcgaagatatgtggtggaaaggcaacgatgtttatgggcgtgcaagaatcatcgaaggagaccacggtccaggtgataaattagccgctaacatccgtgctggttggattcctggtgtatcaagccgtgggcttggttctttaaaagactcaggaaaaggatataacatcgtacaagaaggctttcgcctgactgttggtgtagacgcagtttggggtcctagtgctccggatgcatgggtacaaccgaaacaaatttcggaaaatacctcggcacaagttgccaatagtgctgatgatgcttttatggctctcgcagagaagttaaaagcgttataaataattatgtaacttaacacaggacatcaaaaatgcttaaagaacttttaatgaccgaagctaaaactatcgatgcttccgtcgctcttgacagtattttcgaatcagttcagctttctccggaagctaaagctaacttcagcactgtattcgaagcaacagtcaaaaaacacgccgtagctctggcagaatctcatattgaaaagattgctgagaaagcagaagaaaaagttgaagaagaaaaagaaaaagctaaagaagaagctcgcgaagagctgaaagaagctgcttctaaatactttgaccatatcgctgccgaatggatggcggaaaatcagctggcggttgaccgcggtattaaggctgaactgtttgaatccatgtttagcggtatgaaagaactgtttgttgagcacaatgttgtaattcctgaagaatcagtagacgtagtcgctgaaatggaagaagaacttgctgagcaaaaagaagaaactgctcgtttatttgaagaagtttctaagcgtgatgcttatatcaattacgcccaacgcgagtatgctattcaagaagcaacccgtgaattgactgatactcaaaaagagaaagtagtttctctgacagagggtatggattattctgactcgttttcaactaagctgaaagctattgttgaaatggtgcagggttctgtagagcagtctgtaacggaatctgccgatataaatactatcgacaaagaagcagacggtttaaacttcacaactgaagcagtcgaagaaactcctgcgactaaaaccccatccgttatggatgcttatgtagcccaagcggctcgtctttcttaatttaaaaggttatacaacacatgaaaaagaataaacttatcgaaaaatggcagccgctgcttgagaacgaagctctgccggaaattgttggcgctagcaaaaaagctctgatcgctaagatttttgaaaaccaggaagctgatattaatcaggctccggaataccgcgatgaaaaaatcgctgaagcatttggttctttcctgtctgaagcagaaattggcggtgaccatggttatgatgcacagaacatcgcagctggtcagacctctggtgctgtaacccagattggaccggcagttatgggtatggttcgtcgtgctatccctaacctgattgctttcgatatctgtggtgtacagccgatgtctaacccaaccggtcaggtattcgctctccgcgctgtttacggtaaagaccctctggctgctggtgctaaagaagctttccatccgatgtacgctccggatgcaatgttctctggtcagggtgcaactgagaagtttgaagcagttaaagctggtgatgctctgactgttggtgatatcgttgttcacgatttcgcacagactggtcgtgctcatctgcaggttgttgaagatttcactgtagacgctggtgctaccgatgctgctaaactggacgctgcagttactgctgctctggaagctggtaaagttgtagaaatcgccgaaggtatggctacttccgttgctgaactgcaagaagcatttaacggttctaaagataacccgtggaatgaaatgggcttccgtatcgataaacaaactatcgaagcgaaatctcgtcagctgaaagcgcagtattccatcgaactggctcaggacctccgtgctgttcatggcatggacgctgatgctgaactgagttcaatcctggctaccgaaattatgctggaaatcaaccgtgaagttgttgattggattaactactccgctcaggttggtaaatctggtatgacccagactgttggttctaaagccggtgtattcgacttccaagacccgattgatatccgcggtgctcgttgggcaggtgaaagctttaaagctctgctgttccagattgacaaagaatccgctgaaatcgctcgtcagaccggtcgcggtgaaggtaacttcattatcgcttcccgtaacgtagttaacgtactggcagctgttgataccaacgtatctccggcagctcagggtctgggtcgtggttataataccgacaccactaaagcagtatttgctggtgttctgggtggtcgctaccgtgtatacatcgaccagtatgctcgtcaggattacttcaccatcggttataaaggtgctaacgaaatggatgctggtatctactatgctccgtatgttgcactgaccccgctgcgtggttccgatccgaagaacttccaaccggtcatggggttcaaaacccgttacggtatcggtattaacccgttcgccgattctgctgctcaacagccgaaaggtcgtattacctctggtatgccttctatcgtcaactctgttggtaagaatgcttacttccgtcgtgtatgggttaaaggtatctaataccaataagggagccttcgggctccctttagttgttttaatggatataaataaacttataaatccacagaggaaagcgcaatggctaaaatcaacgaacttctgcgcgagtcaactacaacgagtagcaacttaattggtcgccctaatctcgttgcattaacgcgcgcaaccactaaattaatctataccgatcttgttgctatacagcgtactaaacagcctgtagcagcactgtatggtattaaatatcttaaccctaatggtgacctgacgtttaatacgggtgcaacttatgcaggtcaaatcggggcgacggaacgtgagtcaattgaagaactcactatgtcaaataaagactcattcaataaagacgatatgttcaaatatcagaatgtggtctttaaagtacttaaagatgccccgtttaccgatacagcagaaaccgacgaatttggaattgtatctgaagcagtagcagctaataatattcgtatgctgtcagatgctgcagtcactgaaaaatttgaaggacccgattcagacccaatcaccgaagccagttttaaaattgataaatggcagacccaggttaaatcacgtaagcttaaaacggatttaacggtagaattagctcaagacttagaagctaacgggttcgatgctccagagcttattgatgatttacttgctactgaaatggcagaagacattaataaagacatcctgcaatcattgattacggtttcttctcggtttaaagtagctggtgtatccgataaaggtgtattagatttaactaagcaggattctgctccggaacaaggtcgtactctgtatcgtttcatttgtgaaatgaattcagcagttcaacgtaatacttcttattctggtacttatgcagtagcatctactcgttgtgctgcggtgctggcagcttccggttggttaatgcagaagaatgatggcactattccggacaacgcgtacggtatgctgaataacggcttacctctttattgtgatactaccagcccagttgattacgttattgttggtgttaaagcagaatttggtgggaaggaaactgtaggttcattattctatgcgccatataccgaaggcttggatttagacgaccctgagcatgttggtgcatttaaagttattgttgacccagctagcttgcagccttctgttgctttactggtacgatatgcgctgtcagttaacccatatactgtaggattggacgaggacgaagctcgtgtgattaatgctgcggatatggataagatggcaggaagaagtaagatgtctgttatgcttggtgttaagttacctaagcttattacggactaatttatgggagccttcgggctccctttttgctataaactaaatatgtcaaacctcggggagtattcctcctcgagggatttaaacactttcttatcatatagattaacacattctatcccgtgcctgcgagctatatcaacagctactctcgtccctccagatacactcccgcatcttttctcaggcgcccaatataataccttatctacaggctcagtgcattctaggcccaatacctgcatagaattccgtgcgaataaagtctgcactatcttcgagcattcatcccagtacgacgtaacttctctcgccttaatgatgcttttgattttggcttcgtttgataattcagaccatacaacaacacctgtaccaggaacatggccacaaaagccagaataaggaataatcctacaagaatttgacctatcgtatttcgccaaccacgcttcatctgaacccggagctccacctgaatatgaaaaatgcccctcttccgagaggcgttgacctattgtagtcattagactcagaactctgcgtggcgcttctcgtgaaccaataagcgccaatctcattattctaaaacctcatgccatttactacgaatagtgttttgaattaaagtagtgatttctttcttaacaacagaagggttatcagcgaataacatatcatgaccttcacgcgctgcttcgttaatgatatctttcatagtcagacccataacacgaccgaaatctttagcagttacagtaccaatatgagacagaacgttacttacccggttccaggttacatattcggaaaagatttccagaacacgcttatcattctcggtgagttcaaccttcgctttaataggcttatcggatttagccttctcactgaacttagagttcttacacttaatagcaacacgagtaccattattgaagaacttaggatgaactggcttaagaacatagccttcagctacgccagtttcagaagaagcctgcggaccgaacacatgtttatttgcatgttcaaggtcagtcgtgtcaacaagctcattatagtaattgacaatagatttaaagtcatttacgtactgagatagctcagcgaatgaaccacgaccaagcagtggagctaatttaagaccaaggccagtagcaaacgattctactacgtagtcgtcccaataaactttttcattaccggagtccgacaggatatcaaacacgtagaaatctttctcaccataatctacgcccttctgaataccaccgccagcaaattcaccaaagatttgaacagatactaaatccatggcgttcagcatattctgcattttagcgaaagaattcttgtacttcttcatgataatctcatgaccaaagaagctttcaccttctaaaataggaccagtacgcttagccggaacaatttcggtaggggtaataatcacactgaagttagtgccatgaatcttctcacgagccacccactcaacggtatgcatatcaaaaccagcaccgcgaatcttctcgatgaacttaccgttgtaatgattctcgagactagaatatttctcaaacattataatttccttagaatgtgattttcataaagtcagtatcaccgttacgctgggaactggtataatttgtaacaaatccttcatcatgcaaataattaagaacacttgtaatatgtttcttaactaaactgctaggatacataattaactcacgttgacccgctaaagcggttttctcaatctgggttaatacttcttcttttgctgcactcaattcttctgtagcaatattgatggctgtattagccattctatcggcaaagttcataatttttctctcaataaataatataaaaccaggagtctatcttggtcaaaatggtatcagaggatttcccctgagcccattataccacatcgatttttaaagcaattaataaccgctcggcacgaagcgatacatgatatatccgcttttagttagcatgatttcaaattgacttttgcttccaacctcaagtactaatggaatatctttatccatcagcatccaatcaatttttccataccgttcattaatcaaatccgttattttacgtgcaccacttttatagtagtaagaactctgaacagccatcattttactaacaaatttagatgcaaacaaccagacatttaccccattagcagctggcgtaaatttcttagaaagcatttcttcaaatcgttctactacaattgggtctactttaggcattttcataataacctcatgtgtttaacaagtttcttatgacgagattttataccaacgtttgttaagcgtttccgataaacgactttttctttttgcttaaacagttcgtgtgctttctcaactgagacccataatttagcagcttctgctggagtgatatctaacgcccttgcaatttcttgaaaatcttttccgctttcatgcatcaagtgagcttgtaatgctttcataataacctcatctatgtgacgaggacataataaaccaatccgtgaatagcaaaaaagggagcccgaaggctcccgaatattacggatagataatacctgcttccagcgcagtacgatgaacgatgtatccatttctagattcttgtacatcgacttctggataatcatctagcattttagctagagtataccgatgcaggtaataatcactgtcagggtcgtcgagtttccaatctttgccctcaacagtcattcgctggatttcatccattacccaccatccacaccagatataggctgttccacggaacggtagaggatgaatatatggaagttctccgtctggctcaggggctactcttttagtaaaaacaacagcaatgcctttagttgcagttccattattatagtctggagcagaaaccgttacttcacaattaagtgtgtagctagtttccgccgattcagttaaggtaattgttttacctgtttgaccggaaataacagcagaaccacgtttccaaacataagcaatgcttgctcctgctggcgccccagcaacgttagctgtaactacttgggattggccaatttctttagaaacagaagttgggctcaaagttaaagtaatcgcaggcatggttttgttcttaactgtcagagtagtttctgctgaagctgtttcaggggagccactagctggagtaacagtagcaactactttaatagtcttactgcctgcaggacccgcagcaacataattcatggctgcggtaacagaagattgttttacgccgtttacggtccacacaaatgattctgtgcctgcagccgcggctccagaagttgttgcagtaaaattggttgttgctccaatgactgccgaagcagccaaaggagcaatagatacgctataagccataggtgttccttattttaaagttacaaatgaagaattacgtgtttcacgaatcataacagacccgtttcttttgatgtaatagattaaactaaacagtgtctggtgtgctgatgggtgttcaaacgacgttggccgagatttccaatctgggttatctttaatccattggtaaatccaccatggaagggtgatatatcctgggttcttacctaacaactgcatgtttggactaaagttttcaggaagctcaatgatttcgtctgttttaataattttaactactttgtccattgctttggaaaattcttcagggtccgtgatactaaccggaatattggtaacttgtccttcatcatcgatatggataatgctatctccaataggagcttcagcataaaatcctttatcattgatagaaggagtttttacttcaaacccagggtcatttactttaggtgtttctttataaaaatctgggtcaacatcatgaattttaacacttgcacttactggagcatcaaacagtagttttgcttcatcagacgcttcatcattgaaaagtgcttttccttcaatttcatcatctgcttggattaaatcagcaattgataaaccatcgttgtcttctggcataggctcatcggccaatttagccagttctttttccaaatcagcaaccatattgtcaaatgagcgggtcttcttcagtttaataccgaaggttttggcatattcgtcgagcttgtctttagcttcttttttatcgagtgcctgaatttctttaatatagtctttatctagcattgggtgtgcctcatgtaatgtataaatatgattgtatttataaactgaggatagtacagtgcacgacatccaagtcaaatttaaagattttagtcatgttcatattgagtgtgatgactcaattttctatgaactcagagactattttagcttcgaagccgatggatacagattcaacccgaaatatcgctatggacattgggatggacgaattcgtctgctagattataatcgtctcttaccgtttggtcttgttggccaaatcagaaaattcgctgaccaattcggatataaggtttatttcgatccagctatattcgagcaagaaactctttcgcgggaggattttgacaattggttatcgacgaaagaaatttattcaggattaactaagattgaacctcactggtatcagaaagatgctgtatatgaaggtctagttaatcggcgtagaattcttaatcttccaacatctgctggtaagtctcttatccaggcattacttgctcgatattatgtagaaaattacgaaggcaaggttcttatcatcgttcctaccacagcgttagttgaccagatgattgatgatttttgtgattatcgtttatttcctcgcaatgctatgctgggtattcgaggtggtactgctcgtgattcgaatgcattagtttatgtatctacctggcagaccgctgttaagcagcctaaagaatggttttctcaattcggcatgatgatgaatgatgaatgccatcttgcaacgggtaagtcaatttcaacaatcattgcgggtctcaccaattgcatgtttaagtacggactgtccggttctcttaaagacggcaaagctaatatcatgcaatatgttggcatgtttggtgaaatcttccgtccagtatcaacttccaaattaatggaagacggacaagtaactgagcttaaaattaatacaatcttcttaagatacccagatgcagccgcaaacgctttaaaaggcaaaacgtatcaagaagaaattaaattcatcaccaatgttaagaaaagaaatcgttggattgctaatcttgctactaaacttgcagcgcgtgacgaaaatgcctttgtgatgtttaaacacgtggctcatggtaaagagctattcgagatgattaaagctgctggtcatgagcatgtctattatgtgtcaggcgaagttaataccgaaacacgtaatgctttaaaggctatggcagaaaacggaaagggaattattatcgtcgcaagttacggtgtattttctaccggtatttctgttaaaaacctgcatcatgtaattttagcccatccagttaaatcgaagattatcgtactccaaactattggtcgtgttcttcgtaagcataaagataaatctttggctacagtgtgggatatttgcgacgacttgggtgtaaagccgaagtcagccaatgctaaaaagaaatacacacatttaaactattgcttaaaacatgcattagagcgtattcaacgatatgctgatgaaaaatttaactacgtaatgaaaacggtaaatctatgattaaatttgaagatatttacgaagccacaattcgtgaggctactatcgataacttcatgagtaaaattaattcttgccagaccttagatggtctggaagaactcgagaagtattacgataagcgctctaaagaaactactcttgctgattctgatgacatcattgtgcgggatgctttggcggggcgtagacaggctcttgaagccgattctgaagatgaagatgacgaagacttctaatacaaaaaagccccaaccgaaaggaaggggcaaagccaattggctacatcaacactagactaaattaaaagctgcgtttcttgtaattgctcttctgtgtcttcagtgacaggcaattcaatcgcataattatagcaagctccgggatgaaccgggcctttgtctgtgtggacaaccaatgcttcatcgattggtcctttacagacgacacataccgtattcgacatgattgtctccttagtttacaagtttatttattacgcgccagcttcaaactgacgaaggtcaataatgtgcttaatgctaaaacctcgtgacttgatagcatccattgcatcactacagaactccaaaagaattccccaatattgcaatttagtatctacacccaagatttctttatcagcgcttaaaacagttttcatttctgatttttcgtatacatccatgcatacttcaccaccaacctcgccacggccagtgtaataatccaatcgtgctttaagattttgctttttgagggcatctaatcttaacatctcttttcgacaagtcgagtgcttacgcacccatttaccatacagaacggggttattagccgcttcatactgtagtttagtctggtcgataatcaaatcattatccaattcatcctgtaattcttctaatctcattctatctccactctactgtttcttgggaaggactagtcccattatactctactgctagagttagcattactacgcatctgtatgcgtatacgttctagcgtatcagggtcgtctactatagaaaactgcacggtgacaattatagcgttatcgtcatataacggaagcacatcaaccgatagacgattaatcctaggctcataattacgcacggcagagactatattacgctttatcgtatcaccagttaatggagtcatgttttcaaataattcgtttgtgatatcacaaccaaactctgggtcaaatggccgagacccctttcttgtggttattattccaagaaggctatttttaactgatcgagctcctactgtttttgacacatcagtatcccaagcaagtcgcatctctgggtcaaggtcggaatatagtttatcgatattgctcatgacataatcttaaagaattctttaagccccttaattacatgaatgtgagaaattccgcattcacaagtaatgggaactgccaattgaacctgtggcttcaatagcatatttttgatgttaactacatcttcggttgtaatagcagaatataaatcatcgatttctgcatcgtttaaatcattaaagtaaatctgctcatttccaaccacgatataatctatgcattttgatatcatcattggaatgtcggaatcgtcaaaaagattaggatacttaaactttatcttgaatccctttaagtcataccagaggtcttctggaggatcgatttgcgcatgtgtataatttaatggcacaggaattttacgcccacaggtgcaattccaggtcacctcatgattaacctcgcctatactgtgagcccaaagtataactataagtaattccgattcttgtttgtttaacccagtagcattggtgcattctctgagcaatgctttaacgcattcatcgattgtaccgtttttcttcgctgcaattaaattagcgtattcttctagtgtaaaagctcggcactggatattcttgccatttattcttgtttcaaatttatatgtgatgttcatatccactcctcttattcaattatttataaatagtataaagaggattaccttatggccaacatagttagatgcgaattaccagatggtgtccaacgttttaagccatttaccgtagaagattatagagaccttttattggttagaaacgacatgaacaccaagtctgaagaagaccaaaaacagcttatagcagaattaatggatgattattttcatgaccatcctgtcgagtatcgtccttatatatttcttaaagtatttttgtcaagtattggtaaaactaaaataccagtcagaatgaagtgcccaaaatgcggaaaatacaagcagtatctttttaatcttaatcagcctccgttgacaaatccgaaagtagaggttgcaggattaacgcttaagttcaaaaaacctatagaaataattgatgatacaggtaaaatgattttagacaacattatatctgtgaaggattcatctggggaataccagtggaatgaattaagcgatagtaataaattgacagttatcgatgctatagatgttgaaaccttggaaaagattttatcgcagatgaagccgtttaactttgagctaaagacgtcatgctgtgataccacgacagtattaaaatatgataacattgttgatatctttaagctattgctacatcctgacgagattttcacattttaccaaattaaccatagattggtttctcaaggtaaatatgacttgaactctataatgaagatgctgcctattgagcgtggcataaccttatcgcttattgaaaaggaccttaaatcatgacaacacaaagattaggatatcctaatataagcataaaattatattctggatatgatgcatggctagctaatagatttgttgaattagctgctacatttattacattaacaatgagagattcattacgcgggactaatgaaggattgcttcaattttatgacgcaaaaaacatgcacacgcgtatgaatggcgatgaactagttcaaatatctgttgcaaacagtaacacatcgagaacacaaacccgaatttatgggattaaacactttacagttggtgttgatgataaaggtgatagcattattactcttcagcttggaacgctgcatgacataatgaatctcaagttcagcagagcgttttttagttctgcatatgaaactataaaagaaatgataggtgcaatgtatgttgaccaaccactgattgctcctcctatcaacggaattaacgcttacgtcccacgggttccctggactagtaccctcaaagattacttacgatatgttagaaatgtaggcatttctacagacaacgaccaatttatttttgcgtgggaagatatcaccggaattaacatgatggattatgaatcaatgatatcccaggatccaaatgtattcatgttcggggctcctcaaacaataggtcagtttgctgcgggattaaaatatccattagcatgggattttgaatggcttgttaaatcaaatagatataatagaaatcccatgaaaaatgcaacattttatgcacactcatttgttgacaaagatgttacccgaattattaatggagaaggccaaaacagcgtattcattaataggtcaggaggatattctgacatgatttttaggaatggctatgaagaagcactacgcatttctacgatggctcaatacgacgggtatgctcaaactaaatgttacggtaattttgaactaactcctggtatgaaaatcaattttgttgatttaaaggaccagttcagaactgacttttatatagatgaagttatccatgaaatatcaaataacacatctataactaacttatatatgttcacaaacggctctgcccttgaacctgtagatttgattaaggtgaaaaatgaacttaaacgtgattcttcctattaagaaaatagtaataaacgaaaagacgatatcaattccaaaacttggattaaagcaccataatctgatgaaagatgttaagggtccagatgaaaacatgaatcttcttttggattcaatttgtccaggattaacagcagccgaatctgatattgttgtattacatttattagcatttaacaacagaataaaagaaacggttgttaaagatgattttacctacgatttgaataaggtttacatttgccagcgattaactcaaaggttagatggtaaagaattcaaattcagagctcctcctcgttattccaaacttggttcagtagattcaattttaagcgaatttcttgaatcagtagatggaaaaccaatggatataaactttatgaagcttccagcttttgtaacaaagtgggctgatgacttagtaaacactatagccattgatggacctgaaggaccaatcaaaggcatgcttaacgtaatggaaatatttgaatgactaagaaatcagaaatgaattcaatgcgtagaagagttattgctgactcggctccacagaaaaaggctgagtctcaagctgatgctcaaattaatacgctagaagatattggtcgtcgtttagacgaccaacaagcatctactgatttaatttcggatgtaatagaaactaaatcaaacgaaattatcaaatcagtagaagatgtttcagctggtgtcgaattgaccgcagaagcttctgagcgcacaactgatgcagtatcaaaacttaatgatactgcatcattgattaatgataagctcacgaagcttgctgatttgttatctaaaaagcatgatgttcaacaagatgtccaaaaaactggtactggaacatcattagaaacgataacagaacaagtcccggatgctcctactcagcagccattggaggaattacttgaaaggcttattcctcctcaggatgacagaagacctgatgcagatttctttcctaacacagaagagcaagaggaaaaagctgagcctaaaaaggaaactgaagataagaataaaaagtttcttgacctaaaatttggagaattaattaaaatcgttaaatctggttttggaaaaactatttcattaacagataaaattagcagtatgctgtttagttatactgttagcgctttggcccaaatggcgaaaactgccgccatggttttgggtgtgataatgcttatagatttaattaaagttcattttaattattggactaaactgttcgaaaagaactttgttgaatttaacaagcaagccaaagaatggggtccgctattaactgcaataagcgagatgtcgaatgaaatagtaaaatcgttcgtcaaaggagattggggtggattagcaaaagccattggctcgggtttggttgatgtaattgataagctcggagaaaccattatgctcggaatgagtaagcttcttgctggaatgttacgcgcattaggattcaatgattcggccgataacattgaaggcgctgctttagacagatttcaaactgttactggggcagagcttgatgaagaagatgctaaaatgagagcaaaatatgttgatcgtcaagaaagagaatatgacgaacaacctgaatggaaaagaaaactttctgctaagttccaaaaattcaccggtcagattgatgacgatgaatataacaaactgctgagcggagagaaaaagcagtcagcgtatgcagacttgccagaagatgaacgcctcaaaatcatcacagctcgtaataatgctgaggcagaactcaagcgtacaaaagcatatgttgaaaaaactgacgcatctgattccactcgattagactctgctaaggatgcagtacaaagcacaaccaccagatataaagaattagagaaattatctccagaagttgcaaaagatttaaaggttgaattagaccaattgcaaaagcttcttgattctaaaatatcagaacctgctccaactgccgaagctatacctgcagcagaacaacctgaggttaaacagtctgcttctattaaagccgccgcggatagtcgtgaagctgctcgtacacgtgaatctaatacacagtcacaacctatccaggttaatactgctgtaaataagaatagcacacatgtttatagaatgcctccacagacttcaacagctgctcctggaatgcaaggcgctatgaaaacctcttaaggaaaaacaatgatttttgaagaactggccgatggccttgaaaacatcaaaaaatcaggaactcgaatttcccaaggtaaatctaaactgacgaatgcgccaaccactaaggtggcgcagttcccagctgaacgttcagctgggaatgattccgcccaagatatgagagtacatgacttatatcgcaatgggttattattcacagcatatgattttaaaggaagaactactcctgatttgcgttcatttagacgagatgtaatgttatcgtctgtattcgattcaccaatgtcagcactggctaattcatcaagttctactacaagtactgcgccggtagctaatattctattaccacggtctaagtcagacgttgattcggttagccataaatttaatgatgttggtgattctcttgttacgcgcggcggcggtactgctactggtgtattaagcaacgtcgcttctacttctgtgtttgggtcgatagagtctttaacacaaggattaatggctgataatggtgaacagatttataacaccgctcgtagtatgtatgccggacctgataatagaacgaaagtgtttacttgggatttaactcctaggtctgcagatgacctcatacaaattattcgcatctatgaaatttttaattattattcttacggtgtgacggggaattcatcatatgcaaaagaagttaaagctgctattgatgaatggtataaaggaacacttaaatcggcagcaccggatggagctaaagtagaaaacacagtatttgagcaaataacatcgtttttaagcaatgttattgtagtttctaacccaacgatttggactgttcgcaattttggatattctacatcaatggatggtagagaggatatatttggtccatgccaaattcagagcatccgctttgataaaacaccgaacggccattttaatgggttagcaattgctcctaaccttccaagcacatttacgcttgaaattactatgcgtgaaatacttactcttaatagaggaaacgtttatatcggaggtattgaataatgtttactctcgaagaatttaagagtcaagctgctgatatcgatttccagagaactaacatgttctctgttgtattcgctactgtaccctctagtaaaacccaggctcttctaaacgactttggtggagagctgtataataatatgggtttagatggaaattggcttggattgacaccaggtgaattcaatcagggtataacaactatagtgacacaaggaactcgacaagttgttcgtaaatcaggtgtgaatacatttatgattggcgcaatgactcaacgcgtggtgcagtcattattaggagaatttacggtaggtacttatctgctcgatttctttaatatggcatttccaacagcaggattgatggtttattctgctaaaataccagagaacagattatcatatgaaatggataagttccataacgctcctaatataaaaatcacaggaagagatatggaaccgttggttctttcgtttaggatggacccagaagcaagcaactatagagcaatgcaagattgggtaaatgcagttgaagacccggtgactggtctgcgaggattgccacaagacgtagaatgtgatatccaagttaaccttcatgctagaaatggattaccacatactgtatgcttgttctcaggggctatgcctgtagcgtgtggagctcccgaatttacatatgatggagaaaacacgatagcagtgtttgatgtcacgtttgcttaccgtagcatgcaaacaggttcggttggaaaacaagctgctatggattggttggaagataaggctattcagaaaattgagacgattaatccaaatcagggcttgagtgcgtctgcttcaagattgtctcgtttaggcggggctggtggtggaatttctaatatcactactacgacaagtagaataatttaggggccgtaaggcccctttgttttatgcaatgcagccaataaaccctggctcagtgcgaagaagtttcatttcgtctgtggtccaaactactttaacaggaatgataccttctgcctttccattaagaacggcttctacaaacgatggctctgttggcttacggaagatatcttgaataagaaccgtcggagtaccttcgttaaacccttcaagcatgataagcacttcttcattaaacttctctgcgtctttaacatcagcagaccattcaataccgttaaagcggaatacatgtttcatatcaatttcctcattggtttgtgtaagtctatagtatcacgtccttgtgataagtaaacaactttatgcaaatttttctgggataccatccaggttgatagcaccagccagtagctccatggtacgtgtgtagctaaccttatctgtagaacggtctggagagaaataaatctcgtttaaaaagcttttgaacttgctttcttcaagaggttccactttgccttgttccatcaagatgtcaccatcatagagatgaacagattcatcgatttgctctggcggaactaccgtcatttctaccatgaatgtcttgttattcgctacaccaactccatttctaaaaggagttccccacactttgttgactttcattgccaacccgcgaggaagaataacttcagcctcatggctgaagtttgacaagacacctgggataactaccttaattttatcagcgccataaataatgaacccaaacttaaactcattgctactagcaacttcttcgcctctatcaactctttccaagttgtctgttccaataacagaagatactgcatcaacagttgtttcttggttttctaaatcagaactaggagcatctggcattaatgaatcactagcatttgaataagcaccaaatataactggacttaacgaagtagaaacaaagttctggaaatagaacattttagactcaatgttatctttaaactcttcgtattttccgcgctgaccacgatacaaaagagtgcccggttcaagacgcaaacctttttcaaaggcagaatcgagcggacgaattttcttgtcaataattggatcgcttaagctttccataccaataagataattattaacagatgaataaccagaaccgcagtaatggcgtattgcatctctttcttcttcgcttaaacgatattgcatttcacggttatatttaattgctttggatatagaatcgccaacaactggcacataagcagatatcatataattgacaagattttggtattgacgtaaagctccgaaatcgtcagctggaggcatatcaaatccacgagtagctacttcaacgattttacgcattgtgtcaatagatgcaggatttttagcttgagcaataacgtcagcaacgtctgaaactcgttgttcaatgagtttcattttgtctgaatctgaaggaatgaaaaccttccagtcgtcatgcattctcgacatttggcctacaaataatctcttaactgcatcaccaaaactacttccatatccgccacgaacacgatagtgcttgatatcatcaacatacaaaggaattgatttttctgacccggatttaatatccttttggaggtctaccgtatcgccttctgcgttcagtactggagtgttagtagttaattcgtaccagcgttcacgtttattttctggccaatcttcatcaacatatgaaacaaatttgccgtactgtgctcggattaaatcttttcgagacactttcattttactcattacagcgagttcagatttcttgtcttctttttcgccaatggaattagccaatgcttcggctttggtaacgttttcgccggtttctttagacacataaacttcgcctactttggaatctactttggtgtaaagttcttctgaaatttcaggaattccttcaatctcttcaagtttcttacctttacgaaccataatagaataagcatacttacctttgtagtaagccatatctttcattagattgaaacgaccgccggtgcgagtagtaatcaaccgagcaagaatgcgttgaatggctttatcctgtccttgcattttcttcggattaaagcggaacattaccgcatcagctttaatttgcttaactactttgttgacggtctcaaaaatggtattgatagcaccaatcgggtcttggcctaaaccacctttaagcgcaccgatgttacctttttcggatacagagaaaacatagacctggatgaatttatcacccatcttgatgttcttaactgcatcaccttgacctgacccttgtactaaccgaatcattaaattgttattacccggcaccttaatcaaaaagacctgtggtaccttaagttttggcttaacgttctcgacaggatagattttactattctcttcatcgaaaacttcatttaaaagttccatgacatatcctcgtttgtttattctatttatacgaaaaaaggcccgaaggccttaattaattattgttactgtacgccaaacttgtagtccatttacagactcatactcttcaatgttttctttgaagtttcttaatgtgttaatgttattaaactcaagaacttctgtgtgaacagaaataccaccacgtccgtcaagagatttagcaatcacttcgtataaaactttcattttattcctgttgcctcagtaaagttaacaccaaacgcggcttcgaatgtattagccacttctttatcatatctacgctgtttaatgataggtaagaataaccctactgtaccatcatcacggccttcagcagttacccaaccattgcattcaagttcccagatagttcctggaagagaatctctgtttttccatagatgagtgcgatcaagttcatgtaattcttcgggcttatctttaagaccagagcctgcattaactcgaatacgaccacattctgatacgaacattaacccacccattttaccgggttgtttcctatgctcatatgaaccaacacacttcaaatcgacagtgataacctctttaaatttaacgaggttcttagaacgcttatcttcccaataagcaccgatattcttaaggataataccttcgagaccttggtctacgtatgttttgtagatggctctagcttcatggatgttatgtacgacgtggttttcaattagaataaccttgtcatagcctttgctcatcatttccaacgcacggaaacgtacatcataagcaaatccaggaactttaccttcagaatatactacatcaagcggaacataatcccaaacttggaatctcataccttccgcttcttcagcagagattgttcctttaatggccttattagccaatccgtttgattccgtgcgagccgtctgttggaattccttagctttacttaactcaggaagctcaggctctttaaacatgtcaaacaggtcgtttgtttcttctttcacttcgacatgatacaccaactcgccatcaatcatcacaccattaggatggcgttctcgggcttctttggtcatctcgataagttgacgcttaagtttatctagacccaggtattcattaccggaacgagtaagaagagttacatcatctaaatcatctccgcggatttcagcgaagcaccgggctccatcggctttaagctgagcaaatgcagggaacttaatatatgatagcgctttctcagaataagctgatgctaacatctgtggcatctcaggaattaacttcttccataccttattagcaatagaacctgaagcgccgcaacgcatatccttaagaagtacacggactagtacactagcatcaccctcgttcatcttagagagcaaatctactagcccctggattgccatattaccagtaagtactcgtgctgccagaatgtcttggaggtaatctagaccatctgaaaacgtctttgaaggaacatttggatatttaacgggagtatattctggaactttcttaataaagaatttaaaccgcccggaatacgccagcagataagctcgctttaaatcagcgttatctttattgtcaatgagaatttgggttttggctttagaacccttagcatcttcaattgctttgatgatatcaaaaatcattattcacctaattcttttgaaagttcgcttacgctacgatgataagttaatccatcgatataaacaaacccgttattgatgcattcattccaaatcgggcacgactttgcttcacgccaaattggattccaacgataaaactgattaacatgaccataatcacatgataaccagcgtttacccaccttagtatgaactacaaacatattttcctcctagggtatggctattataccatacccagattgttagcaattaatttggttgttatcacatgtaatacgaccgttattccaccagtcgtttccaggaggaacgtgcgaaccaggtctaaacggaatgataggttgtttccaccaatctcctggaacttgtcgtggaggccaattaaaaggatgttgctctttacgaatttggtctttgatagcttcttcccacaatccagaaagagacttctgcggtttcttaacggatttcagagattccaggcaagttacaatttgatgccaatcttcaaccataattccaggggcagtcactgaaccttctcgctcaccacgaggcatataaaacacacgagtttcagtgtcttcaaatactttgctggccgcagcaatatgtttaggcaaatcatctacataacagacgatgcgatcaccgtattttactttagccttttccagtaaagcatctttagattcatcataatcgcagaccatgatttctgtaaatgcatcagggaacaaagcattcagattgaaacgacgattaaggttagcatctactgaattaccaagagccgtgatagcgacaaaatcgtatttttctttgagcttattaactgtagctaaagcatcagcatacggagcaagataacgaataaaatcgctgttgttgtacttcagaagcagcttaacagctagttcttcttcacaatcaaacagctcagcgggtttaatgaatttttcagtagtcatcatatcaaggatatgctctaccggaaggttatatttttgggcaaagtaaggcagaccactttgccacttaacgatgattccatcaacatcggttgcgattacaggttttgacattcggggaaattcctcaatgcttgtttaaatttggcaacgctatttgcggcaccggtgaaattgaaccagattaaccctggagtgtccgagggttctatatcaattaattctatattataatactcagcagtctttagcatttccctggtgatacgtcgggcaaccatatgaccgaaatgaggattaatagacatcgtcgttagcagcccttaactgagtaattggataaagctcagattccgcatgaattgaacgattgccatcaacccaattaacttcataccacggttcaactgagtaggctttaatggatggagccgtatcacatacaactccaggaattccatttgctaatcttactgtactaaagatatgatatttcatgcatcaagtctcactgcccattcgggcaattcaaagaaatccggagcatcaatttcatactcaactgtatgttgtttaacatcagctgacatgatatcaaccattgggtggtttttcaaactgcaagaaaaaataccagctttagatttaggcacggatacaatcatgttgatttcctcaaaatttagttatgaatttttctttcggcattttagcatttgagccatcattgtcagaatacccaattggcatagttgcattaatgaattcaattttagcatttataacattaatgctcagagaatctacgccatcaaccatacgaaattcaggagggcaatacttatcaatgtatgctttcacgccatttttattagcaggtgtaccatcgcgagtatcgctgataatggtttcaacctttttctttcgtgaatcatagaaagctgatacaatcatttcaatttcctcttaaaacggacgaatattaacgtgaactacagggacagcaaaaggttgcatgattacaacttttgtgtctttagttgcattcaggcgttgtacttttgcaagattaacagcttcttcctttgttaatccgccattgtaggtatcatttcctttatttgatgtccaaacaccccaatcattgcttccatcatcggtcttcggttcaggttcaggttctttgtcggtggtttcttcaaaataatgttgaaattcttgattagtaagaatacaccacatgtgagaaaagcgaacttcatctacactaacgcgtttgtattccccatctggcttaatgatttcaaattcaactaatccagtattttccgcatatttaaaggttctggtaattttaatcggattattaccgatttgctcaaaaacacccttgataagagctcctggagacaagattggagtctttttaagcttatagaatttacctttttccattatcatttcctcaatagtgggggccgaagccccgagttagttaaaacttgatttcgtttgaaacgatatcccagattgcttcacgttgttcttcggttgttttacgaccgaggatgtggcgcagataaattttaacaagcagctgacgatttgtgttccaagacggatgtgaagataaatcgcgtttacgaacttcatcatgaaatccaactttgatttctgaaccgttaaactgaatgtccagagtagggccgttttcaaagctgaagaatacgtagttatcttcccagtacatatcaatttgagctactgtaccattgttgtgttcccaaagcaaagtagtagatacgtcccaagcattgttctgtacatatttgcggttgaagttagtgaagttcatttttattctccgttgtatctgtttgggtggtacaggtctatagtaaccttgttgaacctagaagtaaacaacttttttcattctgcggaaaataaaaaagggactcccgaaggagtccctgaacttatgctttcggcttaccaaaacgagaagcatcatcgcgaagaaccgcacgagctcgacgcatgattttctcaaccgtctgattgatacgcttgttcgacccacgcttgtagccagcgcgtttagaggtaccaacaacttcttttactgcagtttttgctttagcttgtttagccattttatcatcttccattttggagaaatacatgggagcacgttcttccgaggttcaacttctttcgacagttctttcggttgtagctcccgcaagccctcaaagggtacgtttaaactcttatctgttgcacaccgttagcttaaaggttccgggtccgatttctcggggataagatatacaccgatggatgtataggccttgaggcgtactcccaattggccatcgcctcggggtagcatgcacttgccgtttattttctagctgcactttggtagcaaatcaccgatggtttcggatgttttacgtggggataaccaacaacgtccacatcatacgttacccatgcgtacacatggtgggcgtacaaattacttcagcgttaccacaaagtggcgaacagctttgcgagcagcagaaccaagatgcttagcatacttcagttcatccatcgcttctaaagtatcacgaaattcagcttgagctgggttcagatgtttaaaacctttcagaacttccagagcttctgcgtagatatcaatagaagcaccgtaattttcgtgaccggaattccatgcattacgttggagttccagggctttagtaagttgtttgttcattgaaacattcctcaaatgaggttaaaatttggtggacggtaaccgaggtttagctcgggcatccaccgcgtagaattgctcgggtaactaattgtccgacgcccaattcatattattatttatacacacaagctagggacttataatgacaagtcacaaacttctgtttaatttctttaggtttcttcacacctgccgctaccaatggatgcggtacatttctaatattaccaacaggcagtggagtcaaatcaccgacttcaacaaaacctttcggtacatcatcaccgatagaatagatttcacacatatcgggaagttggccttgttcttcttttccgagaataataccggaaggagaaacaatttcatcacctttttgtgcaggttcagacacgagaattacatactcgcctagagctttaattggaagttccatgtgttacctttattgtttgaccatgtagttatattaacatggtcagtttaaagcaaattacttaccgatcatctgcagcagatgctcaactttcataccatttaccgagataagtttatcaaaggtaaatgagcgccaaccttctttctcggtatcatataccggaagtgaagtagtgctttctgctcgggcagatttagtagtactttctaccaaatcagatggaataatatctttatcacgagtacagcgcagagtacgaatagtaccatcagctttttcaaacacaatctgggattcacccatgctcagcacagctttaagtgtttcacggatatggatgttttgttcagtagtcagtttcattttgatgtctctttaatagttttgataattacagatttgcgcttggataattcttttaataatcgaactgcttgatcttcaaatttaaatgttgctaatggtttccatttaaaccaatgccggcgttctactgagtatgatataacaacatcaccacttagattaagtttattaatttcaacaattctaagtttcattattcaattccacagaattctttaatgttataccagttcaacttatccaaattgcgttttggaacattgaacacctcaattccagccgaacgaagaatatcgtcccagccaggttcgttcttgtcgtatgtttcgcagtatactaattttttaataccagactgagcgatggcttttgcacaatctggacatggagacagtgtgacatacattgttgctccatcaatactactgccgttccgggcagcaaaaagaatagcattaagctcagcatggatttcattgactttagaccatgcagagtgggctgctcgatgttctttgagcaatccgacttttttgacttggaatccgtcttgacgcaatcctgtagatttgtaaggaatttcaccaatccaaccttgttctgctgcatggtcacaacagttcacaccaccagaaggtgaaccgttatagccagtagaaataattcgtccgttcttttcaattactgcgccgactttccacgagcagcattttgactcttgagatacgagatacgcaatttgtagtaccgtcgacgctttcatttaaatcaccagataagttgtgttatttgttttaaccaattttaactcgtcggtaggagaagcaaaactctctactcgagaagtacgaatgcctgtaccatctggaaacggatgatttcctcgttcaataacatcggaaaagacatagccataaagaggttggccttccttaacatcaacgttactgtacaaaatagcatcatattcttcgcgtggaattgaccaaacgccttggtcagaaccaataacggcattaattagacgaataccatttgggctgatttctgctttaatgccacgagcatgttcaattaaaagagcttctaccgcttcacgtaaagtcattagatatgtcctaaaatgttagtcatttcaacttggcctgttccggttaaagccaattgagtgtgttgattgctctttccattattaactgtaatgatataagcatcaacatagttaaaggatgactctcgtcggagagtcactttacttccaggaacccggtttgctacttcctgtgcgaagattttaaccttcgaaataaattcatcatgtgaaaatttagcgtcagacaacataagtctcaacctgttgggtttcaaaattagcaataattccaacgataaaccaatcgtgttcaccttcgccacaagaaattttaacttcagatgaaccgcctgaccggtcaatagaaaatttaataacttcgccgtttggaataagtgcattcattgcagataaaaactctgcatgcattttggctacttcagatggagtaaactcatctgttaaatgattagcaacaacttgcgtaaatgatacttttactacttcggaatactttggaaacattatactttcctctaaaaatcaccgtgggctacttgccagcattcaacaccaatacgacgccacatttcaactacctgcgccctgtcatctactgcaagttttacattataacgatcagcaattcggtcccagaagatttcttcttttaccacatcgtctttgcgtgaatcgccttgcttacgttggaagtgttcgcctgtttcgccaacatggtccaacaaccatttcttcgtaatgcgttgataaacagtagggtcttctttagtaccagactctctgccggaaacagtaagaattttatatcctttgttacgaagcattttaagaaattcaattaccatttcctttggatggtctttaccacatttggccaagtcataaggagaacgatgattgttatctgctaacgtgccgtcaaggtcaaagataactgcttttggcagtgattcgtctggaatgtacaaatcatatgggtgcatcttagaatagaagctacgaagcacttcaataggaactgcattcgcgccacgatagaggttacgattaagcaattcagtccaaggaacgtcaaagcgtttaatttcccacttgacaccatcaatttcatatgccaactcttgccacttcttgatagtcgttggattaaggttagtatcagcaatgatgacacctttagtggtttccatctcgagtagagtcttcgccatagaaaactgacatacagatactgacttctcacgaagcttagaatatttgtaatcattacgtttatcaaggccaaagatgccttcacgcaaatcatcacgagacaaaacataccaacctggattagatgctacatattcattagcccaggttgttttgccagagcctggagctccttgtgtcaaaaccaattttttcattatacatccttaagattgtcaataaaatcatgaagagccttagacttttcaccccaattagcacgatatttttctttaattgctcgcaatggcttattcattgacagtatatcatttttgtcataattttcagctgcgcgtccaaacacgatgcacgccaattcattttcagcaattaaccctttaagtgtttcatactgttctcggttcattataataccattttagaaagattgcgatgcgccaatgagcgacgctttccatgtttcttcaaaaaattgttaacttcatcttgctctacaccgccactttctacaaattggagtgccttaccaaattcaattgaggcatcttccaattcagaaattgcttccttcagtgcctctttacgctgaacaaactccaaaaaatcgggatacataaattctgccatgaatagtttaaaccacacatcaaacgaaattcgtgtttggtcattaagctcaaacactctttcttttaaagcgccaggtacactaacacggactgtataaacatatccattagaaatattttctggtacagcaatagctttcttaacaagaggagttaactgacacgacccaacagctagcatattcctaagttgtgtctttttaatcgataaaagatgtgatgcgtcttttacgaagtaagaatgaaggtgtgacggttccataatattttcctcttgtttagtttacttaacgcaacgaggttctttaagttcagaacgataataacatatcattccattagcatctttagtataacgtaaaatgtcattcatccagatacgatactcttgagactcttcaaatggcatacctacccaggctttaccgtcaattacttttacttcccaatgtccttcccatttttgaattgggtctggccactcaggatgtaaaaccgggacatccggtgcactagaagagcatccaacaagtaagctgataatacccatggctaatagacttcgtttcatctggtagcctcctggatatcttctgcaaacttattgaagcttgcattaatctgtttttcaactaacccaggtttagctgcgactacatttccacgcttagcatctttattcattttagcgttggaagtatcacgcgcagctcgattttcctgatagcctttatatgttgtctgtagattttttatagaaacaccaatgttttctatttcttttgcttgtcgatcagattcatcttggacgactttgaggtcagctttaagattttctacccgccacgaaagatatttcaatccaccggcggataacgctaacacaccaatcaacaaccaagttgtgtttattttgagcatagtttaaggataacctctacgatatcatcacgggataatcccgaaatgaggatgtgacgatcagaactttctgaaggagaacacttgaagcaagcttctacatattctgccatctcagaataattcagctcacgatgcataataccaagacgatgcttgccataaatcgggtcaacgattacatagcatttgcatccgttagcatgaacgtttggttgggtgatgttcttgaacacctctgcaccatacttcgtgagatgattatctaggaaatcaatcatttcatctacggcttcaggaagggcttcggcacgctgctcgttcacacgattagtgtactctttttgcttcttgcgagcagcttccttgcgagccatatgggtacgtagatcagtgacgaatcccactttcttggtaccattccacacaaaaatcccgtcagaatgagtaccgtatttgttaacaaccatatctaaagtaattgcttgcatatccatttcattatcctcatcagttggtgtaagtctatagtatcacgccctgatgaggatgtaaacaactattcttcagaaatttcaatttctttttcgtactcttttggaacatatcctgcccagtacttcaagaacactctttcgaggtctttaagcagtttatctacatctacagttccttcgtacatgttcatgataacaccaaacaaatggcgctgattaaccgtggctttctgcgcagcaatagcataatctttacgagcacgacctctgtattcatcgtagaacgactgacatagctcaagtgactttcctaggtaatctagataagcttgctcaaatgcagaaattttcttaattgcgtattcatctccagcaaaaagagaacgcaaatcgtcggaatttgcagatacgacagacgcaaacagtctttcatttgacgttattgagtctttagtgtgatgaagagcagaataccattcggttttaaccttaaatctctgcccagtgtttagaactgcaatgtacccttctacgccttcaagttcacgaacaccttcaacccaagttgtgggatcagaaattccgtaagcattaattaaataaggacgaatcttagcattagcgtacaaatcatcatatttaatatactcaccagttgtgttattacggacgtttaacacaaacagctgtggctcctgatatgctaaaacaacacgattattaggtgaaacaaattccatatttaccgtataaccatctagcgctagctcaagaataacctgatgaagcgaagaatattcttcactgttaagcaaagctgaagcttgtcttgcctggtcactgtaaagagatgtttttgacttaaggtatagatacccatcatcgacataagatgatactagagagccatcagccttatccataatgtattctacatcgctaatatcaattcccatcgtcattgggttttcattcaagttaaagaatttttccattggacgagaagcaattcgaattggagtatcaccatccatttcaaacatgatgccccggcattcgagagcatcgggttttaaccactcgctatagcttgcatagtgatatgaaaacactctgaacttaccatccataggaccggtaaaatctttataaaagaattttgcaacttctgagctttcacacagattcattaaatttttatatagctctaacatttctttaccttatgttgtgtgttccatggaggattgaacttcttaatcagaagtggttcttccaagtccatagtggatattgacatctcgccaagttcattattaatcgaaagattaaaacactgacgagcatagaactctacttttttgccagccattagcgcttcaaaaatcttggcagatttagctgaatcagaggtttggtctttccgattaatagcagttctataataatttatacgtttacgaagatttttagtcttaccaatgtaaactagttcatcatcaactgcgatggcataaactacattcaacttgtttgctatcaaaattggtttgatggtaaaatctggttctaactcaagttgaacatattttataaaagaaaactcgttagcaatatcattcataataaagaggggccgaagcccctttccttataagtactttttaaatccaattagaacatcatcagtgacatcattgtcaatctgtgctaccagataagaacttatctcaacttcctgaggagcagattggactgcgtcagagttaagatattcgcgaatccaaggaataggatgtcgagttggtgcatcagtgattgggcacggcagcccacagctacgcatgcgagatacagtcagatagtcaatgaagtcatgaagaattttaacgttcagacccggaagaccaccgttgcggaaaagatggatagcccaatctttttcttggcggttaacttccatgaagattttaattgcttcttgttcacactctttagcaatctcaacccattcttcgccatcagtgccagtttgaagttgacgcagaatgtactgtgtgcccttcagatgaagttgttcatcacgagcaatgaacttcattattttagcattaccttccatgatttccatgttcttgtggaaattgaatgtaccgtatgttcgattgagctcgctaattctcaacccgttctcttatgaactgctgcatgttaccatgcagtccagactatatcacaatccctgagggattctccccatttcgagtcgcttgaccctacgtccgaagactagtcgttgaaccttgttttgcaattgtcgccgtgccatcgtttatatgttgatggtgataaatctttcttatcacaatacggacaattcaattgaattctatttggatttaatttacatctgtcattatgttttagataaaatccaggacctttaccaatgtgaccacagaaatcacatgtgatttctttttgtgcaggatgggtcccgttcttaaccatttctaatgtttttgctgatgttcttttcttatggtcttctgataagaaatgatgtgaaccgtcatttacccgttttgattgagtttctgactgcattttaccaccgcaaaatacatgagtaccttcttttatagctgcaatattgcgttctttaacttttgcaatatgcttagcttgttgaaaattatgtatacctaatgcaactctatttaaattagatttacgctgtatttcaccatctaaaagatgaaatgtaccattttctatcttagatttaatagaggcaatatttttagctcgtacttcagggatattaaaaatctggatttctctagattttgcggctttagaagctaattcagaaatttcttcaggagaatatttcattctaagctttatagcatgacaagcctggtaatctttttgagctaaatgtatatcataatgttcctgtatagaaaggcacatcaaattatctaaatcattattttcacggttaccgtctttatgatggatttcgtatgttcttccatcagaatctttaggtataggtccgttagcatctatccaaatttttctatagttcaattgtgcatcctcttaaaagtataatcatatttatattatactaattaaaggtgcaagcaaaaccttggctgctagttttccataaaggactttccagcaattaaaggagttttcgataaacgttaccgtttaaaggcgcattttacgcaaaagatacataaaaacgaatagcttccaatgcgttaataacatgtaagcaaagataaagagatttcattaaatcacgtttagcttctttaatttcgatattatcttgattaaagcagcgatttttggcattttcccatgcgcgagtcttcgctataacatcatcatagtaaacaccaattgactcagcgcgtttcatgattgcttcgtcaagaacgatttcatcaaagattttagctgggtctacatataggttacgcatgatatgcgtgtatgaacggctgtgaatagtttcactgaacgtccaagtctggttccaagtatctaggcttgggtcagaaataagcgcagataaaactgctgctggagctcgtccttgaattgaatcaagaagagactggtacttcaagttatcagtgaagatattacgctggtgttctgggagtttttcaaactgaccacggtccatcataacgttaacttcttcaggacgccaaaagaaactcaattgcttctcaatgagttcctcgaatactttatgacgctgaatatcatagcgtgcaattcctagaccagaaccaaagaacatcggttcggtcatgatatctacttgcttggtattaaaaactgtactcattctatttcctattctgtggtgttaaccatccgtggtctaattataattcccttttattaaagcttacaggccgcgcagtcagcagagtcttgaatcatatcatcgttaccggaaccatcacgggtgttatgatagtaaagagtcttaccgccaaagtaccagaaataaagcaagtcgtccatcattacagacatttcaactttgcctttagggaaattcgccgggtcgtaataagtattagcagagatgctttggtctacaaatttctgcataatcagaacctggttcagataaggcttattaccctgtttcgcgagctgccaggcataatcataaagggaagcattgtgctcaacatttggaacgacttggttgaagcttccttcttttgattctttaactgacaccggtccacgtggtggttcaataccattggtagagtttgatacctggctagacgattcgcatggcataagcgcagataacgttgaatttcggataccgtatcgcttgaggtcttctcgcaggagttcccagtcacagacatagtttggagctgcgagttggtcaattctttcgttgtaccagtcaataggcagttcaccacgtccgtatcgtgtttctttgtaaagcgtgcatggacctttttcgctagcaagtttaacggaggctttgatgagtgcatattgaatacgttccatcatttcgtgagtaatatcattagcatctgcgtatgaagcaaagttgcttgctaaccaagctgcatagttagtaatgccaacacctagtgctcgacggtctttagcttttaacgctttgtctacaggatagtcttggtaatccaaaaggttatccaaagcccttaccattacttctgcgatttcgttaacttcttcttggtcttgccagttgaagttgtcgagtacgaatgctgcgagtgtgcagagcgcgatttcgccatcttcttggccaacatccgaagttggtaacgcaatttcgaggcagaggtttgattgcttaaccgtagccacatcacgaataaaaggaccatattcaccaacgttatctaccatgtacgggtaaattcgagcagtaccagcacgttcagtaaggaacaactcaaacagttcacgagctttaatacgtttctttcttatatctgggttcttttccagttcttcatataatgtacggaacgcttgagcatcacggaagtattctgtgtacagcacgccaagacatacatcgggactaaacagagtgatgtaatcattcttaatcaaacgttcaatcatcaggttattaatctgaacaccataatctaaatgacgaatacggttttcatctacacctttgttgttcttaagtacgaggaggttttcaacttccaagtgccagattggatagtacagtgtcgccgcgccaccacggactccaccttgggagcaggatttaactgctgtttggaagtgtttccagaaaggaataactccagtatgtttgacttcaccgaatccaatttttgaaccttctgcacgaatcatacctgcattaataccaatacctgcacgcttactgatgtattttgtaattgacgcagcagcttcattaattgaattaagactgtcaccgccttcaataaccacacatgaactaaactggcgtgtcggagtacgaacaccagacataattggagttggcaatgaaatctttttagtagaaactgcatcatagaaacgaataacgtttgctaaacgattttcgccatcatcttggtgcaagcacataccgatcaacataaaggcaaactgcggtgtttcatacaattcaccagtgtgacggtcttttacgagatacttctcgataagctgcattgttcctgcgtaagtcatagtgaaatcacgctcatgcttaatataagaatcaagcaaagtaatttcttctgctgaccatttgctcaggatttctttatcatacttatttgcgttaacacaacgagaaatgtggtcaataaaagcaggtggctcaaactgtccataaacacgcttacggatttcaaacatagctgcattagacgccacatattggtaatccggttcatcaatagaaatgctattcgccgctaccttaacgatagtcttttggatatctgcagtgctcatgccatcacgtagatgggatttaataatttcatataactcgtatgggtctactttggttccttcgcacgcccattcgaggactttaatgattttctgcatgtcaaattcttgactaacacctgagctcttaattacttgcataagtcctctaattcaaatgtatctttaaaaagtttattcactacaagagctattatatcaccatggcaaggaagcggtttgcaggtgcatcctaatctcattcctcttaaagtttctaagtgctctcgctttatttctccgttccgaatcttagcaataaaatcgtccttaaacgcagcaatagcatcaggacgattatcgcaatctttaccgacgtaatttccccacattgttccgcgttggatatttacatcgaagtcggaatggtatttattaaccacccgacatatcttcatgttatatcaacttcaaaccaacagattaattgtgttttgcctatagaccattcatatgatttaacaatagacagaaccctttgttcgatcccgtcaaaaactatcttgtcattaacttcaggcaaatcactagagaatgcatcacgcatctcgcctaatattgtttgtcctttacgaacaaatcgaatattcatatcgccattttccccttaattgttgagtgagattcatatccaactaattcaaagtggtgtggacgtgcaaactgctctaaccaacgaacctgagaaccagtctgccatgtttcatacgtatccggaaatgctattttaagttcgcataactctttaggttctcggcggagaatttctttgcattgctcaatgtgattcatgtaaatgtgagtattaccaccagtgaataccaaatgaccaggtttaagattggtcattttagcaataacatgaatcaatgcagcatacgaagcaatgttaaatggaagacccaagaacacatcaacagaacgctgataccactgaaggtctaaatatccattgcgaacgttgaactgatacatcatatgacacggtggcaatgccatcttatccaaatcaaccgggttccaagcagtcacaatctgacgacgatcagttggcaattgcttaatacggtcaataaccaatttcaattggtcaacgcccatgaaatctcgccactgtttgccatacacagggcctagttcaccaccagaatatcccatgtcttttgcctggttttcatagttgtcgtcccagacagttttaccttctagcaatgaaccatgctgaataagacgcaattcatgaacattagtagaaccacgcaagaaccaaatcagctctgcaatgcatgctttccatgcaagacgcttagtagttacagcaggaaatcctttttgtaaatcaaaccgaagctgggtaccaaactttgcgatagtaccggtaccagtacggtcatcagtctcgtatccattttcaaaaatatctttaattaattcttggtattcacgcattaaatttttcctgaagaggtgtaaagaaaagctggtctccacgcttttcaaatcgtccaataatagacactacatcatctttgaccatcacattgccatgtgacattccgatgaacatcttcttataatcacgttcaatttcaataggtatatttccacttcggttatatactgtagttgaaccgttataagtgctaagaccattataactgaaaactagaagatgaataccatgcttaaatggaaatcttttccacctcttttggactttgtcttctgatagctgagtgatatcatagtttgcgctcatagaccacctctgaaatgttagtcacttcatcaatatgataccagtgattttctttagtaatgaatcctgattctggccaagtaggagccaccacaaacgcaataggcagagtgacatcagaattcactctatgactttttctgatgattgtttggataactctatctgcatatggatatgccttctggatgattccggcaccacctatgatagaataattaaggtctctattaaaagtgatagtactgttgtaagaagtatgagcggccataatgccaccacccaagaaaccgataaattctaattcacttacataagcatctgcaaagaagccatttttagcagttgccaacgcacgactcatgtcttgaacaacgattgtcttacgaccaggaagaggtttaggaaaactcataaaagtctttgctccgcaaatcaagatagtatctcgagtacgattagcaaagtttttcatgtcctgggaaatatgtttccatggaagaccatcgcctaaaccaaaagcattttcatttttgccgtctacagtttttgtaggagcaaaggcataaactatttgaatcatttaaacctcaataaaatttagccatataaaaataatcctaatataatgccgctaataaaagcggcagtaacagaaattagcaaaactactaattcagcctcaatcatttcttggccttagcaagtttaaatgcttttttgaattcttcaacatcttcaacaggaatccagaagcctgagccatacccatcttcatagcatgggcagttatcacaataatcattccaatagacggtttcaccacccatagtgaatggagcttccattcggcacagtacttcttcaacacgctctaattcttctgggtttttgtcgcaaatgcagaaattccatttaccacgatattcagaaccaagtttgatgctttgacgttgaagtttcatttttattctccagtagattatggagctatactatcacaagcatagctccttgtaaacaattattcttcaaaatcttccataaagtaatcaatgtcgtcccattccagagattcaagatatgcaataaccttttctctagaaccgcggaggtcaatatttggccaaccaccaccaggtccatgacgcataatcaagtcaaaatcaataccatggtcagtgtcataaaaacgtgtaccatctgcatactccaaatctacacaaataccatctttgttaataataggagttgctacgatatcaatgtttaatttacccatgatgttttcctctactcgttttgtttcgatgtagatatagtatcactcatcaactggcttgtaaacaattttgtgaaaatattttttggagggataaagaaaaagggacccgaaggtccctttatattagaggtcgttcagaatatcattcagatcgtcatcgccaacactgtcaccagcatcgcccatgatatcgtctgtggaacgagaagaggtcggtttggattcaaaatcagacaggtctttgtcaaaggaatccaggtcatcaccaattttatcggcttgagctgctgcttttgccgcggcaccaccaagagctgctgtacccataatctgtttaaatttggcttcgttaacttcaaacgatttaaactgagatggagccacaatttcgctgaggtcagccatattttcggtcaggaatttctgagtttcttcatcattgatgtttgcaatctcggactgaccaaggaatttacattcatcatagttctggaaaccaccgactttcttaactttcatgacgaagtttgcaccttcatacacacaagttacatcaaccggagtttcacccatatcaacatcgatttcaaccatcgcgttgattttgtccataattttctgaccgaaacggaatttaaatactttaccttcgttttctgggttagccgggtctttaataaccaggatgttagaccagaaagaggttttacgtttcagaagcttatattcagccgggttgctgttataagaatcgtttttgctcagatgagcacaaaccgggcaagaatcaaaatcaccgtgggtagaagtacaattttcgatgtaccatttaccagcgtgtttgaaaccgtgattgatcagttttacaaacggcagagagttttcatctttaccaggcaggaagcgaattactgcttgaccattaccagcattatcggtcttcagtttccattcgtttttgtcttcgttagagaaagaagaaccacctttcagaccagccagttgttgttgaagttgagcaggattttttcttttaaacatgagttatttcgccttaatttatttaaacagttgttgttgcaacatgggtccttgcaactggacgatagattaattatatactaatttctttacaagatttgattatgctaataaagagtttcttagcttcagcaccgtcaacgtttaaaagttttttataagcttttaatttagtggagtaattactccaaactaagttatccgttgcagtatcatgtgtatttattatatctaaaaacgagtcaagcatgatgaatgtctcgaaagatataacgtttgactgaagaagtttgaacacataagatgttccgactttctcattatattcaaaaatatcatgaagcttatctacattaactttcttagcaaagtagtaaatattctttacgtcttcagagaatgtatttttgatttgcttcaacttaccgatgtattcacgatagaatatcaacgcgtcagcgtcactgatatcaccaatccaagcgtcttgattagctacaagattgctcatgaatatcagagtcaattcttttagcgtataattctcagcaagtttctcaaagaagtatttgtctctgcgcttttgataagctttatcagagacacgcatgacccaattatacttaacaacatcatatcgaccagcgaagtgttgtttgagcattaaatataaaagataaacgctcttaccgttaacgtatctattattgttttggggcatgcgtagacgaatcataataaaaaatccagactattcgttttgtgtgtttgactaaatgatggacgaagcatattttcttccaatgcttctgacataattttttctatgattgctggaggaatatatctattgaagtttccctcaggaatagaattttcttctaaccactgagttgttgcttcaagataccccattccaagttctgttaccatagattcgatagcaaatccattagcttgcttatctagcagctggttaatggattcggagggggacacatccccctcatctttaagcgaaaatagagtcataagcttctaccacttcatctttttcagtttcaaaacgatcgcgtgtgcctttatggaacagagcaagcagttgattaaacagtttgccttctacgccaagctctttcttggcgcggtctttaatgtctttgttaagctcaagatagctttctgcttttagcttattacctgaggcttccttaatcatatctcgcagagcctgtccgtgtactgcttcatcaaatactacttgctctttttctttcttagccattatattcaccttaaaagttgtttatttctttcattaatttagacagaccggatttaacaaagtagctataaattttaccacgacccggtagttgatagttattataacaatctaaaatgttagcaacaatgtcttcgcggatgtaatcaaaatcgattaacacacggttttccaagaaacgcttatactgttcttcagtaagcaaatctttgatgttttcgccagcatcaagacactcttcaacaaacgtcatttttgtcgaaggagtacgctcgccatcaacatgggtgtaccaaaaatctgaacgaactttaatagaagcaacgttatctttcttgtcacctttaataattttaaccatacaatctaaagcaggagagccggttttagatttcaccaatttcttctgcattggtgaccattgcttaacattaggatacttatgcaattgagtaaagtcaccatctgaagaaacaatcatgactggatggccttcaagactgaactttttggttaatactgcaatactatcatcggcttcagctttatcaatgtcaatgacataataaggcatatactgcttaaattcatcaattacagtacgaagaccttcaaagtaaccttcccagtcccaattagattcttcacgggctttagcacggttctttttataataatatgctacatcccggcgccagtatccgttgattgcattatcaacacaaatgacaatttttgtgtatccatctttcttccacttaaaagcattaaattttaaagtagaaagaataagatgacgaaccataggagtggttagtttatcgccttctttatacgtatgaagaattgtcgccattgcgatttgcgacaagtcaatcagaatgacaccttcttttacttggtcttcttcggcgaataagcaatttaaatcagacatttgaacctcgttcaattagttagtacagccattataaatacttctataatgaagcataaccccataggagactctatgagcgatttactgaaacaacatttccgtgcaacgaacggcttggacgcaggcggaaataaagttataaatgtggcactagctgaccgcaacgttaaaaccgacggcgtctccgtcgagtacgttattcaagaaaacactatccaaaaatatgacccgacgcgtgggtatctcactgattttgctgtgacttatggacgtcgtatctggattgcaaataaagatattccaaaacccgctggagctttcaatcaagcaaactggacttcattgcgtgttgacccgaactggatttataccgtccgtaaaggcgagtttgaaattcaatctggccagttcatcaacgttgactcaaacgctgcaggtaatgctacgctgttgttacctttagcaccggatgaaggcgataccatcgtagttcgtgatattggcgggcgtcctggctataacggaatcttaattaaagcacaagatactggtgcgtctatcgtatttggtgaatcgcgcctgcgtgaggtaagacttacacgtccgtattcacaaattatgcttacgtttagtaatggtgcatggcgtgcaagtttaaccgattttggcgatactgctaaaatggtagttcctaacgggattgttccaacccaggtacagtcgggtgataacgtagttcgtcgttatacttccaactcagagatttttattactctgccgttgttcgctaattcaaacgatatcatcaattttactgaccttgacggtacatcgccaattaaccatatgactgtgcgtacgtttgacccaactatctcaattgggactcctggacaaacagaggttcaagtacgtacttcaggtaatgggtttttggtatatgactcgattgacaaaatctggcgtatttttgaaaatgatttacgcacccgagtaagaataattacttctgacgttactttaatgcctaacgagcatatttctgtatttggcgcagataacaataccgttaaaacaattaacattactttacctactgacgtagctgttggggatactgtcaaaatcgcaatgaattatatgcgtaaaggacagactgtagtaattaaagcttctgatggtgataccatcgcgagtaatttgaatttactgcaatttccaaaacgttcagagtatccacctgatgcagcatgggtgcaatcaagctcgattacctttaacggaaccacgtcatatgttccagtacttgaacttgcttatattgaagaaaaagcaactggaaaaagttattggattgtaactgaatctgaccctaccgtagaacgtgttgatgctaaagacaatactaccagagcacgattaggtgttattgctcttgctacacaggctcaagctaatgcggagtcaaacccagaaaaagaattagcaattacgccagaaaccttaaacggacgtcgttctactgaaacccaaactggtatagcaagaattgcaacttccagcgaagttaatcagtcaacaactgcttcttacttggataatgtaatcgttactcctaaaaagcttaacgaaagagctgctactgaaacccgtagaggtttagcagagatcgcgactaatgctaaaatggacgcaggtgaagacgattttacaattgttactcctaagaagttgctttatcgtactacatcggattcgcggttaggtgttattcaattagtaaaaattggcggtgaccctaacacaactgctgatcgttcttctgctggcaccggtatattcgatcattctgattacaaaaatgcagttactccaaaaactcttcgtgagtataaagctactgtaaatcagtcaggaatagtttggttagcaactgatagcgaagttagaaacggaactccggcttcttcaaatattcctacagtcgttacaccagaagctttgcataaaaaagttgctactgacggagcaatcggattaatccaaatagctacacagacggaagttaatgctggcggcgtgactaataaagcagttacacctaaaacattgaatgaccgtacagcaactaacgatcgtactggtattgctcgcttcgcgacacctggtgcacagggtgaatttgaagctggtacttcaagtatagtaatggtaaaccctaaattattatttgataaatttgctaataccgatcgtatccaagttaatactagttctggcttaactattactgggaacctctgggaccattataccatcaacatacaggaagcaagtacttctcaaagaggtacaaccactcttgctactgctgctgaggttagaaccggcaccgacgccaagaaaatagttactgctgccacgctacatgctaaaacagcaactgaaggagctatcggtcttgctcagtatgctacacaggcacaagttgatgcaggcacattaagtgatagaattgttcctcctgcttacttgaaacaaactattcaggtaacagagtcatggcaagctacagacagcgttagagggaccgtcaggctatccacaggcgatggaacgtggaaaggtaatgataccgatggctcaactcttccggataacgggtatgcctctaagggcgtcgcagtgtctccatatgaattgaacctcacgttgaaacattacttacctcgtcttggtaaagcctatgacaccggaatgctaggtggtcaaaccccagacaaatatgctcgtcgcgatatagcgcagactatttctggagcttggtcatttagtcaggacacttcatttagcaataatatttctgtccagaatattatatatgctaatggcggtgaagttaaaatttctccaactgctgacaccggaaacgtgcatgttcgttttcaaaatagagatggaagcgagcgtggtataatttatgctgagccgcaaactgcttcagctggaactttaaaaattcgtgtcaaaaacggaactggaactactgctgcaagccagacctacacatttggcggtaacggtacgttagaagttcctaacgaagtgtcaactaaaactctgaggtcttctggaaatgcaatagttggcggaactgttatggttaaggacgttcagatgcttgctgtcgagggattgaattcaatattcggcgcccaatcacagtccgcatttattcgttcccgtgacgctgatacacaaatttttgcacaggattcaactggatcgtatccaattttaactaccaaaaactatgcaagactagctgatggccgttatgttaataaagctggcgataccatgactggtaatcttaacttaagcggttctgctatcgtcattacaggttctgaatcatggtatgttccaacgaatgaaactgtactgagacaaggttcttggactgctgaaattaaagacgctactaaattacaaggtcttcgtggttatatggttccgatcagaacaccaattgaccctgctaacccaagcactttagtagtgaccggatatgaagaaaaaactgcagctggtggtgttttaactcaggttggtgtaactacaaacaatacttatcagctttggactccttatcctccgacaaccgaaactgctgataagcgtttcgcgcatactgtgtggatgaggatttataatccaaaccttaataagtttgatgattggatgcgagtgttcacgtctgctactcctccgactgcagctgatattggtgctccgagctcagtatcaactcaggttaaaacccttgaagtcctggaatggattaagcttggcccagttaaaatctggccagaccgtccaaaccaaactctcaaatttgaatgggtaggtgattaatggctgaaccaattttaatggcagcctttggcgaggatttcgtggaaacacgaatcctctctgaggcaaactctgtgaagtattggctaaaagcttatgctacgcattctaatgctgttcctaataagccagaattgaatattaatggtgcctttgatatgacctcctccttacggagggggattaatgttgttcaagttaatggtgacagttttattaacttcaaaacatttgacgttaccactgatgataacaacgctaataacaaagcgtttgtagaatatgcaaatggattaacttcaggattgtatattataatgacacatgaacgatttcagtctagtccgttgatagatagatggtttaaaaacaagtggtctgcttcttggccaggttctgacttttccaaatcatttccaaactctgcctatgttggagtgctcggagcagcaaaaggacgtatattaattgagtcattttacggaaatgatggcgtagtcaaagaagattccagagctaaagtcgatacagtgtatgataacgttggcgatgtaggatatactggatgtccttatcgttctattgaagataccaatgaatactcggattctactggatatgaatataaacgttatccagtacaaaatgaatctataagcaaaatagctgattatggattatctcctggagattctgtacttttagtatgtgatatgtatgcatctaaaagccttcttgatgctggttctactactagagctagcctgcgatggttcaaaggctcatctttattatcttcaaacgtatcattagaagttccaaaaaatggagctgatagatggttaagatttgaaagatttactgctgttcctacggacgctgatggatttactattgtggtatcaagatatccaaaaacgtctgtagttggtgactctaaaatcaaaaaccttgtatttgttcaaacttctcacggcgaacagttgaatagtgttattcaggagtttggtgtgaatggcataagaatgaataaaggcgttgaaggaggaaccactatgattatggaacttccaaattcaaaagtcgatccgagcggtgttattccagttcaatcgtttagagaaacatcagactaaggaagccttcgggcttccttttttcgtataaatagaaaatatataagaggataaactatggccgatttaaaagcaggttcaacagttggcggaaatcctatttggcacgcaggtacttttcctcttgtgccggcaggaaactccctaacttatagaggtgtaaaggtttatactgagatagataaacctcaagcaaatgataatgatttcgtatctaaagctaatggtggcacaggttctcaaggtttccaaaaggaagtcgaatttaaagaaggcgtaaaagtttctgcgactttcagtggcggtaatagtttaaacgggctttattctggtaatggagactcagcatctctagcaacagcgaacattgacattgtttcatggtacggtgtcggtattcgtacttcactggagggtagagaacggacagtagtttggaacgccagaaccggggaccaaataaacaaaggaagtataacagcttctattcttagttctaataatgctcctacagccgctcagcatttaacgcgtaaagattatgtcgatggacgaataaatactgttagcaacgtagctaacgcagcagtcaagaaagctggtgataccatgacaggtgcactacgagctgaagctggcgtagttatagtaaacacagcaacatccggtgaatatgctcctagattagatcaggttatttcacgcggggtaacaatagattttggcacatactaagaggtagccatggccgatcaaaacttaaaacaaatacaatttaaaagaactagcacagagaataaagcaccaggtgcagatatcgtagcccgtggcgaaatcgcgttgaatacacatgggcgtactctcgctatctataccaaagatgaagctgataatgttgttcagcttgctggtaaaggggttcctttcttagatacatctggaactcttagcgttgatggaactactacattaaaagacaacgttactatttctccgaataaagcgatcagttttgaaactactgatttaagcggtgaaataactcgtcatatcgttggaaaatgtgctactaatgatggctggtacattggtgccggtggtacaagcaataacggcattcttgaaatcggtactattgacgatggtactgaaactattcaattcgtacagcgcggagcaggcaacgtcgaagcccgaaaacttgtcttacttgatggttctggtaatactactcttcctggcgatttgagattaactactaataagaccgtaaaaatttcaaatgggtctactcttactttagaaatgggtgtaggtgctaatgatgcatacattaaaaacttgagaggctctggtgttcttcaattaactaatgatagcaatttgaccttcagaaattaccaggtttattacgccatgaacggaagaggtcctggtaaatccggcactcttctgacgaatgtagaaaacaaccgtcaggcatggcaatacgtaatttctgctgcaactgcgtcaactgctcgctgggtaaaagtagctacaataaagcatccaggaatggcctcttcgcagcttgatttaatgattactggtggcgttgattctgggcacggtagacattacgttgattttatcacgttatcaggacgaaatttaacatcatggagcaccaacagtttagataactgggttgaatggcgccgggttgggtctccttctaaaacgaacgttccagagtattacgttgttaaaaacgattctgctactgatgcggatgcgtcatttgatttttatgctaagattcctcgttatggcaatggcctttatgttacagtgctaaacgcatctggatacaacggccaagattcaggtacagtaattatctatgaaaccaatcaggacactggtgatactggaccgtccggaagtattcttgtttcaatgaaacagatttttgatagtttagcaaaaccagatttcggtgataccacaggtactcttccggttaaccgtggtggtacaggtgctactaatgtaggagatgcccgaaacaacctgggccttagaactgcggctgttcgcgatgttggtgaatccagcggaaatgtgatggaagttggtgcctttggtgtcggtggtaacggaaaatcagtagtagatattacttctgacgttgatttaatgactcgccttaaagctattggcggtacaacattcagagcaaatgttaaattcgttgatggcaattctgtgtgggacggcccagggttttactctcatggcgcaggtttcttttctagaactggcgatacaatgtctgcgcttaatatagattacgcaactggtaatgtcagagtatttgctataaatgaccgcggattggcagacggtaaagtaaattataatatgctttacggtacagcaaacaaaccaactaaggctgacgtcggacttggtaatctgacaaacgatacccaagttaagaaagctggcgacaccatgactggtgatttaactgttcctaatttacatgcttccggcccgggtactgcatcagtatatgttaatgccgggactgggaatgcacatgtatggtttagaaccgatggtaatgaacgcggcgtaatctgggcaactccgaatactacggatttaggtcagattaatattcgtgcaaaaaccacagctggtgtttctgctggtgattttagcttccgttctgatggcagccttgatgttcctgtagcagttaaaattggtggagcagcaatgctaaccaaagacgggaacatcacctccggttcaatgtttggtggtaaccttaacaactatttgacttctattaaaaatgatatcaccactggcgatagtaagcaagtaagcaagactggtgataccatgaccggtaacttgactattaacgctaacttaaaagtcgaaaatcccaatggaacgatggttgatttaggttcagagaactcagacaaatacagtagattaacccttgcccgtaaaattggcgatggcgctacagtagcaatgcttaaagttactcctgaaggacatgtacaattcgggtatcaaactgccgttgctaccccagctcctactaagtacctcctggttaaatctaacggtcttgaggtagaaggggatttagtttttaatcagacctatcgcggcactgaagaggcagttgatattactgataagactgttgaccttaatggtcttgtcattaaaggaaccgacccaggtactcgtcagatgtataaatgcttctcatatggtggtggttctaatatatcgaacaaacctacctctgacggcaactttgttcttgaagttctatctttgcgtaaaatttctgatactgattggacttgtaagcagacctttactacaaaaggtaatgttgaaggtacatatgttcgatactgccaaaacggcacatggtctgcatggaaagaggttgttgcaggggttcagccaattaatttaggtggtactggtgcaacttctgtagatgctgctcgtaataacctcggtgttggtgaaggacaaactgtatcattcggtaatttagttaccaacgatttaactgcaaatggaaacgttagattagttggaagactgaaccttggttctacttctgcgactggcgtattacgagctaatgaaaccggtgcggttgtcttaggttctgctagtggtcaaaacatccacatcagagcaggaagcccagatacttcttctggtgaaacccgctttgagccaaacggaaatgttgtggttggtggagctctaacgtcttcaggaagcttgcaagtaaatggcgaagccgcgatgagcagaagcttgatcgtttctcaaaacataaagaatactaacgataacagttttattctgatgggaaaagattcggatttaggtttcgttaaaaaatctggtgcaggttctaaactggtctttgcttcaggaaaaacattcacggttgctaaatcatcagcaactaccatagctaacccagcgacggaaacttatactgatgtgtttaaaattgatgctgacggaaaccaaactgtttatggaaatgcccaagtcaacagacagttaactgtttctagctcagctactgttgcagatgttattaatgctaacggcggtattattgttcctactacaaagtatgttcaaattgccgatgctcctacacaggataaccaagccaccaacaagaaatatgttgatgataaggttgcttctgctattagtaatgctggcgacacgtatcttccgttaactggtggtactgtaactggtagattaataattacaggtgatcagttaaaaactacatcgctttgggccactggagatactgctgttaatggtgctttaactgttggcggtaatgttgttagtaataccggtattggtagctttgttggtgctgtagatgttaaggctcctgctgcggataatggtacaacacacctttggttccgacattctaacggtggtgagcgtggtgtgatttatatgccgcgtgacaataataccatgatgggtttaagagccggcggaagtgaatggcaattacatggctctgcaggccaaatgatagggccaggtgctcgttggcgtattcatgcagatggtaacctacagggtgatgtttacggtggttatatcactaactatatcaacgataggtttaaccaatgtgcacagtgggttcgtactggtgctcaacaagactttggtccaattggtcgtccagcacccggtaaaactgttcctggtggttgggtgcttgttggtcttaacggtaacagtaacgaagctaaccagaatatgcaacttatcggtggacgtttacaagtatggaaaccgggcgttcaatgggttgattctgctacttgataataaggggcttcggcccctttaaacttaaaggtaaaactaatgattattaaacaaatgaaaggtattcaatggcatcacaatttcgagggcggagcttattatcgagactgcaacgacaagtgctggtattcttttagaaattctctcgataaaaattcccatatcattatagttaatgctaaaacaaacaagataattaattactataacggcgaagacccaaccatgatcgggttatttgctgataaagaaatgattttggatgtttatcaacttgacgattttcctgtggattcatgggatgaattcacacaaagagaatttgaatttgtagacgaacaagttgtgatgaccaaagatgtacaagttcctaaagaaagaactaaagatgatatcatgaaagatttaatgaagcttaaggctgaattggaatcattgcaataaatagctctgtaaggagagcaatatggcaagcaaacaatcaataccattttttgatatgtttcttgggttgctcgagctattattcaaagatggagccacgggaagagttctcttttcccgtgtttttgttgtcgtacttttagcattgttggcgtttgctggttataagtcagatagtcttattactgcttacgtcgatagtacttatgataagtatgataaactggttcaaaaggatagggatgcccgatttgataacacagcactcgaacaactccagatagtacatatctcaagtggtgcagatttttctgcggtctttacgttcagacctaaaaacttgaactacttcgtagacttaattgcttatgaggggactttacctagcacggtagattctaaaaacttgggaggatatccaatcgacaaaacaactgctgaatatagcacgcatttatcgggtagatatttttggacggataaggaatttgttttcttaccaacaaaaagaaaaccgcctgaaatatcgtatatgtttagctgcccgtatttcaatttagacaatgtttatgctgggactgttgaaatgtactggtacaattccaaacctgcattatctaacgaaagactaacatcgatatgtggtcaggcggttagagctcttggaagagctaagtgattacttattactatgcatagccattgttcgatagatagactcaaatccctcgttgtattcttcaacgagaattctcttctcttcgtcagttaactcagaaaccattttacgaaagttgctctgatttaactgacgcccctgctcgttcttgattccgatttcattcaagaacgcaataaattcatctcgcttctccatgatatgttcagcattgaacttagtcagaatagaagcaacagtaacaatttcttggacaatttcaaacttagtcattatttttcctacaacataatggattatgtgattatagtatcatcttgataccgcgttgtaaaccagtttatgccaattcccaacgagaattcaaatcttccttggtagtgatatactcagcaccagaggacatccagagcccgtagcgaccatcttttactttagccgttaaataccattcctttccaattggacgaaccctacgattcatccagtgacatacatcaattgcctcctgaaaagacaagtcaatcagactcccaagcgcgattttattcattaacgcttcgagatatctttgtgattcaacgacagattctaagttatgactcatgctaaaactacctctccgcgattacctaaaatgctttcgatatactcaactccacttataatgtcacctctatcctttgctttaatagtaataattccatacgtgtggaaatctgctgatagactaaacggtttagaagcttcctgagtaaacgtaaacattactgcttgctctaaatgttttacttctaagtcattagcccaagagttaagaactttaagcctaacttgtaaagtgtattctactttaattgctgaaagcaattcaacacgtttatgatatgccttggcttcatcttctctgcgtaaagtttcagtattcatagataatctccaatgtcataagcatcaacacatttctgaaattgttcaagaacttcttcaggttcaacgttagcaataatagctacagtaaaggtaccattattccaatcatgtaccatccagtctccatatccaacattctggaggtcttccattagttcagaatggatatctgctactaatccagaatggtcccctaatttcttatggagagcgtctaggtcatcacaaataatggttaaagtagtacatttggaattattcagaatgcgcattgtctttacctttgtgtttttgcttacgtttggattcatttgcggctcgctttttatctttgtgtgctccgcctttattaaaatcatgtttagctactagattttgcaccttcaagttccttgatgtaatagtcaatatctttaatcatttcttctgtcattattttgtacatttcagcaagaaatggtttagcaccgccattaaatggatggctaaacgggcagatgtattccttatccatgagagttttcatgaatttgctgtctgccattttaaacccggcttcattggtatatgtaccccaattatcgtccatcatttctaatgagcgctgaagcgatttacgttgaatttttaaaagtgtaatgttattctttaatgtactaatcattagtataaatcctctgagaataattcattagctggtcctgatttaggacgaactgtattaacttgacctgcatgtgtagcgatgattaatgcttcttcacgtgtgaagtactcaccccattggtcaacaaatccttgattgtctccatggacatgatcagaaaccaatttgtcgcggaacatatctagaacgttcgccatatcaacagaataatggcgagtgcctggaactacaattgttccaccagttttcaattcaaaacgatttgctgcacaaacgatacgacgttgaagtaatcgtccatcccaccaatcagctactttaaagcagatttctggaatttcgctatttacattacacatttgaccaacttctcgttaaaggttttaataacttcacggccatggtctgcacctttcttacagtctgcaattgtccatgcttcaccattttggtatttgtgaagagcccgggtattaatatctttcacaagattcataatcaaatcattaatttcttgttcagtcatttaaagaatcctttaattttctgccacaaacttttcttttcacgaataccaatctgacgaataacaggttcaccctgcattttctctaaccattccattgagttaacagcttccgctaatggaacaaatttagcaagggccttttggtaattatctacatccatgatatgtttaccatctgcattgtagatagcatagcattttgtgaatttcttatcaatgtatccgataaagtgtccacggaaccatacatcccaacaatcagttggcatattcagattaaggtcaaccttttctacacaacgctgaagttcattcaatactttaaacttgttcattacagttccttaatagagcggatgatggtttcaatgttttcagcagtacgggcgatatctaagtaagtattgcctgttgcagctacacggcaagacattccaaggtcagtgaagtgtttctgatgctcttcagaaatcttgtaaccgaagatgcggaaagtacctttgttgttaacttcaagactacgaataccgaaggtacgtttttccagaactgcgatatagttactgcggtaaacagtcagttctttcaaaggcaagatatcttccatctcaccgagaagtttcatcatcaggtctttgtgctcattcatatcttcagttagaggacgagctttacgagtattgcgtttcttcaaaagttcaggcttgttctcttctgcatagataactgccgctttagagatgatgtcctgtgcttcaccagtgatgattaaaccgtcaccagatttctcgatgagacctttcttaatcagaacaccgatgtttgagttaacagaacttgcgttcatggtttcttcaaggatttcacgcagttcagaagaagtgatgaaatcctttttagctacctgaaccaggatagcagcagttttttcgttcagagcatcttcggaagctttgatgatgtaagttactttagacattgtgattctccatgatgttttattcaatttgtttggtatgagactataatatcatctgctaaccagcttgtaaacaactttgtgaaaataatttgggcattctaaggagggattttggagggatatagatttatatggaaggacctggagatgacctccaggttccctagattaactgaggagcaataaaactaaacctaatacggcaattacagaacctataattaaataaaattctatcatagttcttccaggtctttcagatactcggcttcgggtgttgtcttttcccagtacttaacctcttgggcaagacgctttgcttcctgagcaagtttcttcgcttcatcatcagtgatgtgatagatgttcattgaaacgagtttttcagaatggtctttgaatagttcattctgttcaatttctttagtcagttgcttgcgagttttaccttggataacgatattacctgcgataacctctttgataaattgagcttttgcctgagcaagattaaacgcctgtttagtttcagcgattttatgctcgattcgtttggcggtgaatgtcttacggacttctacaaaatgacgaatcagctcaccggaagttttgaacttgtcattcagcttaccattctcatcgatgaccacaatgtattgactcattttctcaatgagcttaaagtccttcatgattttagcatgacgctgctcagggtcatcgctcaaagcatagtctttacggaatttcaccttaaagccaaacccggtcttagaacagtcatcatcatatgtgatgtatcctgcatcttccaacgggtcaagtactttttcaacgtaagaagctcgttcaaacttgtatggaatttcactgatatagattgagttccgtgaagtttctttatacacgccgtgcagctcaacagaaccgtcttctgtttgaacgatttttccgttaaatttaggaaactgtacttcaggttccatcatttcgccacgaagtgctgctttagtgcattccaaaacagattcaaaactatgcggaagaatagaagttgaataacctgttgcaataccgcgaacgccattcagaagaacagtcggaattaccggaagataatacgcaggtggaacatgttctttgtctttatgcaccggagcgatttctgtgtctttgtagattttacggaagttgtcagaaatccggcagaaaatataacgacttgccgcagcagattgaaccagacgcgaaccgaagttgccttgcccatctaacagaggatagttgttattccatgtgtttgccatcaatgcaccagcatcttgagcagaggtttcaccatgatgataacctaaatcagctacaccgccagcaacagacgcaagcttatggaatttttctttattaccgcgagctaaatcaagagcccgagcaataacaaaccgttgtacaggtttaaacccatcaattaagttcggaatagcgcggttttctacagtgtaaatcgcatactcttttgcttcattatcaatgatagatttcaaatcgcgatgacgaagatttgatgccttagccaaatcatcaatagaacctgcttgttttaatagagtgtcaaaaatatccattgtacctaccagattagtgagccgatttgtactataacatcggaaatgaaaagcacaatataaaccattccgtaaatcattccatagtacaaaattaaaagcaaagcggctactaaagccgctccaatcaaaattttcttaatcattggaaagggctgctataataagaataattgataaagttccttgcgctaacgcctgcgaaataacagaagtttcacctgtagtcaatgtcgatacgcatagagcagcccaaattccgccagcaattcctttaatcatttgtaaactcctacaattttacaaatacgctcaaacataataaatgctgcagtgaacgcaatgcttccgattactttagtggtaggcacaaggccataccacatgaatgttcctgagcaaatcattagggccatcagaaacacatagcccatcacgaagaaggttctcattagtatttctgcaaagtaaagatgaagttatcattcagaatacgattcagctcagagtaggtctgtgcgtcgcttgaatgctgacgagtaaacgccaatgcaagctgacctttgccataaccggtggtgagcggtttcattttattagcaggaatccaaaacacaccgtatgttacacagtttgaacgaagggtacgacccaactgagaacgccccgaacggatatgagaaagaacactttcaaatcctgcctttgaacgctgtttagctacaaagaaacgagcagatgcaccgatataacctgctttgccatcattgagcatcaggaaataaaatccttcacgctcagtaatttcacgagatggagcacctgctgcccaatcaccgttacgaatagaaccgatcagttctgcaccagcgttatcgagatcagcaaaagtcataatattacgcatgttaatttcctcagttgattaaagtttattctccgatgaggggccgaagccccttctactaccaaaaatatactactgccgttacaccaccaacccaaaacacaagaagacctaaagcaagcagacgatacacgatgtgtcgtttcatttttgaccttcccatacggtttctactaaggatttaaggccatcagtttgaataatatcaatcgcattaatggcaaaataaattccgaatccgaacacggcgacaattccaagcgctaccgcaacgataaaggacagaacaacggttctcattaagttaaagcgacgatcaaaactactacgaatcattatattttcctcagatgaaagcattaatccaaacgttaactaaatcccatgcgaaaacaccaatgaaagtaacgataagacagaatactacaaaggtgttcttcaaaatcgtaagtaactttttcattttgttctccagtttagctaacaagattatagtatcactgaagaccaagaaagtaaacaactttttaaaaatttgtgatgaatacttctactgtactgcctttgccctttatctggtatgagttgaatgtgtattttttgtccaaaaaatgaacattatacttagatgcccatttctttaacatatcgttggtttttccttgatgctcaaacacattactcattccaaactttagacctttggagtggcaatcgtccagaaaatcatacagcctctgctcttctgtttcagaccaaaatttattataatctgctacagtaattaggtacggtgggtctgcatagataaaatcaccgtcattaagttcaacatctgtaaaatgcttactgctaaattcaattttatctgaattttccaagaaatgcaaaaatttctttttgctatttttattaacttcgcgtcttccaaacggtgcagtaaatcttccattggaaatgcgtatcatattgctaaagctgtaatattgaagaactaacaacaataacgggtcgtgtgatgtgttgtagtcatcgcgtagtttataataagctgcctcatgctctgggtgtttaccgagatttctttcagtaatgatattcattacatcatcccacgtgcatgatttcattttgatgtacatgtcaatgatttctttctgaatatcgttgcttaaaacaggtccagtaacattcaacgatacagatagcccaccacaaaacagatcaacaaatcttgtgtattcgggaaaaagcggaagcaaatctttcataagtctctgcttatttcccgtgtatgaaattgctcctaacataaggttttaagtacctctttaaagtataaatttaatgattcatcaggttcagatattaacaatactaaaatattatgattaatagcaaaatcattaaatcgcgatacaacttttgaattttcggtaaatttttcttttttcttccaattatcgttgtattcaatatttggaagaaaatctgccacgattaaagaaaacgggtcggtgttatttgtaacttcaaccaaatgtggcttgtcttctaaatgaattgcaacagaatctattgcagttcctccagctatttgatgtttaatctcaataacgtggatttttcctgtttcggtattttctatagcaatatcatatttgcgttttctgctgcttactttaaacgcagaacaaatcaaacgagaagattgaggttttactccaataacagtctcaaactgataatgaactacatattttgaatcagcaaagaactttttggcttcttctaaaatatattcttctgctaacttacctaaatcatagttgcggcgggcaagtttagcagatactaatttttctacgatattgttcatgtttactccggttcagtttgtaaggccatagtatcatggccaatcccggaagtaaacaactttttaaaatttgtgcatgatatacccgccagctccaactcgtgaaggttttactacttccatgaggtgatcgataccgccggcaaacattggtgtgtaccgtatgacattctgggacacttcttctgcaacgaatataattatacagtctgcgactttatgtttaaacatgggccctagatttattccacttccatctgggaatggaccgtctttaccagtcgtaacattaatccatggcttatgatttgctcggtcatgaacaaagtgtgttttaacttcaactctaacaccttggtagtgtggatgagctaatacgtcccatgcccattcgtatggatcgttgttattatggtcaacaacttgattgttcacgtatccatcgagaaaatctgctaccacatactctgccggtatagcaattctgcatcgtttaagaacgtcaattctatcttgagatggatcgatatctaagctatatctagcagtatcaatgatttttacttttgcttcaccccttagcttattcaaatctagggtaaatgtccggagttggttcaatctctgcagggctttgttcatcaatgccataaattcctctgatatgtaattcaccaaaataaacacgatcgtcgtggttacatgtgtctggttccacaacaaagtcatcaccaagttctacgagttcatcacaatgcaaccaagcatagtgaacatcaccttcatgtttaactacatgatggcaaaacactgtagcagcatgatgagtaccacgaagattaacaactttagaatgagatacgttaaatggattaatcatgtttcacccataataaaagaggagcccgaaggctccttataattagcgaagttctgaaccccaacgatcagttacatcttctaatactacgtaaccacatgtacgcattttagcatcgttgtaatcaaccgggatagatactacatcacgcggatgaactttaactgaaacaatacggtcagaaccactaccgaagtgaccgatgtaagatttagagcagacatgcagacctgcggaacaagtacgctgatcgtcttcatctacctggttacgcggcattgtaacagttttaccaggagagttatcaaacgtgtttgaagcacaatccatataagtggaacgaactactttccaaccaatgaagtgaccatcatcagtgatgtcgatatcgtttgcattcaggaaatcaaacagacgataaactgcacgacgagacgggttcagcatcaggttttccaggaaaggcagataacgtttaaagtcttcgccatcttccatagctcgaacgatacgctcagtcagaccagatttcagctcgatatctttatagaacaaagtgccatcttcaattcggacgttaccctgaacgaattttttgatgccttgttccaggttaatgtggccaatagcaccagcgatatcaccatctacaagtttctgcaatgcagatttaaatccaggatgttggctatcagcattataagtagtacggccttcagtaattgaaatgaatttggaacttgctgcccatttaaattcacgctcaactggagcttctactttagcaggaacagctgccgcggcagctcgagcttcacgctctttaaacacacgccgaatggtgtcacgggaaacaccataattctcggcgagctctttcttagtgtacagaccgtttttgaagtttttaacgattgcatctttttggatttcagacagacaggtaacagccatttattcacctttattttcagaattttgagtagaagctccatcaaggagctccatgatttttacgatatcatcgacgagtttgctgtcagtccgccaagtatccaagacacttgcgatgacaggataatcatctttaaactgttcaatctttttatagaagattgtctcagcatcaccagatagtttattataaattttattacataaagctaaatcatcagtttcatctttgattttactggtacggcaaaccttagcgattttgtttaattttgtcaggaacggatttttcattccagacgctgtaaacttactcgacaagaaattcaatttatcgtaatgcgcaatatttccacagatacgatttccagtagcatttgatggcatgtactggtcataatctaccttatcaatacacttgatgtattggtcgataataaatcggtcaaatgaaagcaatccatcagcttttgccgcggctttcatagcacccggacgaattgcatagaatttcttaattccgcacgcttctgccagagaccgcatgctcgcgatgttcatattccaccaccaaacattatctgggaaagtgtggatttcatcacgattacgaccgattgcataaccttcaagctcagcaatttcagatgatactaaagtctgacggtcttcttcccaatacccgtctttatcaatccaatgtaatgacacattaggagatttcggacgtttctcttttggaccagtgtcataatcaggaagagcttttctctgggcttcaagttcagacacacggaatactacaacttcatcagtatccatgattttcttcagctcatcaatgacatgcaattcatcttcattgtctttgattacggtaatgtgtgcccagattggaactaatccagatttacacagggctcgaacagtagcaatacgcttgcctgctttatcgtcaataagaacgaacgctttagttctatcaaccccgcaaatatcagaaatgtttacttggttatgacgatgccaagaactgcttgacactttacgacgagcaggttcatcacatgaaacataaactgatacttcgttatcaacataatatgaacgaattttatcaagattatacttcgcaactacctgtttaatatcgcggttcccaatggtaataccacggctctgaagaatagagcgttccttagaactcagcttattgaactcgcgcaggaattcacgatcagattcatacgcttcaaacgctttaatatctgcagtaattacctcttcttcaagagcattcacgcgcttctggatattggcaattgtttcttcatcaagagaaagctcttcacgagatggagtaatgtctaattcgccaagagggaaatgaacataaaccttgccataacgattaagcagccaatctgccttaacatctacaccgctaatcggatatacgatttttccataaactgcatacagaccataactttcatacgaactattaacgctaaaccagtcagtcttatctactgggaaatattcaatttcacggcgaagagaatctacctttggaggtacagcaccaaaggtacgcaaaatatatgcgatttcataatgccaagtatcaatatcttctactttaaccggaactgtaatttcaagaccagtttcttcgtcttctttcatatcatcaacgaacattggacgaatagtaggttcacctcggtttttcatgacagtataaccggtggctttaccattatgatatgatactacgttaaatgtactcgtgtagctcagtggagatttagaaccaagaccaagagcaccgatgaaatcattactgttattctttgtggattcaaagaacgttttgtacatcgtcatcatgtcattatgattaagacctgggccataatcacgaattacaaagcgcgggtcaagacgagtaggagccttgatataaaatggacgattttcattgccgttcaatttatgagcatcatcgcagttagtagaaagttcacgaacaacggcacggactttatacttataaagtttatttgacaaaatgtcaaaagctttacctgaagctttaatggtaaacgttgaatcgtcagcgtcagaagaaccaataattacttcatcatcacatttaattttcattttattcctatcaattgtgtcgtttaatgatttctgctacttcaagtaactcttcagcagtagcggtgttagttgtaaaaattttattatggatttctttgaagcgttctttgaattcctcagctgcttggatgtcaaagaaccgctggatgatacgatattcacgatatatagcatcgttgaataattcttctgatgggatgtaactacgtttcataatattttcctcagtgatttaggggaaattatatcactataactttaagcaagaatcctagaatcatctccaagcacttcttgattaaagccatataaatccattcttataaagaaaaagggacccggaggtcccttagattaccacaccctactaactcgaccataaacctcatgtttagaaccatcaatgttttccacccagatagtaacccaagttccgggcagaggtttcttttcagcgaacagatatccatagtcgcctgagatcaaagtaatccaataacgttgcatgttaattccttctaagtaagggcaatagtacccttactatttattctttattcactcatccatgtcttacgtggtgcagcatcattacccataattaattcaaacagttctttccagttttcaggaagagtgactacatcataaaccgggtcttgaataacacgttcatattcatcttcttcaagagaaccaagacctttaatataacgaagtttccaacctttgaaatcatctttatggtcttcatattcaccaagagaatagaaccaacgttgttctttacctttggtaagaataataaccggagttttcacaaagcggattcggccttgttcaaacagctcaggccaattactgaaaaacgctaaaagacttgggaaaattgaaccaacaccatcaacatccgcatcggtcatgatagcaatatttcggtagttagtattttcagcgggttcaccgatagtcaaaccagtgattgcacaaatgtcaaatacttccttgttcttcatagcatctgctgcagacattccccatgtattcatgaacttaccacgtagaggatatccaccatgaagttcacggtcacgggttgtgagcagataaccaatcgcagaatcaccctcggttaagaataaagtggtgtcagcatctttaccatatttgttggctttgatgtgcttagctactttggctttctgtgcctttttagcagctttagtttctgcagctttctctgcagcaagtttacgagctaacattgcctcaataataggcatatgaatatcttctgatttcataatagcgttagcaagcttcttgtaatcaatatcaatatgactacgaatttcgccccacggagaagttagacgctctttagtctgagaatcaaatcgcatgttagacatatcacgaataaacatgataacagtcaagcattctttaattcgggctttgttgacttcaagcttgtacttgcgtttcaatgcaggaataagctcattgctgagttcatcaagaactaaatcaacgtgcgtgccaccgtttttggtgtgaatgttattaacatatgaaagttggcggaacccatcatctgagcggccaatagcaatagcacatgtatcagaatcctgcactacagcgttttcatcatacatgtgggcataagctttaaacttgccctgaactcgtttacccatgaatttaaattcaatgtcaggataaactacagctaacgtcatcagacggtcatgaatgatggattggtcaacatcagttaagccatcagattcaaagtgggtgaaatctgggataaatgacacgacagtaccagtcttgtctttaataaattctttatctttagctggatgttcttcccaagaaacattctctgcgccatttgaacagcggacaacgatttcattttttccatcacaggttgcacccacaaatgtcacagaaaaaatattcgttaacgcagaaccgacaccgttcataccaccagttttacgctcagaatcatcaccaaagttaccacccgcacgaggacgagtccatgcagctactggtcctggaatagtttctccttcaggtgttactacaggagcctgcggaagaccacgaccattatctgttacaataattttgttgcctttaacatcaactgaaatcttattcgcgtgtttgaaattagtacgaatagcttcatcaacagagttatcaatgatttcatcaatcagtttgataataccaggaacatactttactgattggaatttaccaaaaagaaaacggtcatgcgcttcaaacgcagaactaccaatgtacattccgctgcgcttaatgatatgttctcggtcactcagaattttaatttcgttcttaatcattacatttcctcggttagtgaaggaattatatcaactattaattatagcaagtaattcttctttgatatacatcaatttaccaagaacctcatggcctcctttaaccgctttatactcgggatatcggggccgctgtcgttcaaacatagtccattgagcatcactaacgttagcgtatgcatatcgagaatttccgtagtattgttcaatccggtactcgttattttcattaagtgaaatccattcttcacagacttcataatatttctgcatccaaatagtacggccattcacgtcattgattggccaccaagcaaacctatattttccaatagcccgctctaccatttttaactgtcgtttagcacgcctttgcgcagttgtcattccaataatcataatattctcctctggccaacaagactataataccaaaacacgatgtccatgtaaacaactaaatgacccgaaggtcatttattcataacgaattgtgctgttcttaagaaaaagccctgagcacactgttccgttaacaggttttcctgttggtccaatagccgtaaagcctgtgtgctgaaaatcatcctctgagcaagaaaagaacttatatccggtgattttgatatcagtaaatcccgcgttatctaacacgcgagttgcgttatcagcgtcagtgcatccaatcatcatgaaggcaagcgctgtaattaaaatctttttcattttaattttaatttaaccctataagttatattacctactttaataacccggatttctccgggtttcatggtaatgcgtgctttagttcccatcaataatcaccactctttaatccatcgtagtgaactgccggagcagaaactactcgcttcatttgaccttcacacttagggttaaagcagttaacagtatagtcacgatgggaaattttacgcataatttctatcttttttccacagacttcacacttgtaatcatacattggcattaacagcatccttccatttttgtgttttgaccatgatttgctcatttagtgcacgagtaaccatcatggagatttcatcatctgatacatgggtatcatttttatgacgatttctgaaatgaagccaaagtgcatctactacacagttaataacatctgcgcactcgccttcaaattcttctttctgccgccatggacgattaatccaatcacacatttctccagtttctgaagaaagttgcagcatgacattcccaatgctacggttaggaataggataagacagttttgatgcttcaaaaataggagctaaatttaacattgatatgcactctgcagtgctgcaatagcagcgattgcttgaccacggttatgaatagaaagattcataaccaaatcggttggaattacattcgcggaagttccaacttcagtaaagtatttgaattcactatcaaaaattacaaggtcttcaccgccgacttcatcacattctgtgccattagcccacataattcccgatactctattattttggtggtcaactttagtaacagtaaaactcccaccattttcatagagttcatacacaaagtcttcattaacctcatagcgtgaagaaaattcttcttcagcttcatcattgacgaatttgtactgtacgccttctttaaaattcattacacaatctccatgtattctgggccatcaactgtgattacacgagcaaaggtacgaactgggacgatatcaccgtgattcgcgaatacatacaaccaagtccagtgctcttctttaccgaaggttttctctttctgaacgacgattaagtccgggttgaacagaatgtcttcaaaagcttcggcagtaatttttacggtattttcagttttcatgttattctcctcagtagttgataagataatagtaccacatccttgtggcaaagtaaacaactttttatactaaaccttgacgctgtgattctgtcggctctacatcagctttaggcagaactgcatagttgccttgaaacactacgtttactaaggttttaccgtcttcttcccactcatcagtgacaagaacatttttatgcagcgacagattagtggctgaattagtagaactcaccgattgggtaataacattgtcaagtgaattcacatgtacccacttgcgcagatagctttcgttaaacatagaatcaagcaaatcgcgcgattctagagcaactacgaatttttgcagcgaatacacggctttgtcttcattttccaattgaagcaaatatgaagacattttgttagaacggttaaagattccaacaattacgccttctttaccgatatgcttaccaccaattactttaacgttttcgcctacaaccaaatttttcatcgtgtttctctcagtttgttaatgtagagccattatataatggctctttcataaagtaaatagttatcggtgagaaatttcacatccaacatcgacgccgaacagatacccagcttcccaccctttagccatcatagccttggccaccagaaccatcgttggagagattttcgggaggatttcccggttgaaccactcttcaaagttttcatcgaactcaaactcttccattagccacgccccttaggtaaactcagtggatcggtatcttctggacttggtgcttcgcttaggcctagagcataacgttgagcatatttaagcattaaaatatccttagcgcagtcatggatactatcatgcgcgataaacccgtcgagcgtaccctttggaagaggagtagttgtcagcccacgagtcagaagcagcgattcaattgcagtacgaatatcacgttgattccagaacttgcacggttcttctttaaatgtatcaatttcttcttcggaaattccttgggctcgttgaacatcgcgaagacaatcaacaaaaatcggaaagtcaaagctctgcccacggcaccaaccaaaggaatcccatggatgaattccattatcaatcagatattgctgagcttctttaattccagcaattactgataaatcgtctggcgttgaggccaggttagcacgggcctcagctgattgtttcttccaccactcaagagtagacttaccaaacaaccgatgacctttctgggatttaaggtcaaacttgatgcgatgaccgcgtttaaccaattcatcgaagctttccagaacttcagggtcagaatcaaaggtgattagagcaaggtcaatcacagaagagcttgacacatttccgaatgtttcaaaatcaataataaagtctttagccattttgagcctctagcataaatttaatttcgcgtaactggcaaccaatatattcgctcagatacacctttgggtcatatcctgtgaaccaagtaatagcattagcattatctgctatatcacgaagctcattcagaactgtatcaattttaatgttaatagcacgcttaacattatctggtgcttcaaacttagattcttgtaagccaacaatcattgtttgaaggtcttctaatttcaattcaaacatattacctcacacataaaatacatcatatcgacctcgggtagtaccaacatataataactgctgcgcgagagaagcatctgccatgtgaatgcatggagtataaatgaagcttctgtcaattgaaataccctgggccttatggaaagtcgaagctggtaatgctttcactttatgaaacttacgcttagcatcccagaactcagaccaaggagctttgcctcctttattccaattcttatatgtatctgcagtttttgccaagaagaattgaaacttattcatttcttcttcggatgagatgacacagattttctctctagcgtactcttcatcgtcgccataggtttcaatatctaatacccaatgacgaaccagatattcacccggaacacctctggcacccaaaaatgatgtggtttcaactgcatctaatatgcgaacaaactgaccattattgaaaagaatttcgctgaatttctttccttcaaatttaagttccttggtaagaggttcttgcataacaacaatctcgcctactacgaatggtcgttcagtttcgtatattcttcgtctgattatttcattcaatttatccacagatttattagtgaacgcaagcattcggttttcaaataaatcttctggtgttttaactaaattaaaataatttagcataaaatctttaagggcggttcctttagtaaaaccacggacgccatgaccatcaactacacagtcacgaatccacccaccgtttctgatttcagtagcaacttcaatgattggagcattacttcgcatcacttcggtcaaatgaagctgtaagaaatctttatgagtgaagaatggactcagtgcaggttcattacttccaggttctaccggacgtatttgagccttatcaccaatggcaatgacaatacaccaggcaggaatagttgccatcaaaatcttaaacagcttacggtcatacattgaagcttcatcgcagatgagaactcgaatagacgccatatccggaactttcttttgttcaaacagaacgttttcttcatatgtcgtcgggttaattttcagaagactatgaatagtactggcctgcattccgctgagcttagataaaacctttttggccccatgtgtaggtgctgccagcgcgatgccagagataccctgagaaatcaaagcgtcaatgataaatttggttaaagttgttttacctgtaccggcaggtccattaatcgtaatatgttgacctttagctccttgtttgaccatttcaatgactttattaaaaatcgctttttgactttcttttaattggtcaaacgtaatcatgccacttttaccctcactacatgtagatttttaatttttgctttgagtttttcacgctcaacatcgctaagtggttcatacactagctcagttgttttccaccaaagcattcctttggttttgcttttcccagtaaaattaccttttgctaatttgtctgttaaaaccgacattgtacgaatccgtgctttattggctgattcttcattagtgaagactacacatcgttctccatcatacatatcagttgtgactggatggtcaaatccgtctttatccttatacgctactacatatccatagtgttgcattacattttacctctcaaaagttggaagaaggacgcagtcaatggaagaccttttttcaattttaacttatctaacattgagcattcttctaaccgacgaagtgagttaacaattaaccgtattgattgtacacggatttcagcatctgacggacgattcggaactgatgctaaaatagcagataacttacgctcaactttagctaattcagacttaccaccactgatacgagttctcaatgcattaataagttctaaatcagccgaggttgcagttccgttcttttccttttttacaaattgagaaagatgattttcgcgattacgcaagttggttttaattgatgcgatagttttttcatactcgctaatcttttccaagcgagaagcttctttatcacttgtaggtttaacagaatcagaagagcgaactatgcgtgccgcaatttcattcgcttttcgctcaagtccttcaatcgtattatttccacgtaaggtattatacttttgcttgacaggaataacattccccattacatatcccaaatcgttattccagcgttcaagcgtcatgctgtcaggatggtttcctttgacggttccaaacttttcgcctgagtatgcgcaatgtgtctgctgcatgatgttaaacagatattctggggtgagattgaactccttgtgccgacgttgagcagaacctaaagttgtaattaaacgagtataaactttagcggtttcagcagtaaatttcatcatgttttcctcaaaaatgctttcgtcttacggacggtataatgggtctaggtccctagttctagataatcactagttaactaagctatagtaacactaaagtagtccataagtaaaccagatttttcaactttgttatgacccaccactttgaacttagttcccatcggtagcatcctttcttgttctttatcaatcatctcgatgtcagcgcttctgcgctgagcaatgttatcaatcacatcatttggtcgcatgaattcagaatctggtgcagtaattaaaagcgatttcatgttggtatgataatcaaacgattgctgacaattattgacttcaatgactacaaaggtcgagtaatgccatttgcctgcaaactctcgggcgatcgtttcatctgttgtgaatgacgccacctttccaaagtcaaattgctctcctttaataagagcttcataaaaggctttagcctcacggcatgatagacctctatagagagtgtctctgttatcaatttgatggcgcctaacgatagagtcaagtttcttatgaaattcttcgccaatcttattgttcatgcactgccacagaattgactgttctttgcagtcaaaacgattggctaatgcttcccatacgcttaaatcatataaaggtaatcctttgctttctcgcgcgaagttaagaacatcaatggaacgaatgggttcttcgataggaataacctttgataattttactgaaatagatgggtttaatgaaatagccatgatattctccattttggttacgagaggtatcatatcatggcgttttagaagagtaaactactttgtgaaattattttgcccacggagaccagggcggcgggtcagaccagattgaagctagttcatctagaagagcttctggggctttaataccatacttctgtataattatacggtattcgtctttgatgtccttagaaatcactggatgaacttgaacctcttcctgaggctcttccatcatttcaaacaaatccatcacatgaaccactcagtattgcgatacagacaaccactgttgttatatccatcagccgctttttgcaacagcgggcttggagaaagtttgataaaatctgcgcccatatataaccaaactaacttagtgaattctattagagaatctgtgctatcaatgataatctttttgcctcttgaaattatgtcattttcgtattcatataagctagtttcatgacatacattggtgtatcctttcaagtggagagcatgtagtatagcaacaggacttcctggaactgtatctacgtcaaagacatgggcagtcttaataattccataatcttcagaaggacgccaaccaaacgcctcgaatttattaactaagtctttgaaatctttgtcgaacgtactgtatagagcaacagtaaaaattctatcttggtctagacgcaaaactccatttgcatcacttcttgattgaacattacgttgtaagcttactttatagatttttgcgttgaacacacatagctccttcagtcatgttgttgtcttcaaaccacttatcatttgctttaattaaagcaggcgcagcttttagtaataacgctgcggctcttacacctctgtaccaacaatcaaaatgagacttctttaatggtgattgataccagggcttagtataacatatcattttcttctcctcagttagtaggaataatatactattcccaatatagcataaaaggactcccggaggagtccttaatttttatacttctgcactagcttcaaacattttagcgttggtggttgcccaagttgcagcatcatcaactactgttgaataagcagctttttcagatgggaaaatctgatactgcgcattagcaatacggtgcgaatcagaatataccatataccttaaaagctacagatacttcagtacctttaatttcgccatcagcagtggtatggtcaaaagttttgatatttacgtaagccattttaatctcctattagtttacaggagtatttatattccattttcaaatctctttatcatgtttatataattttcatcaggataacctaggctaactgctagctttctaaaattgacatatttaggtttgttgttattaatccataattctctaagctctttttcataattccatttaagctgatttctacgtgcagttttgcttaaaatttttcctttagcttttaaagctttttcagatgactgttttaatttttgaatatttaaaacttcttctatagataaattattttcctttgaatatcttatgcaaaaatcttttactgcggctattaggcaatttttgtgagtacctaaaatttctggattattttcttcaactaaaattccccaatatcttcggtagcgaggcatatcccttgaaatccagtcattataccaaaaatcaaagttggaatacatgaaagattttcttttgcgaagagtatcttggtttatccattgctcacgtttatcagcccataacttaatagtaaagtctttctctaatccagaaagcttcttaaattgtgagctatttactgaggtcattctctggaatgcattcagcaatccaaatcttccagttgaacataagagatagtgaacatatatgtgttgatatattgggagatatactctattccaaggatatattttaaaatcactatactcaggaaatgcgcatttaggaagtatatgatgggcttctgtcttagatttgatgtgagagtttaacttatacttatctataacttttaagtactcatctaaaagttcccattgcgggaacttttctttaagagcagatttgaaattaatatccattatcttgacgttcaaaattatgtttgtttttcagataatacagcttaaagatttcttcagaatccagaccaagcgccataaacatattcagaacaaagtgcaggatatcaatcatttcaaatttgatttcaagctggtctttatcagacaggtctttgatataagtttcctgcatcttgacgtggtcagctttccatggtttccacacagcactagctgccttttcaccattactcataccgccaagagatgtcagaagttcgcggaattcgtcatcaatgtaatctttttggttacgcagccactgcacgatatcaccggcttgagccaattcatcaggatgcatgttagtaccaggcttgtcatttgcaagacgaacctgaagagatttttgcatatcaagcattacttgcagagggtcaccaccaactttgcgtacgatacctgcgtatcgagcttcagctttatctgcaccagcgatcagttgactacattcgttgaaatgtggcatgttatttttcctttcaattaaattagataaatattatatcacttaacataaatagcaggaggattcatgtctgaagtgaaacaagaatgtaaagacaagggaggatttggaagatatctttacgtcggaatcgccactgctgctttagctgcatggaattatgtggtagttccattagctagcacacacgggctagttcttcctccaatgccgttagaaaaagttgtgtcgtttattatgactggaggattgctttaatttaaggggctttggcccctatatcttcgcatatttgtcaagacgcaatttagccattaaaccttgtgatatattttgattaatataacatgttatttcagaagcagttgctccttctttcataatcatatcatttatatctttgcttttccaaggcgacttatcccagaaaactaccctttcacccgcgtctactaaacgcttcatacgcttaatcgtatcaggatggcgaggttcatggtccataatccacgctcggttatcatgacatggaacttgagctaaatctaaagacccaccggtaattgcaatagcattatcaatgaacaacgaatctattggtccttccatgacgaatacgagttttgactcatcaatagtgtcgagaccataaattttggtcgcgtgttcatgggctttgattgtgatgtatttttgtggagcattctttcgtagtgctcgtccttgaaacgactcaatctctcctttcttgttgaagataggaataaccaaacgtggttcgttcgtctcattcttataggttcctggattaacggagttaacaagagaaggccattggttagtaaaccataaccttttccaagaagtgcttggaatacatctggcagtcacatatttaactatcggatgttccttcggaagtctatctaatcgctcgcagaaattaagtttttctattacggggagttttgcattaattttctcagacggttctacagcctttggcttatcaaagacttgctcctttcttttctcaagaagatactctcgatagaggtcgggttcattatctttaagatactgcgataaccacttgttatactcacagttgaagcaatgacagcgtaatccttgacctgcatcaaaaatccagaatcgggctttattgatatctttctgtgagtcaccgcaaattgggcaacggcagtttaacttgaatgttgaagatgtagtaacgtgtctaaatttaggtaggtgagatattgcacgaattgcatactcgttatcaacccaagacataatatttcctctggccttaaactaataaggccattttatcactttttcttggcagcgtctttatccgcttttcgtttctttggaagggtttcgggtcctttattgacgatgtccccggaagtggtacctgatgcaatattctgtggattgccgccagcatcacctgcgaccatctcggtaacaaactctttgtatgttttcatagagcctcctactatttattcatgcgtaatacgtaagcatttataagtaggatacagagtcggagacattgattttggattgtctttgataagcataaactgcttgcctgtatcttcacacttttgcttaattactgcttcatctttacctgtgaatgccatcttttcaatagacattccgcctgagcctgttgataacgccattactaaaacgtatgtaatcatcctaaaatccacttaacaatgttgaagttatcaaactgagcatcacagtaaagaacatagttcagcttaagtgctgcgccgtcgtctttaagttctgcttgcacttctgattgtttacttgggtctacgttttccacaatatgaccaacatctgcacgaatctgctgagctacttcagactcaacagcagtcattgaccactcacacaagtctttgtcatagttggccatagcaggaactgcagagcagcttgatacggcgaatactaaagcaagtacaatctttttcattttgctttcctcttctcaatttgtttcagtaaggccatagtatcatggcctttgaagaaagtaaactaccttttgaacaattttttcaacaaaatgtcagaggtcagattcttggtaggtaggtatgtagcagagttaacccagatgccatcgctgttatacaccttgacctctccatagtcgcatacagataggtctgctttgttatatgcctcaatgcctcgatgaatggtatctgtggctgttacaacaaaagagtgacctgactggtcacggaccgcgctaaacacaaaaatcataaaatttacctagaatttcaactcttctgccagagcatcaagcttagaacgtgatactcgttcttgacgattagattcggctacacggttctgtgcacctgcactttctcggacggtattggttggattaggcttagttgggtcgttttgcttctcaatttctacccagcgttgattagccttatgcacgcccataaagaacttattgttgatgttcttatcgccataacgtgatttaatctgcttaattaactgttgcttcatctgagcaagttcaggggtttcaatcacagccagcataaagtctgccgtagcaggtagacccgcagattctgcaatatcactcatgtccatatcagaagcatcccaagccgaacgaccgacctgagctgcggtccaaagaacagtttcagattctacagccaatgcgcgaagttcttctgcaatagctttaactaaagtgtaactgttttcagtatattgacgaatacggcaagaagcacaaataccaagatagtcaatgatgataacagtcggtttaaagttcttcttgagtttcaactcattcagaagagctcggaatgtattagcgttagcaccgccagtcggatactgtttaatgattaaacgaccaagagtactagaactacgccatttttccattttgcctttatattcggcgtatgatacacagccatcatcaatatcgtcaagtgatacatcaagcaaattagcatcaatacgtttagcacaaacttcttcagccatttccatggaaatataaaggacattatgccccatctgaagatagtctgcagccaatgaacacaatcctaatgatttaccaacgttgacgccagccatcaatacgttcagtgtaccagtctcggcaccacctttagtaattttgttcagaatgctaagtttaaacggaactttacgagctttattctggtatgataaccaacgagcttcataatcttccatccaatcatgaccaatatagctatcaaacgatactgataacgcttcgcgcatgatatcaggaatagctcccatatcaggaagacgcttatctcgcttatttggctcaagctgggcattagcctgaatttcaataattcgagacgttgcgttatacatagccttttcttgaacgtacttttcagtttccttaactaaccaattcaaatcttcgggagcatcagataacttatcaataagtttctttgcgccttcatgttccgtttcagttatagacgaattatccagtgctacacataacgcagtctttgaaggaattgctgtgtattcattaacgtgtttcttaattatgttaaacaccgtttgagcaggtccttgctcgaagtactctttgtccatatatggccaaaccttcgtaaagaaagcctggttgtaaatcagattagctaagattgtttctaccactttaacctcttaaaagattttccataatgattttttcttggtctttaatgcactctggatttgttgtttaacacaagcttccacatgaggataaagttcatccttatgagcttcagatggagtactaaactcaatagttacttcccccgaaggagaaatatttaatttatgaacataaaccaagtgtgattgaccatttaattttatcacaatttcttggataacagtcttcatagcttcttggattatttcatggcttttcttgaacactcgttcttgacgctcgaagtctccctcttccgagggagattcttgttcaaatttctcgagttcagattctaaatcaaactcagtcttcattcatgaagttctctaattcatcttcaacttcagcagctgatactgaaccactctcaggaagtttaacaccatcaaccttagttgaaacttttgagttaatcatttctgctaccgcttcatcaaccgcagcgtttgaatcaatagcacccaactgataacgggctttgatagcgtcacggaatggctcatgcttaaacagaggaccccaaaattccgtactgctcgtatcttttgcccgccaggatttttcttcacgaatcatctcaccggtttcaacatccaggaattctcgtgcgtaccatccatttttcggtttaacaacaaatccgatatccagagccatatcaagcagaccactgtacggatcgataccaccatcgaatttaacatcaatgaagaacttacttttctctttgacagtacgtgatttctcggcgttcaggacaaactgatatccttcaagctcagtaccatctttaatttgacgtttaccgatgatgaacacagtatccgcagaatacataggacctgtaccaccagtcattaccgtcttactgaacatctcgatagtctcgattgtgtggttaaccgcgacacaaggaatgttcttaatagagaagtaaggagttacgatacggaagagagacttcagacttttcgcacgagtcatatctgcgacagatttctcgttcagagcatcttcggtttcctttttagacgccatgttaccaatagagtcgataaacacgatgactttttcaccacgctcaatagcttcaagctggttaaccatatcgatttttaattgttcaaccgactgaaccggtgtatgaattacacggtcagggtcaacacccatagatttcagataagctggagtgataccaaattctgaatcatagaacaagcagactgcatcaggatacttattaagataagcactaaccattgtcagagacatgttagatttgaagtgtttagatggacctgcgaagatagtcaacccggactgcataccaccatccaacgctccactgattgcgatattaagcatcggaattttagttctaactacatctttctcgttaaagaattttgatttagtcagttctgctgtcattttagaagtggatgctttaatcaggcgagattttaagtcagacattcattatattccataagtctccattatatttttctcacaggttaaaggatagagtaattatattactttgttcttgaagctattaacagaagttccatttcttcttggtgttataaaccactgtttccatatctatttcatagtgtattttacatccaacgcacatgccatgccaccagcaatgcattccatctgagccagtagttccttcatgaacaaactcatcagatttacatacgaagcatctgaattcttcagccttgaatatgttaccagctacatcagatttatcatagatgttcataagaggtccttggagggctttcgccctcacagatatggttctaccttaccaaattcatggaaggcctgagatttcactcgagtgttaatacacatacgaattgatttcagaggttcgttatcaccgaataaaccacgtctttcaccgtctttagatttccaacgggcttgatttgggaaagcagcatgtagttgttcaagggctctattctgacgagcagtatcacgttgtgtagaacaaccaccaggagactgcaccttaccagatttaacgaggtacttaaacagagccaggtgaggatgacccatgttaattaattttagaaaagcataagcatcttcgttaaggtcaataattccgtaaccaatatcttctgctgtaagtttagtcaaatcatagaaagtattggtgaacccaaaactattctcgcgataatgaccccagcttgatgtgattttgaaaatcggcaagcgagcatgaccgtgataataaccacaatccatagcagtctcgacgtatttgaccatatcatcaaatacctcttgactcattgcctcgccgacaccaagcggaactcggcgatcgtcgcgttcacgaatttcagtcagatgaatggtcgtatcgtcatcaagcatccaaattcgttgtcctacatacatttcagtaatcagacgacgagttcctgcaattccatcgacatcatcgggcacagtaacgattttagcagcatgaccgtgccaagtttcgtatgcttctttttctgattcacgtactacaagatgtggaacataaccttcaggaaacatagtcagggcagtaactgccccggcgcgcttataacttggaattacaaactgaatcatttccatttacctttataatctttctttgcaatatgagtttcacccgtgtgagcataattatctacgagatagaaatgtcgagaatatacgtgcaaagacccgacgttccaaataatgtcgccaactgaataatttttacctgatgcattcagaagtttggttaactgttccagaacatagagctgccacgcatagtcattacgatatccaaagacgacatcgttagagcgcatgtttacaacagcatgaactttattatcacgaatcagatactgaacattgttagtacacatgaaatcactcatgccatcgcgctcaaaatcatactgcatttgaggtcgtgtataaatcataattccgcggcgagaatcaggattgctgataagttcttttgcacagttagcaaactgtgaatagttttgtgatgaccaaactgcccagccatagttagaattaatctcaccatgcttggatgcaattgctttccaaatagctggggtttcacctggaatatctttaacgaataaactttgagatttataccactcaagttcccgagcaatatatccatcattaactgcgccaaaaattaggttttcatctgcaataaatgatgcacctacgatttcaatagtcttcacacccgtcttatcaatcacaaattctttgttgagcaaagcatcagcgaattcttgacggatatcttgtactgtcattggagttacaatcatgagacctcttatttaacttgctggataataattgtattctgctgtgcgttagaagcagaccaaatcagcgcaattaaccaaccgataatggaccaaccgaatactagatttgtgataaagattccaccccgtgatttatgcttacgactgcaagctacaaaggtcggcaaaaaatagatgaagaaaagaatgattaaaccaaatactgcttccatgttaatctcctcagttagacatgcatttgttgtagatgtgattttggagagattttaactgctccatacgttgtttatgctcattataactcaatccgccgttagcaaaatcagttaaacgaatctggtcattcactgctgccgcttgagcagtacacgtacgttctttttgagttttacgcagacgcttaatttcttccagctcatgcttattctgctcaatcatgtcgagttccatcgcagatagctgacgattaggattagctttttctttcgccaaccgacgctcaaccgcgagcgattcagcagagacctggttgctagcacgatagtatcctacagtaccgccaattgctcgcacctgtccaacagaagaagccgggacgatatcaccttgtggcatttgacaaccagtcagcgtgagagcaacaataacagcaagtaacgatttcattgtaatctcctcagtatgttatttcgagaaccatggtaccacatccttgtggcaaagtaaacaacttttttaaaaatcgaacatgtcaagaagagacgatttctcttcatagtctaaccctgctgcttcagacatacccgacagaggtttaacgaacgatttttggaacagaacactgtggtcaagccacactagaacttcctgtcggatttcttgtggcagctcagtgcccgatggccatgccatgcatttctcaccgtacgggttaccttcacgcagcgggatgaccatcaccttctcaccttccatgattggtgttataccttcaaatcctgcggttgctcggttatacgctaaagcacctttaacgtgatatggagtacctttatctggatatcctgcgccatcatcatacttaccgatgttgttggcggtcttaacctctgcgattactttatagtcaagttcacgatactcagactcaaactgcttataatattgctgtaaagattcttcaccttcctgcagcatacgccgaatagattcttccaatgcattctgaacagcagttggcgtagaactttgctgagtttccatacccatgattttcaggtgtggttctgcatatcgagtaccttccatatcatacacgttcagagcatatcgtttcttcgctttccagaatccgccaatgccgtttgaccccaacggaggacaagaaatagcttcacggtccatgaacattaaatgttctttattgttcatgtattcacacatctcacgatatgattggtcaatccaaggttccattttcttcttgccgaattggttcaggaattctaccaaatcgttagtttctttgaaacgctcaagacctactttctcaataaccttatcaacacaaacgtaaattgagtcagtatcaccggctactacaaacgaatgtccttcagtaccgcataccttgttgaggtattcattaactttacgttcaatccattggattgccatttgaccaaacaaggtgattgctgatgcgttacgtaaatcataataacggaagtaaatgttacccaatgcaccataaagggagttgatcagaatcttacggtttaactggttagtgttacccaagatttcagcgtgtttacattcaaacatcagtttgtcaagacactcttcagtatatgtcagcagttctgctttcatatcatcagagaaatcttcatagacattaacttctgcgaatttatcgatagttccaaacttcttatcattcagaacctttttaatcagttcttgatttcgtttggcacccatcattttatttttccactctttacgctggtaaaataccttcgcgatttcaactggaatgacaccatctacatctttacgatacatccaaccattgggtgaacatgaatattcgtcagacggacgcggcgcagtcttgttaatgtactcacccaacggatgaagtttaaactgtccaacgatggtttctggtgaaatattaacttgtcggatgattgacggatacagagatgtcaagtcaaacgacatgatataacgatatgcagcaggaactggttccttaacatacgcaccaggatatgactgtttaacatgagaacgactttgcggaataactttgtcctgttctttcagactgttaaagatgattgcgtcccatgttttaattggactcattacaccttggtatggcatcttcgcataataagacatcgagatagccaggtcaataaatccacgaacagcatcaatcgcttgtactgattcaacgtcgatgatgttatacgaaatataccgttggtggttagtttcacgcaatttattgattggaccgtcatatgctaatttacctttcttggtttcataataagcaatgaaatccaacttatacgtcggttggttcgtgaaactaaacttcttatacaaatccatgtaatcaagaatagtcacacccatgatagaataaatttctttatcaccatacatgtttgtgataatcttagatgaaactttattcagaggagagaatcgtttcatcgtacgctcaccaagaatctgtttcacacgattcatgatgtacggaatatcaaatccttcaatgttccatccagtaaagattgctgggcatttctgttcccaaagattgatgtactcaagcatcatttctttttctgaattgaacggcatatatactacgcggtcaagaatatgttgtggaacttcatcaccgccttcggaatctaaacgagcagcgagtttcttgtcccactcggaaacagagccataaagagaatgcagtaaatcaaatacgtagaacttgtcatcaaccgaatcataatgagtgatagcgtcaatttcatattctgctttcatcgggtctgggaattgagatgcagtaacctcgatgtcacagtttgcaattcggatgaattttttattatagacgatttctgaaccgtaagtatcactgatatacgcgagtttgaaatcatccatacccattgcttccattcccatatcttccatacgacgcatccaatcgcgtgcatctttcatagttgggaatgtattcttcttgcaatacttgccatagatgtctttgtactttgtttcttccatgcaatggctaaacataacaggagaatacggaacacgacgcattcgttcctcaccagtagaatcgatataacgttctacgatgtcattgcctagagattcaacgctaatataaaattctttcatgggtttcctttgtttatagaccgagttattagtctttaggtgggataattatactccgatttttataaagtaaaagggccgaagcccttttcttacgcaccgattgtgtacttagattttaaagtccattcatgcttctgtttgaatgtaattactcggaagttattctgcatctgggcaagagtttgaccacgattaatactcagtagaccccagtcagcgagcagttgtgcgattgagtctcgacgaatttcatcttctaagtcaatagtaacagggcgaccatcaagctttaacatctctttaaaatggacgatatagtaacgaccctgtttctgaagaatgtggcagctttgatatagtaccttatctttgttattagcaattcccatacgggttagagtttctttaactttcaggaagtcttcaggctgtttcagtgtaatttcaatcatctttaccattccaatgctgttttcttaagatttttctgttctttcacgtttttcgtgattgtcttgaccaattcatcagtcacaagacctttcattttcttgagagcaggtttaagcttgtttttagcttccagggtctctctatacatcctagcatcaatcgcattgaccttgtaatatgtcattataacttgaagaatcaatgcatcctggatgttttctgttaacttagcccatttaccataccgacgacctctaggaacagaggccatcatgtagttatagtgtgcttggtcagatagcccttgaccaacaaggttcataacataaacagcaggcatacagtcggcatgctgagaaagagcgttttcaaccatgaattttgaataatccatagtcgagatgttcaaatgctctttcttttcattaatagaaccgataatctcgaagaattgattttctgctttttctttatatgaatcagataattcctggactttcgtccagtctttacctaaccacgctatttggtgctcgttatactgatcatcatcttcaaataaactcatcatttccactgcatctctacaacaagttgaataagcatataaaccaaatgtaattcaatcgaagctgctatgccatgatactggttattttcaccgatgatttcatacattcggataatgcttgggccagtaaccattgtatacagctcagaagaaagtttatctacaaaccaagtatagtctgctgcatatttcggagcaagagcacggagttctttgatgttcttagttttaatagcttcgatgacatcttcaattgaaccacggtcattcagaacgatagacaagatacctgcatcaatcacacccttagaagaataatgatcaagcatgttaatggtcttacggaattctggaaaattctttttgaccaaagcagctacaactttcttatcttcaactaccacgccttcattttcacaaattgcgagacaacgcttgagcatctcgatttgcattggcttaacatcagatggagatggtttaccaaaattaattacacggcaacgagactgaagaggtttaatgataccgtcaagattgtttgcagtaatgataatagtacagtttgtactatacgcttccatgaatgaacgcagatgtcgttgagattctgcaagacctgcacggtcaaattcgtcaatcacgataattttctgcttgcctgcaatagaagcagaacttgcaaatgcagttaacggtccacgaacgaaatcaatcttacagtcagaaccattcacgaacatcatttcagcattaatgtcattacacaatgctttagctactgtagtcttaccagtaccaggagaagtgctatggagaattaaatgaggaatttttcctttagctactaaagctgaaaaaatttctttatcttcagcaggaagtacacactcagaaatagtacctggacgatatttctgttcccacatgaagtctgcttcgtttactgtcaatttcatttatatttcctcattcagattaaagatggggccgaagccccgaagttattactcaaaatcaaaggtactgtctgcttccattgctactacataagaggctgatgcaccttcaaattttgcggcagtctgtttcttggaaccgttcatttttgcccacagcatcagtttataatcaccgatggtcatcttcatattgctcatgttgatgataaagttgaagttaccgtcaccttcataatcaccgagtgtcagagaatacttcggacgggtcagtgcagcatcttctactttgttatatccacgcagaacaattttaccatcaacattagtgatagcaattgtgtcaatctgcataccacgagacactcgcatcagttgctgcaggtcttcacctttaaaatcgataattacgtttgccaccgggaatgggattggtttagtcgggaacacgattgtgctcgggtcagctgctggccagaagatagttgagcgagcatctttaattgccagattaccatcttcctgcatgataatatctgcatcatcaccaaccagagacagaatgctcaggaaactgttcaggtcataaattgctacatcagtatcgatggtatcagaaattgttgcttcagcataagtcgtaccattaacagcacgagtcatgataaaattgccaggtttcagcatgataccggagttgatggtggagaagtttttcagaatgttcagagtttctttagagaatttcatttcaataccttttaattaagttcaggataattatatcaagctgcgaatgtagcagttaattcttctgcaacaatctgacctgccgcaacgagttgctcatcagcatctacacagtaatcattttctagacgttcgccaccgtgacgatcagtaacaattttggcaccagccttgattgattcattgtaatgcttacgcatcagttcaatccatttttctgcgacttcatcatcgatagatttatagaaagcaaagcgagcttcggaatctttaatcttatccttgatagcctgtttagtttcttcggtcagagccagaacccaagacttacgaatacgattttggttattcgggttggaatctgcacgcacgtttttaacctggatatctttcacatcaacaaaattaatcattatatttaccttaatcgtaataatcttcaaccatccaaccgggattcctgctggacatgactctattatattcatttcctgtaaaagcatctcgtaacatttcttctgttactaagtgcttttcatcagaaaacaaattagttaacacatatcgctttacttcaggaaaggccagcagatgctggcccgtagtaaactcattcattccatcaccgtgaatcgtccgaccttcttcatttgaaggtgttggccatatgcctgtgggtcatggtcacggtgagaaataataaacacattggcatctaccatcttattaagaatagcagttattgccttaacaccttctgcgtcggtggccgaatcataaacttcatcaaggaacagacagtttattttaacaccagaaactttttcagcaatatcacgccacgtgaatagtaatgctatatcgattcgagctttttcaccttgactaaacgaggcataactaaattcttctcgtccacgcgatttaatcgtttcagagaactcttcgttcagtgtgaacgaataatcagcttccataatttttaggtagctgttaatttgctta

SEQ ID NO: 14 - DNA, 164430 bp, unidentified
  source 1..164430: mol_type = genomic DNA
ggggtaaatggacaccatccactatttccggttcagcgcctcgtgggcgtggtgatgcaaacggtaccgtcgatttgggtgatggatatctttgggaatatctatatgaaattccagccgacgtatcaattaacagatgtacaaatgaatatatcgtagttccttggccagaagagattgaagaatctccagctcgttggggatttcaaaacaacttaacttggcaacaaaacgactttaacctaatctatcgtatgaagtgtaatacgattagatttaaagcataccttgatgcaatttattttccggagtttagtcttccgggaaatactgggtttaggcagttgtcaattataactaatccgcttgaagttaagccaatgccaaattctcctaacgttaaggctgaaaaaggttggtatagcgcttctggtcttgaaagacagtcaggtgaaatgatttacatggaaaatcggcaacctattatacgttcaatggaccaaacagaagagttaaatttaattttcgagttttaattatggggagcctttggctccccatttttatataaataagactatactttgatatgaggttaacctatgtatacagataagggtaaaaaaataattgacgtcggtgagattggtaatgcttctaccggcgacattctgtatgatggcggtgtgaaaattaatgataacttcgacgccatttataacgccttcgctgatcaacgattatttgcagctggtggtggagctttaaaccaaaaaatccacgcaacaagttattaccaaaagataaaatttggagatgctaactctgcagggacagttccaatggggtcatgcatagatgctgattgctcagaaggggcagttcaaattcgtctttcaaaaggtaaagcgggagaagctgtattcgttgtaaatagtaatggctcagcatcaaaagctagatccataaaaataacaacaaacggcgaaggtgtagcagatgcatttaaagatggatcgcgagaattgattatcaacacaccaagatgtagaattgagctatggtgcattgaagtcaaagctaacggtgctgcagtttgggattattcgatttcaagtatgtttggcagcacgtattcaccgttagaagctacatataatttaacgagttctcctattaatattcggcttggatataacgatgattactctactgttaaattgttattaagcttcagcgcaaatccaggtggtcaaaccatcaaaaggcaatcatctgaagtcatgcttatgattgacccgactattacttcatcagcgccaaacggaagagtatttgacactgaatatgcagtgttaagaagcggtgaatcatctgaaaatgaaaagatgtattctatttcatactctattaacgcgcagaaagatttaatatgcacagcttcaacatcttatggaaacgcacgtttggcagttaaagttattgctacacagaccgtaggggtatctcaataatgaaacaaaatttgatagtaggccaatcagtagatgatgggtctggtgattacctccgtaaaggtggtcttaaaattaataacaactttgatgatttatattcagagttaggtgatggttcagttccattcgcagcaggtgcatggaaaacttttaaagctagccctactggaactactttaaatgctaagtttggtcaggcctttgctattaatacccaggcagcaagagttaacgttcagcttccaaagggtacagccaacgactataacaaagttattaaacttcgtgatgtttggtcaacctggcgattaagcccaatcactgttattcctgctcaaggcgatacattaaaaggttcagcttctcctaaagttttcaatactaacttccaagatttggaattagtttattgcgcccctggccgctgggaatatattgaaaataaaactgtagataagctaactaatggcaacttaagtactgtagcgaaaaaatcaattattgctactgcgggtcagactgactttcttaacatttttgatggcgtagattataacgaagactcgcttaatgtatatcgtcgtggtaatattttatattacggtgaaaccagcgttatggataaagccaatgctgattacggttctcctggaacagtagcaggtcaattggtagaattaaacggtaaagacattcgtttaaaagttccatgtgttgaaggggaagtaataacatttgaaaccttcctagatggaattggtgtttatcggtcttcatacaacaagttggctatccagatacgagattcagcccagactacatccaagacgattcctgggtcaatgatagtagataaccttgctactctccgcagaatcactctggatgacatgggtgtacttccaggcgtaggggtaaatcctaactcgcttgaaatttcattgaacggaaaggaattactcgaagctggaactgcaggtcttcctttattttattgtgaaggcgcggaaggtggatatgcagaagactgtataaacaatggtggtcaatgggtaaattctaaccaagattatagactggaatttgactcaactggtactaacgtcgaagctattatttttggtgaggcgtttgaagataaagaccttcttaccgtccgttggttcaataataacatcggtactactatggatattgacgatatcatggcagaaaccgaccaagtgtatatgaatgctgagcaattagtaactctaaaaaatcgcattgaatacacaaattatgatgaacctaatcagaaaaatatgcgtccggttgctgacgatattatgattaaagtcaataatattgcagcgttttttgacgtaatttatccgattggcacgatttatgaaaacgctcacaaccacgcaaaccctgctgactatatgggatttggggtgtggaagctttattcacaaggccgtgttactgctggttggaataatgattcatctgatccttatttttcgcgtaacaacaataacttaaacgaaaatggtcagccatcattaacagcaggtggaacggttggagatttgacatttacgttaggaaaagaacacattcctgaactaatgtcaagagataaagttctaatttcagaccctgaacatggaagcgtagttatcggtggatgtcaattagacccagacgcgcagggaccaggttattctaaataccgtgaagacactgttgcggtaaacaacggtgtagttccaaatgacatcactaaaattcagccaacaatcaccgtttatcgttggattagggtaggttaaaatgacgattgaaactaaaactcgtgaaggagctaaagttaattcaagattagctgctttttcagaatatcgcgttgacccgcaaaatattgcggtaggaaatacggctcctatagggagcctaacctttgaacaaatggatttaggggtttggtatccaaatactgaagctgctattaatgatttgatgtcattgcagtcagcagaaattggaactattatttgcaatgacactggaatatctccacagcccgcacagcaaattacgcgtgctactttttcaggtgtcgttgcgttagagccaaaagaagacggctctgtcggtgacccagtaataattcatattcttggcttaccaattagaattgcaaacggtgatgactttgcagcagtagcaacacgttggtatgataaagtaaaagaattagaagctgttggaaaggttgttcaacaggttactcaatcgccggcaacacctcattatgttgatattattcatttagattatcagaaccataattttgaaacatataaaaagtatggtttaactgttgaatttactattacttcaccagctaaagcaggttatgggcaatgggatgctatcggcaacgaatctaaaaccttcggcgcgaacacatttactttccactattttagaaggatgggataatggcccagaataactataatcactacagtgatttggccaaatatacgatatttgacccaacaaatacacaatggcctgttgctataaaagacgtccaatcagcgttagagctgattggtagctgggcaagaactgataccggattacctgtagcatctcctacagtagccggtgtaattcgcacagcaacacaggctgaagttgatgctggaactattggtaatgctgcggtaactcctgctacattaaaatccacagttacccgtcctgaagcaactacagcaattcttggcttaacacggtatgctactaatactgaagccgcagcattaactgcaggaaatagaactattaccgcggcggctctcggtcatgtgtttaaaactgtgaaagcccaagaaaacgtagatggaactgttaggttaactactgcggctcaagcacaagcaggaactgacgaaactaccgcagtaactcctaagcgtgttgtagaaatgattggaaagttcagtgtcagtcctcctagttatacctctgcgacagaaagcaacttgggattagttcgtgtcgcaacccaagcccaggtagcagcaggtgctgttcacgatggatacgcagtaactccaaaaaccttcatggaatcaaaagcgtctgacagtgtatttggtatagtaaaatttgctaaagactcagatgtggcttcagctacttctaacaatttggctgttactccaaaaagtcttcaagcgctaaaatccaccaaggataaatatggattaaccagattatcaggttctccaactactgatgcttcattggcagcggctgcaacagatgcagtctttaaaacccgtagaataaacggaaaaactcttgataatgacataacgattactaacaatgatattaattgttatacaagacaagaatctgacgggcgttacatgccagctggaaccagagtaggtaatgttacttgggttgaaggacaatcttggattagtcgaggtgcaacgtttacatgtaatgcaccatgggaagcttctagtagattagctctaaatgttaatgtaaaatttgagcgtaacaacgacggatatgacaatcgtattttcaaatttgttgtaatagttaacggttcccaatggggcggtgaacttactcttaacatcgaaaatactaaaggcggaaaaaatggtcattcatggagatttgaagcttacgcatctagcaactttttcttcaataacattcctccaaatgccactgttcaaataagaccaacagaagacagtcgtattgtattttatgactgcatgcttacattctgtacaaatagaccgtaaggaataatatgaccaaactagtagattcgcttccgtttgtagacggaattccagacgattttcaacagagaattaattggataaaaaatacagagcctcttaatggggcttcaacccgctatggaaatgatggagaactgaatagagcctctgtgcagattcagaaaaacgttgttcaggtacataacgatttgaacaacgttggaactgctgtagaaaatattcaagtagatgtagaccaaatcaaaaaatcgttagaaattacaggttcttctgacgccattgagcaggtttatatcaacaaaaagaatattgaagcccacagtgagaacattcttaaattagaagaagacactacaaagattcgaactgacctcgattttcttgaagaggatgtaggtgtttatgattctagtaaagatgactattacagaacagttcgtgataatatagtttgggttaaacgtgaaattggtgcgtatcctgggcaagatattaacggacagcctaagcaagacgctccaggttctggtatgaaataccgaatcatcaataatgcgtcagctatagtaaaacatgacgagcgtattcaggcgctagaggatgcatacaatgattcagacgtgggttctctgactattgaagtaaacgacctgcgtaaagaagttggtcctaaatccggagctacgtcagcttcaatttatgcaaggcttgtgaataacgctgatgctatttccgcagctaataatgaaatctttgctattaaccaagccattgattttaccaatccagtaaaaattggagctcgtactactagattagaaaacgattatcgtatagttgacgcaacacttaactctgcacaaaccgggttagttcctcgtgtcaataatattgatgctcgtttggggtcttctgataagcctgatactattgaaggaaaaattagttctctttcaactgaccaagggtacatttctgatgttgtaggacgtgatacttcatcagggcttcagggccaagtagcatggataaatcagcaggttggtattgttcctggcgggcagccgattcctccggggtcaattttagcgagaatgaccaatgttgaaggtatgcaaaactctcaacagtctgctattcaggacattcaagtagaacttggcaataacagcgaagggttaaaaggttctgtaattacgttacagactcaaatgaatggtgacttttcgtcagaaaatccggttcagcgggatggtgtgtatgccactgtagtagaattgcaagataaattcgtgactgcagttactgacgtagaacaagatggagcatacctccgtaaacggggcgaatggtttaagaagccttcatcaataggtgaattcagtaaagaagatttcactgttgatttaagttctgatgcattggtaaatcctaactcattggtcgctgcttcatttaatgctggcattcgtattgttgatgatattattgttgatgacgatggcgtattttgtgtagaaactgatacagttatcgaagcttctgattcagataaaggcgtgaaaattgtagttctcgttaataacattgaggtgttttcatacggacttggtgttaaggcggtaaccggcgagcagctgttgaaaaccaagaaacttattaagttttcgtctggcgatgcaatcaaaattgtatatagagctgcttcagaagaatcaaaagttcctgttagtattaaatcattggatattactattcatccagcagtataatgaaagggaccttcgggtccctttttcgtataaatagaatataaagaggagcttatatgtcatacaacacatacaacccaaaaacgcttaaagacgctatacttcgacgtctaggagcgccggtaattaatgtcgaagtaactgaagaccaaatttatgattgtattcaacgagcattagagttgtatggtgaataccactttaacggattgaataaaggctatcaagttttttatattggaaaagatgaagctgataatgaaagattcttgaatggcgtatttgatttacgtggtcgtaatgtatttgctgtcactcaaatcgttagaacaaatgtaggttcattaacttcaatggatggtaatgctacctatccgtggtttactgactttttaatgggaatggccggaattaatggtggaatggggtcaagttgtaataagagttatggaccaaacgctttcggtgctgacctgggctattttactcaattaatgacttattggtcaatgatgcaggatttgcttgccccacttccagactattggtataactctgataatgaaatgcttaaagtaatgggcaacttcatgaagggagacatcattgtttgtgaatgttggactaaatcatttatgaataccgacatgatggtaggtaatactgcaggttacggatttgccgggccgcaaactgttgatcattggggcttaggagataggtatcagaatcctgaccttcgcaataacggccaatatgcaggtgaaggtaatacaaatagagaaggtgcttataataatcgttgggtaaaagattatgctacagcactgactaaaaaattgtggggtgaaattctgtttaaacaccaagggctacaattagccggcggcgttacagttgatggccaaacacttaaagtagaggcccaagaagaaatcgagaggctccgagaggaacttgatttacttgacccgggttgtcctattctgttggggtaaaagatgactacatttaattctagtttattcgctcgccttgaggattaccgaggatacaataaaactaatgagacagaaattctcaatccttatgtgaatttttataatcacagaaatagccaaacgttagcagatgttttatcagctgaggctattcaaatgagaggaattgagttttatttccttcctcgcgaatataacaatccggatttgcttttcggagaagacccatcaagtaaattcaccaaggcttggaaatttgctgcttacttagactcttttgacggttattctggtgataacacgttcttcagtaaatttggtatgatggttaatgatgaagtcaatttgactattaatcctaatttgttcaagcatcagaccaataattcagaaccaaaggcaggtgacctgatttatttcccgatggataattcgctgtttgaaattaattgggttcaaccatatgatccattttatcagttaggtcaaaatgttcaacgtaagattactgcgcagaaatacatttattctggtgagcagcttcaaccagaattgcagcgcaatgaaggaattatcattcctgagttctctgaacttgatttagaaccaatcaaaaacattgattctcttgctgatatttctgacgtacaatacgcagaaagcgatgcaattaataaagaagcctctgaatatgttcatccgtattatgttaataacggaagaggacttgagtctcctcctaaagcagattcgtttgatgacggattttttgaataaataaaataaagatgggacctttgggtcccttaggagaaatcatgtttggacattggtataattcgtccttacgccgatacattgtattgcttggagatttattttctcatgtacaaattgctcgttggcgtgaagacactggactaaaatatattaaagtacctatcacttatgcttcaaaggaaaagttcctttctcaactcggaaaatggactgctatccagtctaccgagaataaagcaaagatagaaaccgttttgccaagaatgaatttgcacttggttgatatgcaatacaacgcgatgtataaaacatcacagttgaatagaaccaaatcatataaaaccccttcaaaaattacatctcagtataatcctactccgattaagatgatttttgaattgggaatttatacgcgcaaccaagatgatatgtatcaaatcatcgagcaaatcgttccttattttcagccgcattttaacacgactataactgaactttacgacaaagacacgagctttaaccgtgatgttagaattgtattacaatcattttctcaggatgaagctgttgacggagataatattactcgtcgtagattagaatggtcattgatgtttgaagtcaacggatggctatatcctcctgttgccgaggttgacggcgaaattagaaccatttatttggatttcttcgctaatagtaaagaattaacaccagaaggaaattttgaatctgtggatagcgaagttactccacgtgatgtccagcaagaaaactgggatggttctagcaaacagacgtattctcatgatattcctattccggtaaatccggaggctcctggaccgagaggtgaaaaatgagtgacttacaattagatatggctaaattactagacatcgaaggaattcccggaatagaaggccaagaaattccggtttatgaaaaattagaattagtcgaagttaaatctaatccaaatgatcgtaaacctgacctcgaagacgactattctgtcgttcgtaagaatatgcacttccaacaacagatgttaatggacgcagctaaaatatttttggaaactgcaaagaacgctgattctcctagacatatggaagtatttgcaactcttatgggtcagatgaccacaactaacaaagaaattcttaagcttcataaagaaatgaaagacattacttctgagcaggttagtactggaaaaggagctaatcctcaacaaggaatgaatattcaaaacgcaacagtctttgtaggttctactgccgatatgatggatgagtttggagacgcctatgaagcacaagaagctcgagagaaaatagtaaatggaacagactcaaccgtttaacgttctgagtgatgcacatcctttaaatgacggtaaacaagtggttattcgccacccgtctgaaatggaaactaaaattgaaaatggagttcgtttctttaaatcgcaatgggatgataagtggtatcctgagaaatttgaagactatcttaagctgcatgggatagttaaaattcgcctgcaaggtgaagacccagcgcattttcaaacgtttaaggataaaaataataagcgcactcgttatatgggattgcctaaccttaaacgagcaaacattaaaatgcaactaacccgtgaaatagttgcagaatggaagaaatgccgagacgatattgtgtacttcgcagagacctactgcgcaattacacatattgactatggtactatcaaagtccagctccgtgattaccagagggacatgctggaaatcatggcggctaaacgtatgacttgttgtaaccttagtcgccagcttggtaaaaccactgtagtagcaatattccttgcgcactttgtctgttttaacaaggataaagcggtaggtattcttgcgcataaaggctcaatgtctgcggaagttctcgaccgtactaagcaagcaattgaattacttcctgactttcttcagcctggtattgttgaatggaacaaaggctcaatcgaattagataatggctcatctattggggcatacgcttcgagtcctgatgccgttcgtggtaactcatttgcaatgatttacattgacgaatgtgcgtttattccaaacttcatcgatgcatggcttgctattcaacctgttatttcatcaggtcgtcgttctaaaattattatcacgactacaccaagtggattaaaccacttttatgatatttggactgcggcggttgaaggtaaatccggctttactccttatactgcaatttggaactcagtaaaagaacgcctatataacgacgaagatatgtttgatgatgggtggcaatggtcacttcaaactatcagtgcttcttctcttgaacagttcaagcaagagcactgcgctgaattccatggcacatctggtactctcatttccggtatgaaacttgccaatatggattggattgaagttactcctgactcgcatgggttttataaatttaaagaagcggaagcagaccacaaatatattgcaactcttgactctgctgaaggacgcggtcaggattaccatgcactaaatattattgacgtgactacatctgaatgggaacaagttggagtattacattctaatacaatttctcacttaatcctcccggatatagttattaaatatctaatggagtacaacgaagctccgatctatatagaactcaactctaccggcgtttctgtagcgaagagtctttatatggatttagaatatgagaatgtcatttgtgattcaatagttgacttaggaatgaagcagacgaaaaggtcaaaggccgtcggatgttctgcactaaaagaccttattgaaaaagataaactcattattcatcatcgtgctactgttcaagaatttcgtactttctctgagaaaggagtgtcatgggcagcagaagatggatatcatgacgatttaattatgtcactcgtaattttcgcatggttaacaacacagcaaaaatttgctgatttcgtggataaagatgaaatgcgattagcatctgaagtttttaaacgcgaattagaagatatgaacgacgattacgctcctgtagtgttcgttgacgccgtgaatagcgcagaatatgcgcctcaagaacatggtctttcatttgtataaataataaaaagcaaacaacattgaggatatatcatgcctttagtctctcctggaattgagctcaaagaaacgagcgtacagagcacggtagtacttaacgctacaggtcgtgccgcaattgtcgggaagttccaatggggtcctgcatatcaagttactcaaatcactaatgaagttgaactggttgatatgtttggcggccctaataaccaaactgctgattactttatgtcagcaatgaactttctgcaatatggtaatgatctacgcaccgtccgtgtagttaaccgtgaagctgctaaaaacgcatctccattggttgataatattgaatggactatcactactgctggtagtaactatgaagttggtgataaaattacggttaaatatgcagaccaaactgtagatgacaccggttcagttactgcggtagatagtgacggaaaaattaagtcggtgttcattccgacatcgaagattattgcatatgcaaaaagcattaatcattacccagatttagggtcttcgtggacaactaccattacttcacagagttctggtgtttccgctgtcattactttaggtaaaattatttctgagtctacagttttactgactgagcatgaaactgcccatgaagaaatgacaaaaaccgaattccagactgctcttgctaagtataaaatgcctggaattgtagctgcgtatcctggcgagctcggaaatcagttagaaattgaaatcgtatcaaaagctgcatttgataaaggtgaacagctgacgatttatccggctggtggaaaacgcgcttcgactgcaaaagctgtatttggatatggtcctcagaccgatacccaatatgctatcattgttcgtagagatggcgcggtagttgaatcaacggtgttatcaacaaaccgtcaagataaagacatctacggaaataacatctttatggacgattatttctccaaaggttcttcacgttatatatttgctactgcgcaaggatggcctgaaggctttgctggcgttattcgtctgggcggtggggtttcagctaatgaatcagttacggctggcgatttaattcaaggctgggatttatttggtgaccgtgaagcactgcgggtaaaccttctgattgctggtgcttgcgctggtgaaactgatgaaatcgcaagtacagtgcaaaaacatgtgtcgtctattgcagatgaacgtcaagattgtttagcactcatttcaccaccaaggtcaacgattgtaaatattcctctgacccgtgctgttgataatttaattgattggcgtcaaggtgaaggaagctacgactctgcaaacatgaacatcaatactacgtatgcggcaattgacggcaactataaatatcagtatgataaatataacgacgtaaaccgttgggttccgttagctgctgatattgcaggcctgtgtgctcgtacagatgatgttgctcaaccttggatgtcaccggctggttatcgtcgtggtcagattctgaactgcattaaacttgcgattgaacctcgtcaagcacatcgtgaccgtatgtatcaagcaggtattaacccggtaacgggtcaaggtaccggtgatggtttcattctgtttggtgataagactgcaactactgttccaacgccgtttgaccgaattaacgttcgtcgtctgtttaacatgctgaagaacaacatcggtgattcttctaagtggcagctgttcgagttaaacgataactttacccgttcttctttccgtatggaaacaagccaatacttggcgggtattaaagctctgggtggtgtatatgacttccgagttgtatgtgataccacgaacaacactccagcagttatcgaccgcaacgagtttgtagcgagcttctatatcaaaccagccagatcgataaattatattacgcttaacttcgttgctacggcaactggcgcagattttgatgagttaatcggaccacaataaattgtacattttcgctaaatcctgatataattgcacatatgaaatattatgtgcaattaaggaaacctaagtgattatctctaaatttgttaaagtaaaaataattcctaaaaattttaaacacttttcggaacttggatacaagctgtctcctctgggttcacctaagcatggtttcaaatactattcaattgacgcgagcgttgatcatcttgaacctgggtcaaacatatatgttgagtgtgtttgtgataaatgtggtgaacaatattcgcagcgatattgcagagacaccgacgtgtgctatgattgtcgtagtggaaaatttaagttaggaaataccattggaacagctaacaaaggtaaattgttgtctttaatgacaggagaaaatcatcctcgctggaatccaaataagacagaatataatgaatatgctagtaaagttagaagagaaacttataagcataaaccaatttattctacatgggaaaattttgataagattggactgtgtggaatacctggagcgtatcagttagaccataaagtttctgtcgcgtatggattttacaacaaagttcctcctgaaattataggaagcattgacaatttagagataatcacttgggaagaaaatcggtcaaaatcaaaaaaatctagtattgatttatgggatctattgaaatgaaccccaggacattctggggtcatctaatctttagatgataaattatattaccgcacactttaatagcctctacgatgatgtagtcaatcgagaggctatataaatatctataggaaacaacgatggaattaacagacatcactcgtgcgtttgaatctggtgactttgcgcgtcctaacctgtttgaggtagaaattccttatctgggtcgtaacttcagtttcaaatgtaaagcagcaccgatgccggcaggtatcgtagaaaaagttccagtcgggtacatgaaccgtaagattaacgtcgctggtgaccgtacttatgacgactggactgttaccatctataacgatgataaacacgaagtacgtaaggcaattattgcttggcaagctcaggcccacgcccaaggcaatgatatctctggtatgactccagctgattacaaaaaggttgctacggtacgccagtttagtcgtgatggcaaaactatcacaaatgaacacaccattactggtctgtggccaactaacgttggtgaagtacagatggactgggacagtaacaatgaggtagaaacgttcgaaactacctttgctattgactggtgggaataatgctatggggcttcggccccgtatcgaagttctgtgagttatttgcttaaatatctgacaaaacttcgatataaatatacttatagataatttcggagactccaatggcctttcatattttggacttattcgctccgtgggaaaaacgcgacgaagctgaatataagcaacaaatcaacaatgacctagagtcaatcactgctccaaaatttgatgatggagctcgtgaagttgaatcaaacgaaaacgaaatccagtataattcattcaaccaaatgatgtttggttccaatgaacctggaatgaaaacaaccgctgatttaatcaacacttatcgtagtttaatgaataactacgaagttgacaatgctgttgaagaaatagtttctgacgcagttgtatacgaagacggtcatccagtagtttctcttgatttagattctaccgacttcagtcaagcaattaaagaccgcattcttgaagaatttaatacagttttaacatgccttaatttcgagagaaagggcgctgaccatttccgccgttggtatgttgactcaagaatattcttccataaaatcgtcaacaccaagaaaatgaaagacggaattcaggaactgagacgtcttgacccgcgcaacttacaattcattcgcgaaatcgttactgctgatgacgctggtactaaaatcgttaaggggtacaaagagtatttcatttacgatactggcaaagaaagttattacgcagatggtagattatattccgccggaacgaaaattaaaattccacgcgatgctatagtatatgcacattctgggctagttgattgctcaggtcaaaacatcattggttatttacaccgagccgttaaacctgccaaccagttaaagctattagaagatgcgttggtaatttatcgtattactcgtgctcctgaccgtcgtgtgttttacatcgacactggtaatatgccttctcgtaaagcggcagcacacatgcagcatattatgaacacgatgaaaaatcgcgttgtatatgatgcatcaaccggtaagattaaaaatcagcaacataatatgtcaatgacagaagactattggttgcagcgtagagatggtaaagcagttactgaagtagatactcttcctggtatgtccggtatgagtgatatggatgatgtccgttactttagaacagcattatacatggcattgcgagttcctctttcacgcatgccggatgcaaataatcaaggcggtgtgcagtttgatgctggcacaacaattactcgtgatgagcttgattttgctaaatttattcgtagattacagcataaatttgaagagattatgcttgatccacttcgcactaatctaattcttaaaaaagttttgtctaaagatgagtgggaagacgaaataaataatattaagattgtgttccataaagactcatatttcaccgagttgaaagatgctgaagttatggagcgtagaatcaatatgctcacaatggctgagccgtttatcggcaagtatatttctcataagacagcaatgaaagatttccttcagatgtctgatgaagaaattgaacaagaagccaagcaaattgaattagagtctaaagaggctcgcttccaagaccaagaaaatgaagaggatttctaatggaaaattatatttccgcaattgaatccagagacctcgtagcagccaaaaaagcttttggtgcaattatggctgaacggacatctggtttaattgaagagcgcaaaaaatttatcgcagcgtctgtcatgattgagggtgaagagcccgttgacgatgaagatgaagacgacgaagatgaagataagtctgagaaagacgacgacgaagaggacgagtaatgcttatactgcctgaaaatcatgaattagttatcgacgctgtcgaagcttttcttcctgaagcacaggcacgttttgataagttgtccgcagcgctttctaaagatgatataaataaaattgtagagaacatggttacttctgagcctgatttagcaattgctttaggttcaattaacgaatctctacaattaaatgaatttatcgttaagcacgttgattctaaaggtactattacccgtaccaaagatcgtaaaacacgtgagcgtaacgcgtttcaaacaaccggactttctaaagctaaacgccgccaaatcgcgcgtaaagcagtaaaatcaaaacgtgctaatccatcggctcaaattcgtggattacgtaaacgtaagaaagcacttaaacgccgtcaggctctggggctaagttaatggaaaacctcaatgaacaacttttaattgagcattggggtcaaccgggcgatgtaattgatggtaaacccatgctggaatctattatcgttgaaggcgaaaatgaatctggcttaaaacctggtctgtatatcgaaggtgtttttatgcaggcagaagtagtaaaccgtaataaacgtctttatccaaaacgcattcttgagactgcggtaagtcgttatattaaggagcaggttgctactcgtcaggctctaggagaattaaaccatccacctcgtgcaaatgttgacccaatgcaagccgcaatcattattgaagatatgtggtggaaaggcaacgatgtttatgggcgtgcaagaatcatcgaaggagaccacggtccaggtgataaattagccgctaacatccgtgctggttggattcctggtgtatcaagccgcgggctcggttctttaaaagactcaggaaaaggatataacatcgtacaagaaggctttcgcctgactgttggtgtagacgcagtttggggtcctagtgctccggatgcatgggtacaaccgaaacaaatttcggaaaatacctcggcacaagttgccaatagtgctgatgatgcttttatggctctcgcagagaagttaaaagcgttataaataattatgtaacttaacacaggacatcaaaaatgcttaaagaacttttaatgaccgaagctaaaactatcgatgcttccgtcgctcttgacagtattttcgaatcagttcagctttctccggaagctaaagctaacttcagcactgtattcgaagcaacagtcaaaaaacacgccgtagctctggcagaatctcacattgaaaagattgctgagaaagcagaagaaaaagttgaagaagaaaaagaaaaagctaaagaagaagctcgcgaagagctgaaagaagctgcttctaaatactttgaccatatcgctgccgaatggatggcggaaaatcagctggcggttgaccgcggtattaaggctgaactgtttgaatccatgtttagcggtatgaaagaactgtttgttgagcacaatgttgtaattcctgaagaatcagtagacgtagtcgctgaaatggaagaagaacttgctgagcaaaaagaagaaactgctcgtttatttgaagaagtttctaagcgtgatgcttatatcaattacgcccaacgcgagtatgctattcaagaagcaacccgtgaattgactgatactcaaaaagagaaagtagtttctctgacagagggtatggattattctgactcgttttcaactaagctgaaagctattgttgaaatggtgcagggttctgtagagcagtctgtaacggaatctgccgatataaatactatcgacaaagaagcagacggtttaaacttcacaactgaagcagtcgaagaaactcctgcgactaaaaccccatccgttatggatgcttatgtagcccaagcggctcgtctttcttaatttaaaaggttatacaacacatgaaaaagaataaacttatcgaaaaatggcagccgctgcttgagaacgaagctctgccggaaattgttggcgctagcaaaaaagctctgatcgctaagatttttgaaaaccaggaagctgatattaatcaggctccggaataccgcgatgaaaaaatcgctgaagcatttggttctttcctgtctgaagcagaaattggcggtgaccatggttatgatgcacagaacatcgcagctggtcagacctctggtgctgtaacccagattggaccggcagttatgggtatggttcgtcgtgctatccctaacctgattgctttcgatatctgtggtgtacagccgatgtctaacccaaccggtcaggtattcgctctccgcgctgtttacggcaaagaccctctggctgctggtgctaaagaagctttccatccgatgtacgctccggatgcaatgttctctggtcagggtgcaaccgagaaatttgaagcagttaaagctggtgctgctctgactgttggtgatatcgttgttcacgatttcgcacagaccggtcgtgctcatctgcaggttgttgaagatttcactgtagacgctggtgctaccgatgctgctaaactggacgctgcagttactgctgctctggaagctggtaaagttgtagaaatcgccgaaggtatggctacctctgttgctgaactgcaagaagcctttaacggttcgaaagataacccgtggaatgaaatgggcttccgtatcgataaacaaactatcgaagcgaaatctcgtcagctgaaagcacagtattccatcgaactggctcaggacctccgtgctgttcatggcatggacgctgatgctgaactgagttcaatcctggctaccgaaattatgctggaaatcaaccgtgaagttgttgattggattaactactccgctcaggttggtaaatctggtatgacccagactgttggttctaaagccggtgtattcgacttccaagacccgattgatatccgcggtgctcgttgggcaggtgaaagctttaaagctctgctgttccagattgacaaagaatccgctgaaatcgctcgtcagaccggtcgcggtgaaggtaacttcattatcgcttcccgtaacgtagttaacgtactggcagctgttgataccaacgtatctccggcagcacagggtctgggtcgtggttataataccgacaccactaaagcagtatttgctggtgttctgggtggtcgctaccgtgtatacatcgaccagtatgctcgtcaggattacttcaccatcggttataaaggtgctaacgaaatggatgctggtatctactatgctccgtatgttgcactgaccccgctgcgtggttccgatccgaagaacttccaaccggtcatggggttcaaaacccgttacggtatcggtattaacccgttcgccgattctgctgctcaacagccgaaaggtcgtattacctctggtatgccttctatcgtcaactctgttggtaagaatgcttacttccgtcgtgtatgggttaaaggtatctaataccaataagggagccttcgggctccctttagttgttttaatggatataaataaacttataaatccacagaggaaagcgcaatggctaaaatcaacgaacttctgcgcgagtcaactacaacgagtagcaacttaattggtcgccctaatctcgttgcattaacgcgcgcaaccactaaattaatctataccgatcttgttgctatacagcgtactaaacagcctgtagcagcactgtatggtattaaatatcttaaccctaatggtgacctgacgtttaatacgggtgcaacttatgcaggtcaaatcggggcgacggaacgtgagtcaattgaagaactcactatgtcaaataaagactcattcagtaaagacgatatgttcaaatatcagaatgtggtctttaaagtacttaaagatgccccgtttaccgatacagcagaaaccgacgaatttggaattgtatctgaagcagtagcagctaataatattcgtatgctgtcagatgctgcagtcactgaaaaatttgaaggacccgattcagacccaatcaccgaagccagttttaaaattgataaatggcagacccaggttaaatcacgtaagcttaaaacggatttaacggtagaattagctcaagacttagaagctaacgggttcgatgctccagagcttattgatgatttacttgctactgaaatggcagaagacattaataaagacatcctgcaatcattgattacggtttcttctcggtttaaagtagctggtgtatccgataaaggtgtattagatttaactaagcaggattctgctccggaacaaggtcgtactctgtatcgtttcatttgtgaaatgaattcagcagttcaacgtaatacttcttattctggtacttatgcagtagcatctactcgttgtgctgcggtgctggcagcttccggttggttaatgcagaagaatgatggcactattccggacaacgcgtacggtatgctgaataacggcttacctctttattgtgatactaccagcccagttgattacgttattgttggtgttaaagcagaatttggtgggaaggaaactgtaggttcattattctatgcgccatataccgaaggcttggatttagacgaccctgagcatgttggtgcatttaaagttattgttgacccagctagcttgcagccttctgttgctttactggtacgatatgcgctgtcagttaacccatatactgtaggattggacgaggacgaagctcgtgtgattaatgctgcggatatggataagatggcaggaagaagtaagatgtctgttatgcttggtgttaagttacctaagcttattacggactaatttatgggagccttcgggctccctttttgctataaactaaatatgtcaaacctcggggagtattcctcctcgagggatttaaacactttcttatcatatagattaacacattctatcccgtgcctgcgagctatatcaacagctactctcgtccctccagatacactcccgcatcttttctcaggcgcccaatataataccttatctacaggctcagtgcattctaggcccaatacctgcatagaattccgtgcgaataatgtctgcactatcttcgagcattcatcccagtacgacgtaacttctctcgccttaatgatgcttttgattttggcttcgtttgataattcagaccatacaacaacacctgtaccaggaacatggccacaaaagccagaataaggaataatcctacaagaatttgacctatcgtatttcgccaaccacgcttcatctgaacccggagctccacctgaatatgaaaaatgcccctcttccgagaggcgttgacctattgtagtcattagactcagaactctgcgtggcgcttctcgtgaaccaataagcgccaatctcattattctaaaacctcatgccatttgctacgaatagtgttttgaattaaagtagtgatttctttcttaacaacagaagggttatcagcgaataacatatcatgaccttcacgcgctgcttcgttaatgatatctttcatagtcagacccataacacgaccgaaatctttagcagttacagtaccaatatgagacagaacgttacttacccggttccaggttacatattcggaaaagatttccagaacacgcttatcattctcggtgagttcaaccttcgctttaataggcttatcggatttagccttctcactgaacttagagttcttacacttaatagcaacacgagtaccattattgaaaaacttaggatgaactggcttaagaacatagccttcagctacgccagtttcagaagaagcctgcggaccgaacacatgtttatttgcatgttcaaggtcagtcgtgtcaacaagctcattatagtaattgacaatagatttaaagtcattcacatactgagatagctcggcaaatgaacctcgaccaagaagtggagctaatttaagaccaagaccagtagcaaacgattctactacataatcgtcccaataaactttttcgttaccggaatccgacaggatatcaaatacgtagaaatctttctcaccatagtctacgcctttctgaataccgccaccggcaaattcgccgaagatttgaacagatactaaatccatggcgttcagcatattctgcattttagcgaaagaattcttgtacttcttcatgataatctcatgaccaaagaagctttcaccttctaaaataggaccagtacgcttagccggaacaatttcggtaggggtaataatcacactgaagttagtgccatgaatcttctcacgagccacccactcaacggtatgcatatcaaaaccagcaccgcgaatcttctcgatgaacttaccgttgtaatgattctcgagactagaatatttctcaaacattataatttccttagaatgtgattttcataaagtcagtatcaccgttacgctgggaactggtataatttgtaacaaatccttcatcatgcaaataattaagaacacttgtaatatgtttcttaactaaactgctaggatacataattaactcacgttgacccgctaaagcggttttctcaatctgggttaatacttcttcttttgctgcactcaattcttctgtagcaatattgatggctgtattagccattctatcggcaaggttcataatttttctctcaataaataatataaaaccaggagtctatcttggtcaaaatggtatcagaggatttcccctgagcccattataccacatcgatttttaaagcaattaataaccgctcggcacgaagcgatacatgatatatccgcttttagttagcatgatttcaaattgacttttgcttccaacctcaagtactaatggaatatctttatccatcagcatccaatcaatttttccataccgttcattaatcaaatccgttattttacgtgcaccacttttatagtagtaagaactctgaacagccatcattttactaacaaatttagatgcaaacaaccagacatttaccccattagcagctggcgtaaatttcttagaaagcatttcttcaaatcgttctactacaattgggtctactttaggcattttcataataacctcatgtgtttaacaagtttcttatgacgagattttataccaacgtttgttaagcgtttccgataaacgactttttctttttgcttaaacagttcgtgtgctttctcaactgagacccataatttagcagcttctgctggagtgatatctaacgcccttgcaatttcttgaaaatcttttccgctttcatgcatcaagtgagcttgtaatgctttcataataacctcatctatgtgacgaggacataataaaccaatccgtgaatagcaaaaaaagggagcccgaaggctcccgaatattacggatagataatacctgcttccagcgcagtacgatgaacgatgtatccatttctagattcttgtacatcgacttctggataatcatctagcattttagctagagtataccgatgcaggtaataatcactgtcagggtcgtcgagtttccaatctttgccctcaacagtcattcgctggatttcatccattacccaccatccacaccagatataggctgttccacggaacggtagaggatgaatatatggaagttctccgtctggctcaggggctactcttttagtaaaaacaacagcaatgcctttagttgcagttccattattatagtctggagcagaaaccgttacttcacaattaagtgtgtagctagtttccgccgattcagttaaggtaattgttttacctgtttgaccggaaataacagcagaaccacgtttccaaacataagcaatgcttgctcctgctggcgccccagcaacgttagctgtaactacttgggattggccaatttctttagaaacagaagttgggctcaaagttaaagtaatcgcaggcatggttttgttcttaactgtcagagtagtttctgctgaagctgtttcaggggagccactagctggagtaacagtagcaactactttaatagtcttactgcctgcaggacccgcagcaacataattcatggctgcggtaacagaagattgttttacgccgtttactgtccacacaaatgattctgtgcctgcagccgcggctccagaagttgttgcagtaaaattggttgttgctccaatgactgccgaagcagccaaaggagcaatagatacgctataagccataggtgttccttattttaaagttacaaatgaagaattacgtgtttcacgaatcataacagacccgtttcttttgatgtaatagattaaactaaacagtgtctggtgtgctgatgggtgttcaaacgacgttggccgagatttccagtccgggttatctttaatccattggtaaatccaccatggaagagtaatatatcctgggttcttacctagcaattgcatgtttggactaaagtttttaggaagctcaatggtttcatcagttttaacaattttaactactttgtccattgctttggagaattcttcagggtccgtagtactaattggaatgtttgtaagttttccttcatcatcgatatggataatgctatctccaataggagcttcagcataaaatcctttatcattgatagaaggagtttttacttcaaatccagggtcatttactttaggtgtttctttataaaaatctgggtcaatatcatgaattttaataccagcattaactggagcgtcaaacagtagttttgcttcatcagacgcttcatctttaaatactgctttaccctcaatttcatcatctgcttggattaaatcagcaattgacagcccatcgttgtcttctggcataggctcatcggccaatttagccagttctttttccaaatcagcaaccatattgtcaaatgagcgggtcttcttcagtttaataccgaaggttttggcatattcgtcgagcttgtctttagcttcttttttatcgagtgcctgaatttctttgatatagtctttatctagcattgggtgtgcctcatgtaatgtataaatatgattgtatttataaactgaggatagtacagtgcacgacatccaagtcaaatttaaagattttagtcatgttcatattgagtgtgatgactcaattttctatgaactcagagactattttagcttcgaagccgatggatacagattcaacccgaaatatcgctatggacattgggatggacgaattcgtctgctagattataatcgtctcttaccgtttggtcttgttggccaaattagaaaattcgctgaccaattcggatataaagtttatttcgatccaactatattcgagcaagaaactctttcacgggaggattttgacaattggttatcgactaaagaaatctattcaggattaactaagattgaaccccattggtatcagaaagatgctgtatatgaaggactagttaataggcgtagaattcttaatcttccaacgtctgccggtaagtctcttattcaggcattacttgctcgttattatgtagaaaattacgaaggcaaaattcttatcatcgttcctactacagcgttagttgaccagatgattgatgatttttgtgattatcgtttatttcctcgcaatgctatgctgggtattcgaggtggtactgctcgtgattcgaatgcattagtttatgtatctacctggcagaccgctgttaagcagcctaaagaatggttttctcaattcggcatgatgatgaatgatgaatgccatcttgcaacgggtaagtcaatttcaacaatcattgcgggtctcaccaattgcatgtttaagtacggactgtctggttctcttaaagacggcaaagctaatatcatgcaatatgttggcatgtttggtgaaatcttccgtccggtatcaacttctaagttaatggaagacggacaagtaactgagcttaaaattaatacaatcttcttaagatatccagatgcagccgcaaatgctttaaaaggaaaaacgtatcaagaagaaattaaattcatcaccaatgttaagaaaagaaaccgttgggttgctaatctagctgctaagctagcatcgcgtgatgaaaacgcttttgtgatgtttaaacatgtagctcacggtaaagagctattcgagatgattaaagctactggtcatgagcaagtttattacgtatcaggtgaagttaatactgaaacacgtaatgctttaaaggctatggcagaaaacggaaagggaattattatcgtcgcaagttacggtgtattctctacaggtatttctgtaaaaaacctgcatcatgtaattttagctcatcccgttaaatcgaagattatcgttctccaaacaattggtcgtgttcttcgtaaacacaaagataaatctttagctactgtctgggatatcatcgacgacctgggtgtaaagccgaagtcagctaatgctaaaaagaaatacacacatttaaactattgcttaaaacatgcattagagcgtattcaacgatatgctgatgaaaaatttaactacgtaatgaaaacggtaaatctatgattaaatttgaagatatttatgaagccacaattcgtgaggctactatcgataacttcatgagtaaaattaatgcttgccagaccttagatggtctggaagaactcgagaagtattacgataagcgctctaaagaaactactcttgctgattctgatgacatcattgtgcgggatgctttggcggggcgtagacaggctcttgaagccgattctgaagatgaagatgacgaagacttctaatacaaaaaagccccaaccgaaaggaaggggcaaagccaattggctacatcaacactagactaaattaaaagctgcgtttcttgtaattgctcttctgtgtcttcagtgacaggcaattcaatcgcataattatagcaagctccgggatgaaccgggcctttgtctgtgtggacaaccaatgcttcatcgattggtcctttacagacgacacataccgtattcgacatgattgtctccttagtttacaggtttatttattacgcgccagcttcaaactgacgaaggtcaataatgtgcttaatgctaaaacctcgtgacttgatagcatccattgcatcactacagaactccaaaagaattccccaatattgcaatttagtatctacacccaagatttctttatcagcgcttaaaacagttttcatttctgatttttcgtatacatccatgcatacttcaccaccaacctcgccacggccagtgtaataatccaatcgtgctttaagattttgctttttgagggcatctaatcttaacatctcttttcgacaagtcgagtgcttacgcacccatttaccatacagaacggggttattagccgcttcatactgtagtttagtctggtcgataatcaaatcattatccaattcatcctgtaattcttctaatctcattctatctccactctactgtttcttgggaaggactagtcccattatactctactgctagagttagcattactacgcatctgtatgcgtatacgttctagcgtatcagggtcgtctactatagaaaactgcacggtgacaattatagcgttatcgtcatataacggaagcacatcaaccgatagacgattaatcctaggctcataattacgcacggcagagactatattacgctttatcgtatcaccagttaacggagtcatgttttcaaataattcgtttgtgatatcacaaccaaactctgggtcaaatggccgagacccctttcttgtggttattattccaagaaggctatttttaactgatcgagctcctactgtttttgacacatcggtatcccaagcaagtcgcatctctgggtcaaggtcagaatatagtttatcaatattgctcatgacataatcttaaagaattctttaagccccttaattacatgaatgtgagaaattccgcattcacaagtaatgggaactgccaattgaacctgtggcttcaatagcatatttttgatgttaactacatcttcggttgtaatagcagaatataaatcatcgatttctgcatcgtttaaatcattaaagtaaatctgctcatttccaaccacgatataatctatgcattttgatatcatcattggaatgtcggaatcgtcaaaaagattaggatacttaaactttatcttgaatccctttaagtcataccagaggtcttctggaggatcgatttgcgcatgtgtataatttaatggcacaggaattttacgcccacaggtgcaattccaggtcacctcatgattaacctcgcctatactgtgcgcccaaagtataactataagtaattccgattcttgtttgtttaacccagtagcattggtgcattctctgagcaatgctttaacgcattcatcgattgtaccgtttttcttcgctgcaattaaattagcgtattcttctagtgtaaaagctcggcactggatattcttgccatttattcttgtttcaaatttatatgtgatgttcatatccactcctcttattcaattatttataaatagtataaagaggattaccttatggccaacatagttagatgcgaattaccagatggtgtccaacgttttaagccatttaccgtagaagattatagagaccttttattggttagaaacgacatgaacactaagtctgaagaagaccaaaaacaacttatagcagaattaatggatgattattttcatgaccatcctgtcgagtatcgtccttatatatttcttaaagtatttttgtcaagtattggtaaaactaaaataccagtcagaatgaagtgcccaaaatgcggaaaatacaagcagtatctttttaatcttaatcagcctccgttgacaaatccgaaagtagaggttgcaggattaacgcttaagttcaaaaaacctatagaaataattgatgatacaggtaaaatgattttagacaacattatatctgtgaaggattcatctggggaataccagtggaatgaattaagcgatagtaataaattgacagttatcgatgctatagatgttgaaaccttggaaaagattttatcgcagatgaagccgtttaactttgagctaaagacgtcatgctgtgataccacgacagtattaaaatatgataacattgttgatatctttaagctattgctacatcctgacgagattttcacattttatcagattaaccatagattggtttctcagggtaaatacgatttgaattctataatgaaaatgctgcctatagaacgtggcataaccttatcgcttattgaaaaggaccttaaatcatgacagcgcaaagattaggatatcctaatataagcataaaattatattctggatatgatgcgtggttagctaatagattcgttgaattagcagctacatttattacattaacaatgagagattcattacgcgggactaatgagggtctgcttcagttttatgactcgaaaaatatgcacacgcgcatgaacggtgatgagttagttcaaatatctgttgcaaacagtaacacatcaagaacacaaactcgaatttacggaattaaacactttacagtaggtgttgatgataaaggtgataacattatcacccttcagcttggaacgctgcatgacataatgaatctcaagttcagtagagcgttttttagttctgcgtatgaaactataaaggaaatgataggcgcgatgtatgttgaccaaccattgattgctcctcctatcaacggaattaacgcttacgtcccacgggttccctggactagtactctcaaagattacttacgatatgttagaaatgtaggcatttctacagacaacgatcaatttatttttgcctgggaagatatcactgggattaacatgatggattatgaatcaatgatatcccaggacccaaatgtattcatgttcggggctcctcaaacaataggtcagtttgctgcaggattaaaatatccattggcatgggattttgaatggcttgttaagtcaaatagatataatagaaatcccatgaaaaacgcaacattttatgcacactcattcgtggacaaagatgttacccgaattattaatggagaaggccaaaacagcgtattcattaataggtcaggcggatattctgacatgatttttagaaatggctatgaagaagcattgcgcatttctacgatggctcaatacgacgggtatgctcaaactaaatgttacggtaattttgaactaactcctggtatgaaaatcaattttgttgatttaaaggaccagttcagaactgacttttatatagatgaagttatccatgaaatatcaaataacacatctataactaacttatatatgttcacaaacggctctgcccttgaacctgtagatttgattaaggtgaaaaatgaacttaaacgtgattcttcctattaagaaaatagtaataaatgaaaagacgatatcaattccaaaactggggttaaagcaccataatctgatgaaagatgttaagggtccagatgaaaacatgaatcttcttttggattcaatttgtccaggattaacagcagccgaatctgatattgttgtattacatttattagcatttaacaacagaataaaagaaactgttgttaaagatgattttacctacgatttgaataaggtttacatttgccagcgattaactcaacggttagatggtaaagaattcaaattcagagctcctcctcgttattccaaattaggttcagtagattcaattttgagcgaatttcttgaatcagtagatggaaaaccaatggatataaactttatgaagcttccagcttttgtgacaaagtgggctgatgacttagtaaacactatagccattgatggacctgaaggaccaatcaaaggcatgcttaacgtaatggaaatatttgaatgactaagaaatcagaaatgaattcaatgcgtagaagagttattgctgattcggctccacagaaaagggctgagtctcaagctgatgctcagattaatacgctagaagatattggtcgtcgcttagacgaccagcaagcgtctactgatttgatttcggatgtaatagaaactaaatcaaacgaaattatcaaatcagtagaagatgtttcagctggtgttgaattaactgccgaagcttcagaacgcacaacagatgctgtctcgaaattaaatgatactgcatcgttaattaatgataagctcacgaaacttgccgacttgttatctaaaaagcatgatgttcaacaagatgtccaaaaaactggtactggaacatcattagaaacgataacagaacaagtcccggatgctcctactcagcagccattggaggaattacttgaaagacttattcctcctcaggatgacagacgtcctgacgcggatttctttcctagcacagaagagcaagaggaaaaagctgagcctaaaaaggaaactgaggacaagaataaaaagtttcttgacctaaaatttggagaattaattaaaatcgttaaatctggttttggaaaaactatttcattaacagataaaattagcagtatgctgtttagttatactgttagcgctttggcccaaatggcgaaaactgccgccatggttttgggtgtgataatgcttatagatttaattaaagttcattttaattattggactaaactgttcgaaaagaactttgttgaatttaacaagcaagccaaagaatggggtccgctattaactgcaataagcgagatgtcgaatgaaatagtaaaatcgttcgtcaaaggagattggggtggattagcaaaagccattggctcgggtttggttgatgtaattgataagctcggagaaaccattatgctcggaatgagtaagcttcttgctggaatgttacgcgcattaggattcaatgattcggccgataacattgaaggcgctgctttagacagatttcaaactgttactggggcagaactcgatgaagaagatgctaaaatgagagcaaaatatgttgaccgtcaagaaagagaatatgacgaacaacctgaatggaaaagaaagctttctgctaagttccaaaaattcaccggtcagattgatgacgatgaatataacaaactgctgagcggagagaaaaagcagtcagcgtatgcagacttgccagaagacgaacgcctcaaaatcatcacagctcgtaataatgctgaggcagaactcaagcgtacaaaagcatatgttgaaaaaactgacgcatctgattccactcgattagactctgctaaggatgcagtacaaagcacaaccactagatataaagaactagagaagttatccccagaggttgcaaaagatttaaaggttgaattagaccaattgcaaaagcttcttgattctaaaatatcagaacctgctccaactgccgaagctatacctgcagcagaacaacctgaggttaaacagtctgcttctattaaagccgccgcggatagtcgtgaagctgctcgtacacgtgaatctaatacacagtcacaacctatccaggttaatactgctgtaaataagaatagcacatacgtttatagaacgcctccacagacttcaacagctgctcctggaatgcaaggcgctatgaaaacctcttaaggaaaaacaatgatttttgaagaactggccgatggccttgaaaacatcaaaaaatcaggaactcgaatttcccaaggtaaatctaaactgacgaatgcgccaaccactaaggtggcgcagttcccagctgaacgttcagctgggaatgattccgcccaagatatgagagtacatgacttatatcgtaacggattattattcacagcatatgattttaaaggaagaaccactcctgatttgcgttcatttagacgagatgtaatgttatcgtctgtattcgattcaccaatgtcagcattggctaattcatcaagctctaccactagtactgcaccagtagctaatattctattaccgcggtctaagtcagacgttgattcagttagccataaatttaatgatgttggggattctcttgttacgcgcggcggcggtactgctactggcgtattaagcaacgtggcttctactgcggtgtttgggtcgatagagtctttaacgcagggattaatggccgataatggtgaacaaatttataacactgcccgtagtatgtatgccgggcctgataatagaacgaaagtgtttacttgggatttaactcctaggtctgcagatgaccttatacaaattattcgcatctatgaaatttttaactactattcttacggtgtgactggaaattcatcatacgcgaaagaagttaaagctgctattgatgaatggtataaaggaactcttaaatccgcagctccagatggggctaaagtagaaaacacagtgtttgagcaaataacatcgtttttaagtaatgttattgtagtttctaacccaactatttggactgttcgtaattttggatattctacatcaatggatggtagagaggatatatttggtccatgccaaattcagagtatccgttttgataaaacgccgaacggacatttcaatggtttagcaattgctcctaaccttccaagcacatttacgcttgaaattactatgcgcgaaatacttactcttaatagaggaaacgtttatatcggaggtattgaataatgtttactctcgaagaatttaagagtcaagctgctgatatcgatttccagagaactaacatgttctctgttgtattcgctactgtaccctctagtaaaacccaggctcttctaaacgactttggtggagagctgtataataatatgggtttagatggaaattggcttggattgacaccaggtgaattcaatcagggtataacaactatagtgacacaaggaactcggcaagttgttcgtaaatcaggtgtgaatacatttatgattggcgcaatgactcaacgtgtggtgcagtcattattaggagaatttacggtaggtacttatctgctcgatttctttaatatggcatttccaacagcaggattgatggtttattctgctaaaataccagagaatagattatcatatgaaatggataagttccataacgctcctaatataaaaatcacaggaagagatatggaaccgctggttctttcatttaggatggacccagaagcaagcaactaccgggcaatgcaagattgggtaaatgctgttgaagacccagtgactggtctgcgaggattgccacaagacgtagaatgtgatatccaagttaaccttcatgctagaaatggattacctcatactgtatgcttgttctcaggggctatgcctgtagcgtgtggagctcccgaatttacatatgatggagaaaacacgatagcagtgtttgatgtcacgtttgcttaccgtagcatgcaaaccggttcggttggaaaacaagccgctatggattggttggaagataaggctattcagaaaattgagacgattaatccaaatcagggcttgagtgcgtctgcttcaagattgtctcgtttaggtggggctggtggtggaatttctaatatcactactacgacaagtagaataatttaggggccttacggcccctttgttttatgcaatgcagccaataaaccctggctcagtacgaagaagtttcatttcgtttgtggtccaaactactttgaccggaataataccttctgctttaccgtttagaaccgcttcaacaaacgatggttcagttggcttacggaagatatcttgaataagaactgtaggagtaccttcgttaaacccttcaagcatgataagaacttcttcattgaacttctctgcatctttaacatcagcagaccattcaataccgttaaagcggaatacatgtttcatatcaatttcctcattggtttgtgtaagtctatagtatcacgtccttgtgataagtaaacaactttatgcaagtttttctgggataccatccaggttgatagcaccagccagtagctccatggtacgtgtgtagctaaccttatctgtggaacggtctggcgaaaagtaaatctcatttaaaaagcctttgaacttgctttcttcaagaggttccacttttccttgttccatcaagatgtcaccatcatagagatgaacggattcatcgatttgctctggaggaactaccgtcatttctaccatgaatgtcttgttattcgctacaccaactccatttctaaaaggagttccccatactttgttgactttcattgccaacccgcgaggaagaataacttcagcctcatcactaaaacttgataagacacccgggataactaccttaactttatcagccccatgaataatgaacccaaacttaaactcatcaccataggcaacttcctcgcctctatcaactctttccaagttgtctgttccaataacagaagataccgcatcgatagttgtttctttgttttctaaatcagaactaggtgcgtctggcattaatgaatcaccagcatttgaataagcaccaaagataattggacttaacgaggtagaaacatagttctggaaataaaacattttagactcaatgttatctttaaactcttcgtattttccgcgctgaccacgatacaaaagagtgcccggttcaagacgcaaacctttttcaaaggcagaatcgagcggacgaattttcttgtcaataatcggatcgcctaagctttccataccaataagatagttattaacaaatgaataaccagaaccacagtaatgatgtattgcatctctttcttcttcgcttaaacgagattgcatttcacggttatattcaattgctttggatatagaatcgccaacaattgacacataagcggatatcatataattgacaagattttggtattgacgtaaagctccgaaatcgtcagctggaggcatatcaaatccacgagtagctacttcaacgattttacgcattgtttccatagatgcaggatttttagcttgagcaataacgtcagcaacgtctgaaattcgttgttcagtgattttcattttgtctgaacctgaaggaatgaaaaccttccagtcgtcatgcattctcgacatttggcctacaaataatctctcaactgcatcgccaaaattacttccatatccgccacgaacacgatagtgcttgatatcatcaacataaaaaggaattgatttttctaatccggctttgatatctttttggaggtctaccgtatcgccttctgcgtttagtactggagtgttagtagttaattcgtaccagcgttcacgtttattttctggccaatcttcatcaacatatgaaacaaatttgccgtactgtgctcggattaaatcttttcgagacactttcattttactcattacagcgagttcagatttcttgtcttctttttcgccaatggaattagccaatgcttcggacttggtaacgttttcgccggtttctttagacacataaacttcgcctactttggaatctactttggtataaagttcttctgaaatttcaggaattccttcaatctcttcaagtttcttacctttacgaaccataatagaataagcatacttacctttgtagtaagccatatctttcattagattgaaacgaccaccggtgcgagtagtaatcaaccgagcaagaatacgctggatagctttatcttgtccttgcattttctttggattaaagcggaacattactgcatcggctttaatttgtttaactactttgttgacagtttcaaaaatggtattgatagcaccaatcgggtcttggcctaaaccgcctttaagcgcaccgatgttacctttttcggatacagagaaaacatagacctggatgaatttatcacccatcttgatgttcttaactgcatcaccttgacctgacccttgtactaaccgaatcattaaattgttattacccggcaccttaatcaaaaagacctgtggtaccttaagttttggcttaacgttctcgacaggatagattttactattctcttcatcgaaaacttcatttaaaagttccatgacatatcctcgtttgtttattctatttatacgaaaaaaggcccgaaggccttaattaattattgttactgtacgccaaacttgtagtccatttacagattcatactcttcaatgttttctttgaagtttcttaatgtgttaatgttattaaactcaagaacttctgtgtgaacagaaatacccccacgtccgtcagaagatttagcaatcacttcgtataaaactttcattttattcctgttgcctcagtaaagttaacaccaaacgcggcttcgaatgtattagccacttctttatcatatctacgctgtttaatgataggtaagaataatcctactgtaccatcatcacggccttcagcagttacccaaccattgcattcaagttcccagatagttcctggaagagaatctctgtttttccatagatgagtgcgatcaagttcatgtaattcttcgggcttatctttaagacctgacccagcgttaacacgaatacgaccacattctgatacgaacattaagccgcccattttaccaggttgttttctatgctcgtacgaaccgacacatttcaaatctacagtgataacctctttaaatttaacgaggttcttagaacgcttatcttcccaataagcaccgatattcttaaggataataccttcgagaccttggtctacgtatgttttgtagatggctctagcttcatggatgttatgtacgacatggttttcaattagaataaccttgtcatagcctttgctcatcatttccaatgcacggaaacgcacatcataagcaaatccaggaactttaccttcggaatatactacatcaagtggaacataatcccaaacttggaatctcataccttctgcttcttcggcagagattgttcctttaatggccttattagccaaaccgtttgattctgtacgagccgtctgttggaattccttagccttacttagctcaggaagctcaggctctttaaacatatcaaacaggtcgttttcttcttctttcacttcgacatgatataccaactcgccatcaatcatcacaccattaggatggcgttctcgggcttctttggtcatctcgataagttggcgcttaagtttatctagacctaggtattcattaccggaacgagtaagaagagttacatcatctaattcatctccgcggatttcagcgaagcatcgggctccatcagctttaagttgtgcgaacgcagggaacttaatatacgatagcgctttctcagagtaggctgatgctaacatctgtggcatctcaggaattaatttcttccataccttattagcaatagaacctgaagctccgcaacgcatatctttaagaaggacacggaccagtacactagcatcaccctcgttcatcttagagagcaaatctactagcccctggattgccatattaccagtaagtactcgtgctgccagaatgtcttggaggtaatctagaccatctgaaaacgtctttgaaggaacatttggatatttaacgggagtatattctggaactttcttaataaaaaatttaaatcgcccggaatacgccagcagataagctcgctttaaatcaacgttatctttattgtcaatgagaatttgggttttggctttagaacccttagcatcttcaattgctttgatgatatcaaaaatcattattcacctaattcttttgaaagttcgcttacactacgatgataagttaatccatcaatataaacaaacccgttattgatgcattcattccaaatcgggcacgactttgcttcacgccaaattggattccaacgataaaactgattaacatgaccataatcacatgataaccagcgtttacccaccttagtatgaactacaaacatatttcctcctagggtatggcaattataccatacccagagtgttagcaattaatttggtgattatcacatgtaatacgaccgttattccaccagtcgtttccaggaggaacatgcgaaccaggtctaaacggaatgataggttgtttccaccaatctcctggaacttgtcgtggaggccaattaaaaagatgttgctctttacgaatttggtctttgatagcttcttcccacaatccagaaagagacttctgcggtttcttaacggatttcagagattccaggcaagttacgatttgatgccaatcttctaccaaaattccaggagcagtgacagaaccttcacgctcgccacgaggcatatagaacacacgggtttcagtgtcttcaaatactttactggccgcagcaatatgtttaggcaaatcatctacatagcagacgatgcgatcgccgtattttactttagccttttccagtaaagcatctttagattcatcataatcgcagaccatgatttctgtaaatgcatcagggaacaaagcattcagattgaaacgacgattaaggttagcatctactgagttgccaagagccgtgatagcgacaaaatcgtatttttctttgagcttattaactgtagctaaagcatcagcatacggagcaagataacgaataaaatcgctgttgttatacttcagaagcagcttaacagctagttcttcttcacaatcaaacagctcagcgggtttaatgaatttttcagtagtcatcatatcaaggatatgctctaccggaaggttatatttttgggcaaagtaaggcagaccactttgccacttaacgatgattccatcaacatcggttgcgattacaggttttgacattcggggaaattcctcaatgcttgtttaaatttggcaacgctatttgcggcaccggtgaaattgaaccagattaaccctggagtgtccgagggttctatatcaattaattctatattataatactcagcagtctttagcatttccctggtgatacgtcgggcaaccatatgaccgaaatgaggattaatagacatcgtcgttagcagcccttaattgagtaatcggataaagctcggattctgcatggattgaacgattgccatcaacccagttgacttcataccaaggctcaaccgagtaggctttaatggctggagccgtgtcacatacaactccaggaattccatttgctaatcttactgtactgaagatatgatatttcatgcatcaagtctcactgcccattcgggcaattcaaagaaatccggagcatcaatttcatactcaacggtgtgttgtttaacatcagctgacatgatatcaaccattgggtggtttttcaaactgcaagaaaaaataccagctttagatttaggcacggatacgatcattttaatttcctcaaaatttagttatgaatttttctttcggcatttttgcatttgagccatcactgtcagaatacccaattggcatagttgcattaatgaattcaattttagcatttataacattaatgctcagagaatctacgccgtcaatcatgcgaaattcagaagggcaatatttatcaatgtatgctttcacgccatttttattagcaggtgtaccatcgcgagtatcgctgataatggtttcaacttttttctttcgtgaatcatagaaagctgatacaatcatttcaatttcctcttaaaacgggcgaatattaacgtgaactacagggatagcaaaaggttgcatgattacaacttttgtgtctttagttgcattcaggcgttgtacttttgcaagattaacagcttcttcctttgttaatccaccattgtaggtatcatttcctttatttgaggtccaaacaccccaatcattgcttccatcatcggtcttcggttcaggttctttgtagacggtttcttcaaaataatgctgaaactcttgattagtaagaatacaccacatgtgagaaaagcgaacttcatctacactaacgcgtttatattccccatctggcttaatgatttcaaattcaactaatccggtattttccgcatatttaaaggttctggtaattttaatcggattattaccgatttgctcaaaaacacccttgataagagcgcctggagacaagattggagtcttttaagcttatagaatttacctttttccattatcatttcctcaatagtggggccgaagccccgagttagttaaaacttgatttcgtttgaaacgatatcccagattgcttcacgttgttcttcggttgttttacgaccgaggatgtggcgaagataaatcttaacaagcagctgacgatttgtgttccaagacggatgtgaagataaatcacgtttacgaacttcatcatggaatccaactttgatttcagaaccgttgaactgaatatccagagtaggaccattttcaaagctgaagaatacgtagttatcttcccagtacatatcgatttgagctactgtgccattgttgtgttcccaaagcaaagtagtagaaacgtcccaagcattgttctgtacgtatttgcggttgaagttagtgaagttcattttattctccgttgtccgtttgggtggtacaggtctatagtaaccttgttgaacttagaagtaaacaacttttttcattctgtggaaaataaaaaagggactcccgaaggagtccctgaacttatgctttcggcttaccaaaacgagaagcatcatcgcgaagaaccgcacgagcccgacgcatgattttctcaaccgtctgattgatacgcttgttcgacccacgcttgtagccagcgcgtttagaggtaccaacaacttcttttactgcagtttttgctttagcttgtttagccattttatcatcttccattttggagaaatacatgggagcacgttcttccgaggttcaacttctttcgacagttctttcggttgtagctcccgcaagccctcaaggggtacgtttaaactcttatctgttgcacaccgttagcttaaaggttccgggtctgatttctcagggataagatatacaccgatggatgtataggccttgaggcgtactcccgattggccatcgcctcggggtagcatgcacttgccgtttattttctagctgcactttggtagcaaatcaccgatggtttcggatgttttacgtggggataaccaacaacgtccacatcatacgttacccatgcgtacacatggtgggcgtacaaattacttcagcgttaccacaaagtggcgaacagctttgcgagcagcagaaccaagatgcttagcatacttcagttcgtccatcgcttctaaagtatcacgaaattcagcttgtgctgggttcaggtgtttaaaccctttcagaacttccagtgcttctgcatagatatcgattgaagccccgtagttttcgtgaccggaattccatgcattacgttggagttccagagctttagtaagttgtttgttcattgaatcgttcctcaaatgaggttaaaatttggtggacggtaaccgaggtttagctcgggcatccaccgcttagaattgctcgggtaactaattgtccgacgcccaattcatattattatttatatacgcatgcaagggacttataatgacaagtcacaaacttctgccgaatttctttaggtttcttcacacctgctgctactaacggatgaggtacatttctgatattaccaacaggcagtggagtcaaatcaccgacttcaacaaatcctttcggtacatcatcaccgatagaatagatttcacacatatccggcagttgtccttgttcttcttttccaagaataataccggaaggagaaacaatttcatcaccttgctgtgcaggttcagatacgagaattacatactcgcctagagctttaattggaagttccatgtgttacctttattgtttgaccatgtagttatattaacatggtcagtttaaagcaaattacttaccgatcatctgcagcagatgctcaactttcataccatttaccgagatcagtttatcaaaggtaaatgagcgccaaccttctttctcggtatcatataccggaagtgaagtagtgctttctgttcgtgcagatttagtagtactttctaccaaatcagatggaataatgtctttatcacgagtacagcgcagagtacgaatagtaccatcagctttttcaaacacaatctgggattcacccatgctcagcacagctttaagtgtttcacggatatggatgttttgttcagtagtcagtttcattttgatgtctctttaatagttttgataattacagatttgcgcttggataattcttttaataatcgaactgcttgatcttcaaatttaaatgttgctaatggtttccatttaaaccaataccggcgttctactgagtatgatataacaacatcaccacttaggttaagtttattaatttcaacaattctaagtttcattattcaattccacagaattctttaatgttataccaattcaacttatccaaattacgttttggaacattgaacacctcgattccagcagaacgaagaatatcgtcccaaccgggttcgttcttgtcgtatgtttcgcagtatactaattttttaataccagactgagcgatggcttttgcacaatctggacatggagacagtgtgacatacattgttgctccatcaatactactgccgttccgggcagcaaaaagaatagcattaagctcagcatggatttcattgactttagaccatgcagagtgggctgctcgatgttctttgagcaatccgacttttttgacttggaatccgtcttgacgcaatcctgtagatttgtaaggaatttcaccaatccaaccttgttctgctgcatggtcacaacagttcacaccaccagaaggtgaaccgttatagccagtagaaataattcgtccgttcttttcaattactgcgccgactttccacgagcagcattttgactcttgagatacgagatacgcaatttgtagtactgtcgacgctttcatttaaatcaccagataagttgtgttatttgttttaaccaattttaactcgtcggtaggagaagcaaaactctctactcgagaagtacgaatgcctgtaccatctggaaacggatgatttcctcgttcaataacatcggaaaagacataaccataaagaggttggccttccttaacatcaacgttactgtacaaaatagcatcatattcttcgcgtggaattgaccaaacgccttggtcagaaccaataacggcattaattagacgaataccatttgggctgatttctgctttaatgccacgagcatgttcaattaaaagagcttctaccgcttcacgtaaagtcattagatatgtcctaaaatgttagtcatttcaacttggcctgttccggttaaagccaattgagtatgttgattactctttccattattaactgtaatgatataagcatcgacatagttaaaggatgactctcgtcggagagtcactttacttccaggaacccggtttgctacttcctgtgcgaagattttaaccttcgcaataaattcatcatgcgaaaatttagcatcagacaacataagtcatgacctgttgggtttcaaaattagcaataattccaacgataaaccagtcgtgttcaccttcgccacaagaaattttaacttcagatgaaccgcctgagcggtcaatagaaaatttaataacttcgccgtttggaataagtgcattcatggcagataaaaactctgcatgcattttggctacttcagatggagtaaactcatctgttaaatgattagcaacaacttgcgtaaatgatacttttactacttcggaatactttggaaacattatactttcctctaaaaatcaccgtgggctacttgccagcattcaacaccaatacgacgccacatttcaactacctgcgccctgtcatctactgcaagtttgacattataacgatcagcaattcggtcccagaagatttcttcttttaccacatcgtctttgcgtgaatcgccttgcttacgttggaagtgttcgcctgtttcgccaacatggtccaacaaccatttcttcgtaatgcgttgataaacagtagggtcttctttagtaccagactctctgccggaaacagtaagaattttatatcctttgttacgaagcattttaagaaattcaattaccatttcctttggatggtctttaccgcatttggccaagtcataaggagaacggtgattgttatctgctaatgttccgtcaaggtcaaaaataactgcttttggcagtgattcgtctggaatgtacaaatcatatgggtgcatcttagaatagaagctacgaagcacttcaataggaactgcattcgcgccacgatagaggttacgattaagcaattcagtccaaggaacgtcaaagcgtttaatttcccacttgacaccatcaatttcatatgccaactcttgccacttcttgatagtcgttggattaaggttagtatcagcaatgatgacacctttagtggtttccatctcgagtagagtcttcgccatagaaaactgacatacagatacggacttctcacgaagcttagaatatttgtaatcattacgtttatcaaggccaaagatgccttcacgcaaatcatcacgagacaaaacataccaaccaggattagctgctacgtattcgttagcccaggttgttttaccagagcctggagccccttgtgtcaaaaccaattttttcattatacatccttaagagtgtcaataaaatcatgaagagccttagacttttcaccccaattagcacgatatttttctttaattgctcgcaatggcttattcattgacagtatatcatttttgtcataattttcagctgcgcgtccaaacacgatgcacgccaattcattttcagcaattaaccctttaagtgtttcatactgctctcggttcattataataccatcacttaatacaacgtggttctttaagttcagaacgataataacatatcattccgttagcatctttagtataacgtaaaatgtcattcatccagatgcgatactcttgagactcttcaaacggcataccaacccaggctttaccgtcaattacttttacttcccaatgtccttcccatttttgaattgggtctggccactcaggatgcaaaaccgggacatccggtgcactagaagagcatccagcaagtaagctgataatacccatggctaatagacttcgtttcatctggtagcctcctggatatcttctgcaaacttattgaagcttgcattaatctgtttttcaactaacccaggtttagctgcaactacgtttccacgcttagcatctttattcatcttagcgttggaagtatcacgagctgctcggttttcctgatagcctttataggttgtctgcagattttttatagaaacaccgatattttctatttcttttgcttgtcgatcagattcatcttggacgactttgaggtcagctttaagattttctacccgccacgaaagatatttcaatccggcggcggataatgctaacactccaatcatcaaccaagttgcgtttattttgagcatagtttaaggataacctctacgatatcatcacgggataatcccgaaatgaggatgtgacgatcagaactttccgaaggagaacacttgaagcaagcttctacatattctgccatctcagaataattcagctcgcgatgcataatgccaagacgatgcttgccataaatcgggtcaacgattacatagcatttgcatccgttagcatgaacgtttggctgggtgatgttcttgaacacctctgcaccatacttcgcgagatgattatctaggaaatcaatcatttcatctacggcttcaggaagggcttcggcacgctgctcgttcacacgattagtgtactctttttgcttcttacgagcagcttccttgcgcgccatgtgcgtccgtaggtcagtgacgaagcccacctttttggtaccattccacacaaaaatcccatcagaatgagtaccatatttgttaacaaccatatctaaagtaattgcttgcatatccatttcaatatcctcatcagtttgtgtaagtttatagtatcacactctgatgaggatgtaaacaactattcttcagaaatttcaatttctttttcgtactcttttggaacatatcctgcccagtacttcaagaacactctttcaaggtctttaagcagtttatctacatctacagttccttcgtacatgttcatgataacaccaaaaagatgacgctgattaaccgttgctttctgagcagcaatagcgtagtctttacgagcacggcctctgtattcatcgtagaacgactgacatagctcaagtgactttccgaggtaatctagataagcttgttcaaacgcagaaattttcttaattgcgtattcgtctccagcaaaaagagaacgcaagtcatcggaatttgcagatacgacagacgcaaacagtctttcatttgacgttattgagtctttagtgtgatgaagagcagagtaccattcggttttaaccttaaatctctgcccagtgtttagaactgcaatgtacccttctacgccttcaagttcacgaacaccttcaacccaagtggtggggtcagaaattccgtaagcactgattaaataaggacgaattttagcattagcgtacaaatcatcatacttaacatactcgccggttgcgttatcacggacgtttaacacaaacaactgtggctcctgatatgctaaaacaacacgattattaggtgaaacaaattccatgtttaccgtataaccatctagcgctagctcaagaataacctgatgaagcgaagaatattcttcactgttaagcaaagctgaagcttgtcttgcctggtcactgtagagagatgtttttgacttaaggtatagatacccatcatcgacataagatgatactagagagccatcagccttatccataatgtattctacatcgctaatatcaattcccatcgttagtgggttttcattcaaattgaagaatttttccatcggacgcgaagcaattcgaattggggtatcgccatccatctcaaacatgataccgcggcactcaagagcatcgggttttaaccactcactgtagcttgcgtagtgatatgaaaacactctgaacttaccatccataggaccggtaaaatctttataaaagaattttgcaacttctgagctttcacacagattcattaaatttttatatagctctaacatttctttaccttatgttgtgtgttccatggaggattgaacttcttaatcagaagtggttcttccaagtccatagtggatattgacatctcgccaagttcattattaatcgaaagattaaagcactgacgagcatagaactctacttttttgccagccattaatgcttcaaaaatcttggcagatttagctgaatcagaggtttggtctttccgattaatagcagttctataataatttatacgtttacgaagattttttgtcttaccgatgtaaaccagctcatcatcaactgcgatggcataaactacattcaacttgtttgctaccaaaacgggtttaatactgaaatcaggttctaactcaagttgaacatattttataaaagaaaactcgttagcaatatcattcataataaagaggggcccgaagcccctttccttataagtactttttaaatccaattagaacatcatcagtgacatcattgtcaatctgagctaccagataagaacttatctcaacttcctgaggagcagattggactgcatcagagttaagatattcgcgaatccaaggaataggatgtcgaataggtgcatcagtaatcggacaaggaagaccacaactacgcatacgagatacagtcagatagtcaatgaagtcatgaagaattttaacattcagtcccggaagaccaccgttgcggaaaagatggatagcccaatctttttcttggcggttaacttccatgaagattttaattgcttcttgttcacactctttagcaatctcaacccattcttcgccatcagtgccagtttgaagttgacgcagaatgtactgtgtgcccttcagatgaagttgttcatcacgagcaatgaacttcatgattttggcattaccttccatgatttccatatttttatggaagttgaaggtacatgcaaaactgacatagaaacgaatggcttctaacgcgttaataacatgtaaacaaaggtacatagccttcatcagataatgcttagcttgtttaatctcaatgttatctggattaaagcagcgttcttgagcatttagccatttgcggtgagcttctgtaacagcatcatagtaaacaccgatagattcagcacgtttcatgatagcttcatcaagaacgatttcatcaaagattttagctgggtctacataaaggttacgcatgatatgtgtgtatgaacggctgtgaatagtttcactgaacgtccaagtctggttccaagtatctaggcttgggtcagaaataagtgcagataaaactgctgctggagctcgtccttgaattgaatcaagaagagattggtacttcaagttatcagtgaagatattacgctgatgttctgggagtttttcaaactgaccacggtccatcataacgttaacttcttcaggacgccaaaagaaactcaattgcttctcaatgagttcctcgaatactttatgacgctgaatatcatagcgtgcaattcctagaccagaaccaaagaacatcggttcggtcatgatatctacttgcttggtattaaaaactgtactcattctatttcctattctgtggtgttaaccatccgtggtctaattataattcccttttattaaagcttacaggccgcgcagtcagcagagtcttgaatcatatcatcgttaccggaaccgtcacgggtgttatgatagtaaagagtcttaccgccaaagtaccagaaataaagcaagtcgtccatcattaccgacatttcaactttacctttagggaaattcgccgggtcgtaataagtattagcagagatgctttggtctacaaatttctgcataatcagaacctggttcagataaggcttattaccctgtttcgcgagctgccaggcataatcataaagggaagcattgtgttcaacatttggaacgacttggttgaagcttccttcttttgattctttaactgacactggtccacgtggtggttcaataccattggtagagtttgatacctggctagacgattcgcatggcataagcgcagataacgttgaatttcggataccgtatcgcttgaggtcttctcgcaggagttcccagtcacagacatagtttggagctgcgagttggtcaattctttcgttgtaccagtcaataggcagttcaccacgtccgtatcgtgtttctttgtaaagcgtgcatggacctttttcgctagcaagtttaacagaggctttgatgagtgcatattgaatacgttccatcatttcgtgagtaatatcattagcatctgcgtatgaagcaaagttgcttgctaaccaagctgcatagttagtaatgccaacacctagtgctcgacggtctttagcttttaacgctttgtctacaggatagtcttggtaatccaaaaggttatccaaagcccttaccattacttctgcgatttcgttaacttcttcttggtcttgccagttgaagttgtcgagtacgaatgctgcgagtgtgcatagcgcgatttcgccatcttcttggccaacatccgaagttggtaacgcaatttcgaggcagaggtttgattgcttaaccgtagccacatcacgaataaaaggaccatattcaccaacgttatctaccatgtacgggtaaattcgagcagtaccagcacgttcagtaaggaacaactcaaacagttcacgagctttaatacgtttctttcttatatctgggttcttttccagttcttcatataatgtacggaacgcttgagcatcacggaagtattctgtgtacaaagtaccaagacacacatcgggactgaacaatgtgatgtaatcattcttaatcaagcgttcaatcatcaggttattaatctgaacaccataatctaaatgacgaatacggttttcatctacacctttgttgttcttaagtacgaggaggttttcaacttccaagtgccagattggatagtacagtgtcgccgcgccaccacggactccaccttgggagcaggatttaactgctgtttggaagtgcttccagaaaggaataactccagtatgtttgacttcaccgaatccaatttttgaaccttctgcacgaatcatacctgcattaataccaatacctgcacgcttactgatgtattttgtaattgacgcagcagcttcattaattgaattaagactgtcaccgccttcaataaccacacatgaactaaactggcgtgtcggagtacgaacaccagacataattggagttggcaatgaaatctttttagtagaaactgcatcataaaaacgaataacgtttgctaaacgattttcgccatcgtcttggtgcaagcacataccgatcagcataaaggcaaactgcggtgtttcatacaattcaccagtgtgacggtcttttacgagatacttctcgataagttgcattgttcctgcgtaagtcatagtgaaatcacgctcatgcttaatataagaatcaagcaaagcaatttcttctgctgaccatttgctcaggatttctttatcatacttatttgcgttaacacaacgagaaatgtggtcaataaatgcaggcggttcaaactgtccataaacacgcttgcggatttcaaacattgccgcattggatgctacatattggtaatccggttcatcaatagaaatgctattcgccgctaccttaacgatagtcttttggatatctgcagtgctcatgccatcacgtagatgggatttaataatttcatataactcgtatgggtctactttggttccttcgcacgcccattcgaggactttaatgattttctgcatgtcaaattcttgactaacacctgagctcttaattacttgcataagtcctctaattcaaatgtatctttaaaaagtttattcactacaagagctattatatcaccatggcaaggaagcggtttgcaggtgcatcctaatctcattcctcttaaagtttctaagtgctctcgctttatttctccgttccgaatcttagcaataaaatcgtccttaaacgcagcaatagcatcaggacgattatcgcaatctttaccgacgtaatttccccacattgttcctcgttggatatttacatcgaagtcggaatggtatttattaaccacccgacatatcttcatgttatatcaacttcaaaccaacagattaattgtgttttgcctatagaccattcatatgatttaacaatagacagaaccctttgttcgatcccgtcaaaaactatcttgtcattaacttcaggcaaatcgctagagaatgcatcacacatctcgcctaatattgtttgtcctttacgaataaatcgaatattcatacagccattttccccttaattgttgagtgagattcatatccaactaattcaaagtggtgtggacgtgcaaactgctctaaccaacgaacctgagaaccagtctgccatgtttcatacgtatccggaaatgctattttaagttcgcataactctttaggttctcggcggagaatttctttgcattgctcaatgtgattcatgtaaatgtgagtattaccaccagtgaataccaaatgaccaggtttaagattggtcattttagcaataacatgaatcaatgcagcatacgaagcaatgttaaatggaagacccaagaacacatcaacagaacgctgataccactgaaggtctaaatatccattgcgaacgttgaactgatacatcatatgacacggtggcaatgccatcaggttcaaatcaattgggttccaagcagtcacaatctgacgacgatcagttggcaattgcttaatacggtcaataaccaatttcaattggtcaacacccatgaaatctcgccactgtttgccatacacagggcctagttcaccaccagaatatcccatgtcttttgcctggttttcatagttgtcgtcccagacagttttaccttctagcaatgaaccatgctgaataagacgcaattcatgaacattagtagaaccacgcaagaaccaaatcagctctgcaatgcatgctttccatgcaagacgcttagtagttacagcaggaaatcctttttgtaaatcaaaccgaagctgggtaccaaactttgcgatagtaccggtaccagtacggtcatcagtctcgtatccattttcaaaaatatctttaattaattcttggtattcacgcattaaatttttcctgaagaggtgtaaagaaaagctggtctccacgcttttcaaatcgtccaataatagacactacatcatctttgaccatcacattgccatgtgacattccgatgaacatcttcttataatcacgttcaatttcaataggtatatttccacttcggttatatactgtagttgaaccgttataagtgctaagaccattataactgaaaactagaagatgaataccatgcttaaatggaaatcttttccacctcttttggactttgtcttctgatagctgaatgatatcatagtttgcgctcatagaccacctctgaaatgttagtcacttcatcaatatgataccagtgattttctttagtaatgaatcctgattctggccaagtaggagccaccacaaacgcaataggcagagtgacatcagaattcactctatgactttttctgatgattgtttggataaccttatctgcgtatggatatgccttctggatgattccggcaccacctatgatagaataattaaggtctctattaaaagtgatagtactgttgtaagaagtatgagcggccataatgtcaccacccaagaaaccgataaattcttcttcactaacatacgcgtcagcaaaaaatccgtttttagcagttgccaacgcacgactcatgtcttggacaacgattgtcttacgaccaggaagaggtttaggaaaactcatgaaagtctttgctccgcaaatcaagatagtatctcgagtacgattagcaaagtttttcatatcctgggaaatatgtttccaaggaagaccatcgcctaaaccaaaagcattttcgtttttgccatctacagtttttgtaggagcaaaggcataaactatttgaatcatttaaacctcaataaaatttagccatataaaaataatcctaatataatgccgctaataaaagctgcagtaacagaaattagcaaaactactaattcagcctcaatcatttcttggccttagcaagtttaaatgcttttttgaattcttcaacatcttcaactggaatccagaagcctgagccatacccatcttcatagcatggacagttatcacagtaatcattccaatagacagtttcaccacccatagtgaatggagcttccatttggcacagtacttcttcaacacgctctaattcttctgggtttttatcgcaaatgcagaaattccatttaccacgatattcagaaccaagtttgatgctttgacgttgaagtttcatttttattctccagtagattatggagctatactatcacaagcatagctccgtgtaaacagttattcttcaaaatcttccataaagtaatcaatgtcgtcccattccagagattcaagatatgcaataaccttttctctagaaccgcggaggtcaatatttggccaaccaccaccaggtccatgacgcacaatcaagtcaaaatcaataccatggtcagtgtcataaaaacgtgtaccatctgcatactccaaatctacacaaataccgtctttgttgataataggagttgctacgatatcaatgtttaatttacccatgatgttttcctctactcattttgtttcgatgtagatatagtatcactcatcaactggcttgtaaacaactttgtgaaaatatttttggagggataaagaaaaagggacccgaaggtccctttatattagaggtcgttcagaatatcattcagatcgtcatcgccaacactgtcaccagcatcgcccatgatatcgtctgcggaacgagaagaggtcggtttggattcaaaatcagacaggtctttgtcaaaggaatccaggtcatcaccaattttatcggcttgagctgctgcttttgccgcggcaccaccaagagctgctgtacccataatctgtttaaatttggcttcgttaacttcaaacgatttaaactgagatggagccacaatttcgctgaggtcagccatattttcggtcaggaatttctgagtttcttcatcattgatgtttgcaatctcggactgaccaaggaatttacattcatcatagttctggaaaccaccgactttcttaactttcatgacgaagtttgcaccttcatacacgcaagttacatcaaccggagtttcacccatatcaacatcgacttcaaccatcgcgttgattttgtccataattttctgaccgaaacggaatttgaatactttaccttcgttttctgggttagccgggtctttaataaccaggatgttagaccagaaagaggttttacgtttcagaagcttatattcagctgggttgctgttataagaatcgtttttactcagatgagcacaaaccgggcaagaatcaaaatcaccgtgagtagaagtacatgtttcaatgtaccatttaccgccgtgtttgaaaccgtgattgatcagttttacaaacggtagagagttttcatctttaccaggcaggaagcgaattactgcttgtccattaccagcattatcggtcttcagtttccattcgtttttgtcttcgttagagaaagaagaaccacctttcagacccgccagttgttgttgaagttgagcaggatttttacgcttaaacatatgattacctttttaatttaacagttgttgttgcaacatgggtccttgcaactggacgatagattaattatatactaatttctttacaagatttgattatgctaataaagagtttcttagcttcagcaccgtcaacgtttaaaagttttttataagcttttaatttagtagagtaattactccaaactaagttatccgttgcagtatcatgtgtatttattatatctaaaaacgagtcaagcatgatgaatgtctcgaaagatataacgtttgactgaagaagtttgaacacataagatgttccgactttctcattatattcaaaaatatcatgaagcttatctacattaactttcttagcaaagtagtaaatattctttacgtcttcagagaatgtatttttgatttgcttcaacttaccgatgtattcacgatagaatatcaacgcgtcagcgtcactgatatcaccaatccatgcatcttggttagctacgaggttactcatgaatatcagtgttaactcttttaatgtatatttctcagcgagtttctcaaagaaatatttgtctctacgcttttgataagctttatcagagacacgcatgacccaattatacttaacaacatcatatcgaccagcgaagtgttgtttgagcattaaatataaaagataaacgctcttaccgttaacgtatctattattgttttggggcatgcgtagacgaatcataataaaaaatccagactattcgttttgtgtgtttgactaaatgatggacgaagcatattttcttccaatgcttctgacataattttttctatgattgctggaggaatatatctattgaagtttccctcaggaatagaattttcttctaaccactgagttgttgcttcaagataccccattccaagttctgttaccatagattcgatagcaaatccattagcttgcttatctagcagctggttaatggattcggagggggacacatccccctcatctttaagcgaaaatagagtcataagcttctaccacttcgtccttttcagtttcataacgatcgcgtgtacctttatggaacagggcaagcagctgattaaataatttgccttctacaccaagctctttcttggcgcggtctttaatgtctttgttaagctcaagatagctttctgcttttagcttattacctgaggcttccttaatcatatctcgcagagcctgtccatgtaccgcttcatcaaatactacttgctctttttctttcttagccattatattcaccttaaaagttgttaatttctttcattaatttagacagaccggatttaacaaagtagctataaattttaccacgacccggtaattgatagttattataacaatctaaaatgttagcaacaatgtcttcgcggatgtaatcaaaatcgattaacacacggttttccaagaaacgcttatactgttcttcagtaagcaagtctttaatgttttcgccagcatcaagacattcttcaacaaatgtcattttcgttgaaggagtacgctcaccatcaacatgagtgtaccaaaaatctgaacgaactttaatagaagcgacgttatctttcttgtcacctttaataattttaaccatacaatctaaagcaggagaacccgttttagatttcaccaatttcttctgcattggtgaccattgcttaacattaggatacttatgcaattgagtaaagtcaccatcagaagaaacaatcataacaggatgaccttcgagactgaactttttggtcagtacagcaatactgtcatcagcttcagctttatcaatgtcaatgacgtaataaggcatatactgcttaaattcatcaattacagtacgaagaccttcaaagtaaccttcccaatcccaattggattcttcacgggctttagcacggttctttttataataatatgctacatcccggcgccagtatccattgattgcattatcaacacaaatgacaatttttgtgtatccatctttcttccacttaaaagcattaaattttaaagtagaaagaataagatgacgaaccataggagtggttagtttatcgccttctttatacgtatgaaggattgtcgccattgcgatttgcgacaagtcaatcagaatgacgccttcttttacttggtcttcttcggcgaataagcaatttaaatcagacatttgaacctcgttcaattagttagtacagccattataaatacttctataatgaagcataacccccataggagactctatgagcgatttactgaaacaacatttccgtgcaacgaacggcttggacgcaggcggaaataaagttataaatgtggcactagctgaccgcaacgttaaaaccgacggcgtctccgtcgagtacgttattcaagaaaacactatccaaaaatatgacccgacgcgtgggtatctcactgattttgctgtgacttatggacgtcgtatctggattgcaaataaagatattccaaagcctgctggaaattttaaccaggcgaattggacttctttacgtgttgacccgaactggatttataccgtccgtaaaggagagtttgaaattcaatctggtcagttcatcaacgttgactctaacgctgcaggtaatgctacattactgcttccgttagcaccagatgaaggcgataccatcgtagttcgtgatattggcgggcgtcctggctataacggaatcttaattaaagcgcaaaatactggcgcgtctatcgtatttggtgaatcgcgtctacgtgaggtaagacttacacgtccgtattcacaaattatgcttacgtttagtaatggtgcatggcgtgcaagtttaaccgattttggcgatactgctaaaatggtagttccgaacgggattgttccaactcaggtacagtcaggtgataacgtagttcgtcgttatacttccaactcagagatttttattactctgccgttgttcgctaattcaaacgatatcatcaattttactgaccttgacggtacatcgccaattaaccatatgactgtgcgtacgtttgacccaactatctcgattgggactcctggacaaacagaggttcaagtacgtacttcaggtaatggatttttggtatatgactcgattgacaaaatctggcgtatttttgaaaatgatttacgcacccgagtaagaataattacttctgacgttactttaatgcctaatgagcatatttctgtatttggcgcagataacaataccgttaaaacaattaacgttactttgcctacagacgtagctgttggggatactgtcacaatcgcaatgaattatatgcgtaaaggacagactgtagtaattaaagcttctgatggtgataccatcgcgagtaatttgaatttactgcaatttccaaaacgttcagagtatccacccgatgcagcatgggtgcaatcaagctcgattacctttaacggaactacatcgtatattcctgttcttggacttgcatatattgaagataaagcatccggaaaaagctattggattgtaactgaatctgatcctaccgtagaacgtgttgatgctaaagacaatactaccagagcacgattaggtgttattgctcttgctacacaggctcaagctaacgcggagtcaagtccagaaaaagaattagcaattacgccagagacattaaatggacgtcgttctactgaaacccaaactggtatagcaagaattgcaacttccagcgaagttaatcagtcaacaactgcttcttacttggataatgtaatcgttactcctaaaaagcttaacgaaagagctgctactgaaactcgtagaggtttagcagagattgcgactaatgctaaaatggacgcaggtgaagacgattttacaattgttactcctaagaagttgctttatcgcactacatcggattcacggttaggtgttattcaattagtaaaaactggcggtgctcctaacacaactgctgatcgttcttctgctggcaccggtatattcgatcattctgattacaaaaatgcagttactccaaaaactcttcgcgagtataaagctactgtaaatcagtcaggaatagtttggttagcaagcgatagtgaagttagaaacggaactccttctgcttcaaatattcctacagtcgttacaccggaagctttgcataaaaaagttgctactgacggagcaattggattaatccaaatagctacacaaactgaagttaatgctggcggcgtgactaataaagcagttacacctaaaacattaaatgaccgtacagcaactaacgatcgtactggtattgctcgcttcgcgacacctggtgcccagggtgaatttgaagctggtacttcaagtacagtaatggtaaaccctaaattattatttgataaatttgctaatactgatcgtatccaagttaatactagttctggcttaactattactgggaacctctgggaccattataccatcaacatacaggaagcaagtacttctcaaagaggtacaaccactcttgcaactgctgctgaggttataaccggcaccgacgccaagaaaatagttacttctgccacgttgcacgcgaaaacagcaaccgaaggagctatcggtcttgctcagtatgctacacaggcacaagttgatgcaggcacattaagtgatagaattgtttctcctgcttacttgaaacagactattcaggtaacagagtcgtggcaagctacagacagcgttagagggaccgtgaggctatctacaggcgatggaacgtggaaaggtaatgataccgatggctcaactcttccggataacgggtatgcctctaagggcgtcgcagtgtctccatatgaattgaaccttacactgaaacattacttgcctcgtctcggtaaagcctatgacacaggaatgttaggtggtcaaaccccagacaaatatgcccgtcgcgatatagcgcaaactatttctggagcttggtcatttagtcaggacacttcatttagcaataatatttctgtccagaatattatatatgctaatggtggtgaagttaaaatttctccaactgctgacaccggaaacgtgcatgttcgttttcagaatagagatggaactgaacgtggtataatttatgctgagccgcaaactgcttcagctggaactttaaaaattcgtgtcaaaaacggaaccggaactactgctacaagtcaaacttatgtatttggcggtaacggtacgttagaagttcctaacgaagtgtcaactaaaactctgaggtcttctggaaatgcaatagttggcggaactgttatggttaaggacgttcagatgcttgccgtcgagggattgaattcaatattcggcgcccaatcacagtccgcatttattcgttcccgtgacgctgatacacaaatttttgcacaggattcaactggatcgtatccaattttaactaccaaaaactatgcaagactagctgatggccgttatgttaataaagctggcgataccatgactggtaatcttaacttaagcagttctgctatcgtcattacaggttctgaatcatggtatgttccaacgaatgaaactgtactgagacaaggttcttggactgctgaaattaaagacgctactaaactaaaaggtcttcgcggttatatggttccaatcagaacaccgattgaccctgctaacccaagcactttagtagtgaccggatatgaagaaaaaactgcagctggtggtgttttaactcaggttggtgtaactacaaacaatacttatcaactttggacgccttatcctccgacaaccgaaactgccgataagcgtttcgcgcatactgtgtggatgaggatttataatccaaaccttaataagtttgatgattggatgcgagtgttcacgtctgctactcctccgactgcagctgatattggtgctccgagctcagtatcaactcaggttaaaacccttgaagtcctggaatggattaagcttggcccagttaaaatctggccagaccgtccaaaccaaactctcaaatttgaatgggtaggtgattaatggctgaaccaattttaatggcagcctttggcgaggatttcgtggaaacacgaatcctctctgaggcaaactctgtgaagtattggctaaaagcttatgctacgcattctaatgctgttcctaataagccagaattgaatattaatggtgcctttgatatgacctcctccttacggagggggattaatgttgttcaagttaatggtgacagttttattaactttaaaacatttgacgttaccactgatgataacaacgctaataacaaagcatttgtagaatatgcaaatggattaacttcgggattgtatattataatgacgcatgaacgatttcagtctagtccgttgatagatagatggtttaaaaacaagtggtctgcttcttggccaggttctgacttttctaaatcatttccaaactccgcctatgttggagtgctcggagcagcaaaaggacgtatattaattgagtcattttacggaaatgatggcgtagtcaaagaagattccagagctaaagtcgatacagtgtatgataacgttgacgatgtaggatatacaggctgcccttatcgttccattgaagacactaatgagtactcggattctactggatatgaatataagcgatatccagtacaaaatgaatctataagcaaaatcgctgattatggattatctcccggggattcggtgtttttagtgtgtgatatgtatgcatctaaaagccttcttgatgcaggttctactactagggctaacttgagatggttcaagggcacatctttattatcttcaagcgtatcattagaaattccaaaaaatggagctgatagatggctaagatttgaaagatttaccgctgttcctacagacgctgatggatttactattgtggtatcacgatatccaaaaacgtccgtagttggtgattctaaaatcaaaaaccttgtatttgttcaaaccgcgcacagcgaaaaacttaacagtgttgttcaagaatttggcgtgaatggcgtaagaatgaataaaggcgttgaaggaggaaccacagtgattatggaacttccaaattcaaaagtcgatccgagtggtgttattccagttcaatcgttcagagaaacatctgattaaggaagcctttgggcttccttttttcgtataaatagaaaatatataagaggataaactatggccgatttaaaagcaggttcaacagttggtggaaatcctatttggcacgcaggtacttttcctcttgtgccggcaggaaactccctaacttatagaggtgtaaaggtttatactgagatagataaacctcaagcaaatgataatgatttcgtatctaaagctaatggtggcacaggttctcaaggtttccaaaaggaagtcgaatttaaagaaggcgtaaaagtttctgcgaccttcagtggcggcaacagtttaaacgggctttattctggtaatggagactcagcatctctaacaacagcgaacattgacattgtttcatggtacggtgtcggtattcgtacttcactggatggtagagaacggacagtagtttggaacgctagaaccggggaccaaataaacaaaggaagtataacagcttctattcttagttctaataatgctcctacagccgctcagcatttaacgcgtaaagattatgtcgatggacgaataaatactgttagcaacgtagctaacgcagcagtcaagaaagctggtgataccatgacaggtgcactacgagctgaagctggcgtagttatagtaaacacagcaacatccggtgaatatgctcctagattagatcaggttatttcacgcggggtaacaatagattttggcacatactaagaggtagccatggccgatcaaaacttaaaacaaatacaatttaaaagaactagcacagagaataaagcaccaggtgcagatatcgtagcccgtggcgaaatcgcgttgaatacacatgggcgtactctcgctatctataccaaagatgaagctgataatgttgttcagcttgctggtaaaggtgttcctttcttagatacatctggaactcttagcgttgatggaactactacattaaaagacaacgttactatttctccgaataaagcgatcagttttgaaactactgatttaagcggtgaaataactcgtcatatcgttggcaaatgtgctactaatgatggctggtacattggtgccggtggtacaagcaataacggcattcttgaaatcggtactattgacgatggtactgaaacaatccagtttgtacaacgcggagccggcaacgtcgaagcccgaaaacttgtcttacttgatggttctggtaatactactcttcctggcgatttgagattatccaccaataaagccattaaaatttacagtggaagcactagtgttcttgaaatgggcgtaggagctaatgatgtctatattaaaaaccaaaaaggcgcaggtgttcttcaattaaccaatgatagtaacctgacgttcagaaattcccaggtttattatgccatgaacggaagaggtcctggtaaatccggtactcttctgacgaatgtagaaaacaatcgtcaagcctggcaatataccatttctgctgcaactgcgtcaactccacgctgggtaaaagtagctacaataaagcatccaggaatgggttcttcgcaactggatttaatgattagcggtggtattgattctgggcacggtagacattacgttgattttatcacgttatcaggacgaaatttaacatcatggagcaccaacagtttagataactgggttgaatggcgccgggttgggtctccttctaaaacgaacgttccagagtattacgttgttaaaaacgattctgctacagattcagaggcttcatttgatttttatgctaagattcctcgttatggcaatggcctttatgttacagtgctaaacactactggatacaacggccaagattcaggtacagtaattatctatgaaaccaatcaggacagtggtgatactggaccgtctggaagtattcttgtttcaatgaaacagatttttgatagtttagcaaaaccagatttcggtgataccacaggtactcttccggttaaccgtggtggtacaggtgctactaacgtaggagacgctcgaaataacttaggtttaggtactgcggctgttcgtgatgtcggtgaaggcactggtaatgttttagaaaatggcgcttatggcttaggtggcaacggtggtaaatccatcaatgacattgtctctaacgctgatatgttgacacgtttaaaggcttatggcggtactttctggcgtggtgttactaaatctggtgttagtgttcaaaatggtctttacaaccacggctccggtatttttatgaatgctggagacaccatgtcagccattaatatcgactacgctagtgctaaagttcgcgtatacgcggctaacaacacggctcttgccgcaggagatgtcaaatacaacgaactttacggcacagcaaataagccatctaaggctgacgtcggacttggtaatctgacaaacgatacccaagttaagaaagctggcgacaccatgactggtgatttaactgttcctaatttacatgcttccggcccgggtactgcatcagtatatgttaacgcaggaagcggaaacgctcatgtatggtttagaacagacggtaacgaacgtggtgtaatttgggcaactccgaatactgctgacttaggtcagattaatattcgtgcaaaaactactggtgatgtttctgccggtgattttagcttccgttctgacggccgacttgatgttcctgtagcagttaaagttggtggagcagcaatgctaaccaaagacgggaatattacctctggttcgatgtttggtggtaaccttaacaactatttgacttctattaaaaatgatatcaccactggcgatagtaagcaagtaagcaagactggtgataccatgaccggtaacttgactattaacgctaacttaaaagtcgaaaatcccaatggaacgatggttgatttaggttcagagaactcaaacaaatacagtagattaacccttgcccgtaaaattggcgatggcgctacagtagcaatgcttaaagttactcctgaaggacatgtgcaatttggttatcaagatgcagttgctactccagctcctaccaagtacatcctggttaaatctaacggccttgaggtagaaggggacttggtttttaaccagacgtatcgcggtactgaagaagctgttgatattactgataagactaatgaccttaacaacatggttattaaaggcagtgatttaggtactcgtttattatacaagtgtacttctaccggtggtggttctaagatagcaaacaaacccacatctgatggtaactttgttctcgaagttctatctttgcgtaaaatttctaataccgattggacatgtaagcagacctttactacaaagaacggaggctgggaaggcacatttgttcgatactgccaaaacggcacatggtctgcatggaaagaggttgttgctggtgttcaaccaatcaatttaggcggtactggagcaacatctgtagatgctgctcgtaataaccttggcgtaggcgaaggtcaaactacgacgtttggttctttaattttaaacggcgtcggcgataaagatgctactttagattttaaaggcggtgctagaatacgtggtggacagcgcaccggtgagggcgctatgatcctttcagccgcagcagacgcggttggaaaatatatcgcttttcgacccttcggtgattcgtctgttactgagattagagtaaaagccaatgagtcaagtgagccattacttgagtggtcttatggcccgggtattcgttcaaattcatctggagcttttgttatctacgcaaaaacaggtcaggcactccatttaagaccaaacggtgataattctaaccaagccacagttattgaccaaaacggtaaaatgacagtcggcggtgagttcgaggcccagaactcaaaaatcacaggcaacttgaacgtctctgaagataacagaatgatcgttcttggcaaaaactccgacttcgggttggtcaagaaaaatggcatgccaggaaaaatggctatcggtaaatctaactcgtttactgttatggtatcaaccaataccaataaccaaattaatcctgctgatacgtttaacgatatattcaatgtagatgccgacggaaaccaaaccgtttacggaaatgcccaagttaacagacaattaactgtttctagttcagctactgttgcaggtgttattaatgctaacggcggtattattgttcctactaccaagtatgtgcaaattgccgatgctcctacgcagaataaccaagccaccaacaagaaatatgttgatgataaggttgcttctgctattagtaatgctggtgatacttatcttccattagcaggtggtactgtaactggtccattaaatattactggaaaccagttaaaaaccacatcgctctgggttactggaaattcggcacttaacggtgccttagaagtaggcggtaatgttgttagtaatactggtattggtagttttgttggtgctatagatgttaaggcccctgccgtagataatggtacaacgcacctttggttccgacattctaacggtggtgagcgtggtgttatttatatgccgcgtgacaataataccatgatgggtttaagagccggtggaagtgaatggcaattacatggctctgcaggccaaatggtagggccaggcgcacggtggagaattcattctgatggtaacctacagggtgatgtttacggtggttatatcactaactatatcaacgataggtttaaccaatgtgcacagtgggttcgtactggtgctcaacaagactttggtccaattggtcgtccagcacctggtaaaactgttcctggtggttgggtgcttgttggtcttaacggtaacagtaacgaagctaaccagaatatgcaacttatcggtggacgtttacaagtatggaaaccgggcgttcaatgggttgattctgctacttgataataaggggcttcggcccctttaaacttaaaggtaaaactaatgattattaaacaaatgaaaggtattcaatggcatcacaatttcgagggcggagcttattatcgagactgcaacgacaagtgctggtattcttttagaaattctctcgataaaaattctcatatcattatagttaatgctaaaaccaacaagataattaattactataatggcgaagaccccaccatgatcgggttatttgcagataaagaaatgattttggatgtataccaacttgacgattttcctgttgattcatgggatgaattcacacaaagagaatttgaatttgtagacgaacaagttgtgatgactaaagacgtacaagttcctaaagaaagaactaaagatgacattatgaaagacttgatgaagcttaaagctgaattggaatcattgcaataaatatctctgtaaggagagcaatatggcaagcaaacaatcaataccattttttgatatgtttcttgggttgctcgagctattattcaaagatggagccacgggaagagttctcttttcccgtgtttttgttgtcatacttttagcattgttggcatttgctggttataagtcagatagtcttattactgcttacgtcgatagtacttatgataagtatgataaactggttcaaaaggatagagattcccgatttgataatacagcactcgaacaactccagatagtacatatatcaagcggtgcagatttttctgcggtctttacgttcagacctaaaaacttgaactacttcgtagacttaattgcttatgaggggactttacctagcacggtagattctaaaaacctgggaggatatccaatcgacaaaacgtctgctgaatacagtacgcatttatcgggtagatatttttggacggataaggaattcgttttcttaccgacaaaaagaaaaccgcctgaaatatcgtacatgtttagctgtccgtatttcaatttagacaatgtttatgctgggactgttgaaatgtactggtacaattccaaacctgcattatctaacgaaagactaacatcgatatgtggtcaggcggttagagctcttggaagagctaagtgattagttattactatgcatagccattgttcgatagatagactcaaatccctcgttgtattcttcaacgagaattctcttctcttcgtcagttaactcagaaaccattttacgaaagttgctctgatttaactgacgcccctgctcgttcttgattccgatttcattcaagaacgcaataaattcatctcgcttctccatgatatgttcagcattgaacttagtcagaatagaagcaacagtaacgatttcttggacaatttcaaacttagtcattatttttcctacaacttaacggattatgtggattatagtatcatcttgataccgcgttgtaaaccagtttatgccaattcccaacgagaattcaaatcttccttggtagtgatatactcagcacctgaggacatccagagcccgtagcgaccatcttttactctagccgttaaataccattcctttccaattggacgaaccctacgattcaaccagtgacatacgtcaattgcctcttgaaaagacaagtcaatcagacttccaagcgcgattttattcattaacgcttcaagatatctttgtgattcaacgacagattctaagttatgactcatgctaaaaccacctctccacgattacctaaaatgctttcgatatactcaactccacttataatgtcacctctatcctttgctttaatagtaataattccatacgtgtaaaagtcggctgacaaactgaatggcttagaagtgtcctggttaaacgtagacattactgcttgctctaaatgttttacttctaagtcattagcccaagagttaagaactttaagcctaacttgtaaggtgtattctactttaattgctgaaagcaattcaacacgtttatgatatgccttggcttcatcttctctgcgtaaagcttcagtattcatagataatctccaatatcataagcatcaacacatttctgaaactgttcaataacttcttcaggttcaacattagcgataatagctacagtaaaggtaccattattccaatcgtgtaccatccagtctccatagccagcattctggaggtcttccattagttcagaatggatatctgctactaatccagaatggtcccctaatttcttgtggagagcttctaggtcatcacaaataatagttaaagtagtacatttggaattattcagaatgcgcattgtctttacctttgtgtttttgcttacgttttgattctttggcagcgcgctttttatctttatgcgcgcctcctttgttaaagtcattcttcgctactgggttgtacatgtgcaattacctcatttaagcagttgcgtgtaatatcaaaacgcttagcaataccacattcttggatatgtgcttttaaatctccggcatgcacatatcccaattccaagataaaccgtttaatttgagccttttctgaacgatttaagctattgaagtaatctgccttggcgcttattgttctcacgctttatcttccttacattcaagttccttgatgtaatagtcaatatctttaatcatttcttctgtcattattttgtacatttcagcaagaaatggtttagcaccaccattaaatggatggctaaacgggcagatgtattctttatccatgagagttttcatgaatttgctatctgccattttaaacccggcttcattggtatatgtaccccaattattgtccatcatttctaatgagcgctgaagcgatttacgttgaatttttaaaagtgtaatgttattctttaatgtactaatcattagtataaatcctctgagaataattcattagctggtcctgatttaggacgaactgtattaacttgacctgcatgtgtagcgatgattaatgcttcttcacgcgtgaagtactcaccccattggtcaacaaatccttgattgtctccatggacatggtcagaaactaatttgtcacggaacatatctagaacgttcgccatatcaacagaataatgacgagtgcctggaactacaattgttccaccagttttcaattcaaaacgatttgctgcacaaacgatacggcgttgaagtaatcgtccatcccaccaatcagctactttaaagcagatttctggaatttcgctatttacattacacatttgactaacttctcgttgaaagttttaataacttcacggccatggtctgcacctttcttacagtctgcaattgtccatgcttcaccgttttggtatttgtgaagagcccgggtattaatatctttcacaagattcataatcaaatcattaatttcttgttcagtcatttaaagaatcctttaattttctgccacaaacttttcttttcacgaataccaatctgacgaataacaggttcaccctgcattttctctaaccattccattgagttaacagcttccgctaatggaacaaatttagcaagggccttttggtaattatctacatccatgatatgtttaccatctgcattgtagatagcatagcattttgtgaatttcttatcaatgtatccgataaagtgtccacggaaccatacatcccaacaatcagttggcatattcagattaaggtcaaccttttctacacaacgctgaagttcattcaatactttaaacttgttcattacagttccttaatagagcggatgatggtttcaatgttttcagcagtacgggcgatatctaagtaagtattgcctgttgcagctacacggcaagacattccaaggtcagtgaagtgtttctgatgctcttcagaaatcttgtaaccgaagatgcggaaagtacctttgttgttaacttcaagactacgaataccgaaggtacgtttttccagaactgcgatatagttactgcggtaaacagtcagttctttcaaaggcaagatatcttccatctcaccgagaagtttcatcatcaggtctttgtgctcattcatatcttcagttagaggacgagctttacgagtattgcgtttcttcaaaagttcaggcttgttctcttctgcatagataactgccgctttagagatgatgtcctgtgcttcaccagtgatgattaaaccgtcaccagatttctcgatgagacctttcttaatcagaacaccgatgtttgagttaacagaacttgcgttcatggtttcttcaaggatttcacgcagttcagaagaagtgatgaaatcctttttagctacctgaaccaggatagcagcagttttttcgttcagagcatcttcggaagctttgatgatgtaagttactttagacattgtgattctccatgatgttttattcaatttgtttggtatgagactataatatcatctgctaaccagcttgtaaacaactttgtgaaaataatttggggcattctaaggagggattttggagggatatagatttatatggaaggacctggagatgacctccaggttccctagattaactgaggagcaataaaactagaccaaatacagcaattacagaacctataattaaataaaattctatcatagttcttccaggtctttcagatactcggcttcaggcgttgtcttttcccagtacttaacctcttgtgctagacgttttgcttcctgagcaagtttcttcgcttcatcatcagtgatgtgatagatgttcattgaaacgagtttttcagaatggtctttgaatagttcattctgttcaatttctttagtcaactgcttacgagttttaccttggataacgatgttacctgcaataacctctttaataaattgagcttttgcctgagcaagattaaacgcctgcttagtttcagcgattttatgctcgattcgtttggcagtgaatgtcttacggacttctacgaaatgacgaatcagctcacctgaagttttgaacttatcgttcagtttaccgttctcgtcgatgactacgatgtactgactcattttctcaatgagtttaaaatccttcatgattttagcatgacgctgctcagggtcatcgctcaaagcatagtctttacggaatttcaccttaaagccaaacccggtcttagaacagtcatcatcatatgtgatgtatcctgcatcttccaacgggtcaagtactttttcaacgtaagaagctcgttcaaacttgtatggaatttcactgatatagattgagttccgtgaagtttctttatacacgccgtgcagctcaacagaaccgtcttctgtttgaacgatttttccgttaaatttaggaaactgtacttcaggttccatcatttcgccacgaagtgctgctttagtgcattccaaaacagattcaaaactatgcggaagaatagaagttgaataacctgttgcaataccgcgaacgccattcagaagaacagtcggaattaccggaagataatacgcaggtggaacatgttctttgtctttatgcaccggagcgatttctgtgtctttgtagattttacggaagttgtcagaaatccggcagaaaatataacgacttgccgcagcagattgaaccagacgcgaaccgaagttgccttgcccatctaacagaggatagttgttattccatgtgtttgccatcaatgcaccagcatcttgagcagaggtttcaccatgatgataacctaaatcagctacaccgccagcaacagacgcaagtttgtggaatttttctttattaccacgagccaaatcaagggcacgagcaataacaaaacgctgtacaggtttaaacccatcaatcaagtttggaatagcgcggttttctacagtgtaaatcgcatactcttttgcttcattatcaatgatagatttcaaatcgcgatgacgaagatttgatgccttagccaaatcatcgatagaacctgcttgttttaatagagtgtcaaaaatatccattgtacctaccaaattagtgagccgatttgtactataacatcggaaatgaaaagcacaatataaatcattccgtaaatcattccatagtacataactaataaaaaggcggcagctattgctgccacaattaggagtttcttaatcatttgtaaactcctacaattttacaaatgcgctcaaacataataaatgctgcggtgaacgcaatacttccgattactttagtggtaggcacaaggccataccacatgaatgttcctgagcaaatcattagggccatcagaaacaagtaacccatcacaaagaagtttctcattagtatttctgcatagagaaaacgaagttatcattcagaatacgattcagttcagagtaagtctgtgcgtcgcttgaatgctgacgagtaaacgccagtgcaagttgacctttgccataaccggtggtcagcggtttcattttattggcaggaatccaaaacacaccatatgttacacagtttgaacgaagggtacgacccaactgagaacgtccagaacggatatgagaaagaacactttcaaatcctgcctttgaacgctgtttagctacaaagaaacgagcagatgcaccaatataacctgctttgccatcattgaacatcaaaaaataaaatccttcacgctcagtaatttcacgagatggagcacctgctgcccaatcaccgttacgaatagaaccgatcagttctgcaccagcgttatcgagatcagcaaaagtcataatattacgcatgttaatttcctcagttgattaaagtttattctccgatgaggggccgaagccccttctactaccaaaaatatactactgccgttacaccaccaacccaaaacacaagaagacctaaagcaagcagacgatacacgatgtgtcgtttcatttttgaccttcccatacggtttctactaaggatttaaggccatcagtttgaataatatcaatcgcattaatggcaaaataaattccgaatccgaacacggcgacaattccaagcgctaccgcaacgataaaggacagaacaacggttctcattaagttaaagcgacgatcaaaactactacgaatcattatattttcctcagatgaaagcattaatccaaacgttaactaaatcccatgcgaaaacaccaatgaaagtaacgataagacagaatactacaaaggtgttcttcaaaatcgtaagtaactttttcattttgttctccagtttagctaacaagattatagtatcactgaagaccaagaaagtaaacaactttttaaaaatttgtgatgaatacttctactgtactgcctttgccctttatctggtatgagttgaatgtgtattttttgtccaaaaaatgaacattatacttagatgcccatttctttaacatatcgttggtttttccttgatgctcaaacacattactcattccaaactttagacctttggagtggcaatcgtccagaaaatcatacagcctctgctcttctgtttcagaccaaaatttattataatctgctacagtaattaggtacggtgggtctgcatagataaaatcaccgtcattaagttcaacatctgtaaaatgcttactgctaaattcaattttatctgaattttccaagaaatgcaaaaatttctttttgctatttttattaacttcgcgtcttccaaacggtgcagtaaatcttccattggaaatgcgtatcatattgctaaagctgtaatattgaagaactaacaacaataacgggtcgtgtgatgtgttgtagtcatcgcgtagtttataataagctgcctcatgctctgggtgtttaccgagatttctttcagtaatgatattcattacatcatcccacgtgcatgatttcattttgatgtacatgtcaatgatttctttctgaatatcgttgcttaaaacaggtccagtaacattcaacgatacagatagcccaccacaaaacaggtcaacaaatcttgtgtattcgggaaaaagctgaagcaaatctttcataagtctctgcttatttcccgtgtatgaaattgctcctaacataaggttttaagtacctctttaaagtataaatttaatgattcatcaggttcagatattaacaatactaaaatattatgattaatagcaaaatcattaaatcgcgatacaacttttgaattttcggtaaatttttcttttttcttccaattatcgttgtattcaatatttggaagaaaatctgccacgattaaagaaaaagggtcggtgttatttgtaacttcaaccaaatgcggcttgtcttctaaatgtattgcaactgaatctattgcagttcctccagctatttgatgtttaatctcaataacgtggatttttcctgtttcggtattttctatagcaatatcgtatttgcgttttctgctgcttactttaaacgcagaacaaatcaaacgagaagattgaggttttacttcaataacagtctcaaactggtaatgaactacatattttgaatcagcaaagaactttttggcttcttctaaaatatattcttctgctaacttacccaaatcataattgcggcgggcaagtttagcagatactaatttttctacgatattgctcatgtttactccagttcagtttgtaaggccatagtatcatggccaatcccggaagtaaacaactttttaaaatttgtgcatgatatacccgccagctccaactcgtgaaggttttactacttccatgaggtgatcgataccgccggcaaacattggtgtgtaccgtatgacattctgggacacttcttctgcaacgaatataattatacagtctacgactttatgtttaaacatgggccctagatttattccacttccatctgggaatggaccgtctttaccagtcgtaacattaatccatggcttatgatttgctcggtcatgaacaaagtgtgttttaacttcaactctaacaccttggtagtgtggatgagctaatacgtcccatgcccattcgtatggatcgttgttattatggtcaacaacttgatcgttcacgtatccatcgagaaaatctgctaccacatactctgccggtatagcaattctgcatcgtttaagaacgtcaattctatcttgagatggatcgatatctaagctatatctagcagtatcaatgatttttacttttgcttcaccccttagcttattcaaatctagggtaaatgtccggagttggttcaatctctgcagggctttgttcatcaatgccataaattcctctgatatgtaattcaccaaaataaacacgatcgtcgtggttacatgtgtctggttccacaacaaaatcatcactaagctcaacaagttcgtcacaatgcaaccaagcatagtgaacatcaccttcatgtttaactacatgatggcaaaacaccgtagccgcatgatgagtaccacgaagattaacaactttagaatgagatacattaaatggattaatcatgtttcacccataataaaagaggagcccgaaggctccttataattagcgaagttctgaaccccaacgatcagttacatcttctaatactacgtaaccacatgtacgcattttagcatcgttgtaatcaaccgggatagatactacatcacgcggatgaactttaactgaaacaatacggtcagaaccactaccgaagtgaccgatgtaagatttagagcagacatgcagacctgcggaacaagtacgctgatcgtcttcatctacctggttacgcggcattgtaacagttttaccaggagagttatcaaacgtgtttgaagcacagtccatataagtggaacgaactactttccaaccaatgaagtggccatcatcagtgatgtcgatatcgtttgcattcaggaaatcaaacagacgataaactgcacgacgagacgggttcagcatcaggttttccaggaaaggcagataacgtttaaagtcttcaccatcttccatagctcgaacgatacgctcagtcagaccggatttcagctcgatatctttatagaataaagtaccatcttcaattcggacgttaccctgaacgaatttcttgatgccttgttccaggttaatgtggtcaatagcaccagcgatatcaccatctacaagtttctgcaatgcagatttaaatccaggatgttggctatcggcattataagtagtacggccttcagtaattgaaatgaatttggaacttgctgcccatttaaattcacgctcaaccggagcttctactttagcaggaacagctgccgccgcagctcgagcttcacgctctttaaacacacgccgaatagtgtcacgggaaacaccataattctcggcgagctctttcttagtgtacagaccgtttttgaagtttttaacgattgcatctttttggatttcagacagacaggtaacagccatttattcacctttattttcagaattttgagtagaagctccgtcaaggagctccatgatttttacgatatcatcgacgagtttgctgtcagtccgccaagtatccaagacacttgcgatgacaggataatcatctttaaactgttcaatctttttatagaagattgtctcagcatcaccagacagtttattataaattttattacataaagctaaatcatcgttttcatctttgattttactggtacggcaaaccttagcgattttgtttagttttgtcaggaacggatttttcattccagacgctgtaaacttactcgacaagaaattcaatttatcgtaatgcgcaatatttccacagatacgatttccagtagcatttgatggcatgtactggtcataatctaccttatcaatacacttgatgtattggtcgataataaatcggtcaaatgaaagcaatccatcagcttttgccgcggctttcatagcacctggacgaattgcatagaatttcttaattccgcacgcttctgccagagaacgcatgctcgcaatgttcatattccaccaccaaacattatctgggaaagtgtggatttcatcacgattacgaccgatagcataaccttcaagctcagcaatttcagatgatactaaagtctgacggtcttcttcccagtacccgtctttatcaatccaatgcagagaaacattaggagattttggacgtttctcttttggaccagtgtcataatcaggaagagcttttctctgggcttcaagttcagacacacggaatactacaacttcatcagtatccatgattttcttcaactcatcaatgacatgcaattcatcttcattgtctttgattacggtaatgtgtgcccagattggaactaacccagatttacacagagcacgaaccgtagcaatacgcttacccgctttatcgtcaataagaacgaacgctttagttctatcaacgccacaaatatcagaaatgtttacttggttatgacgatgccaagaactgcttgacactttacgacgagcaggttcatcacacgaaacataaactgatacttcgttgtctacataatatgaacgaattttatcgagattatacttcgcaactacttgtttaatatcgcggttcccaatggtaataccacggctctgaagaatagagcgttccttagaactcagcttattgaactcacgcaggaattcacggtcagattcatacgcttcaaacgctttaatatctgctgtaattacctcttcttcaagagcattcacacgcttctggatattggcaattgtttcttcatcaagagaaagctcttcacgagatggagtaatgtctaattcgccaagagggaaatgaacataaaccttaccatagcgattaagcaaccaatctgccttaacatctacaccgctgatcggatatacgatttttccataaactgcgtacagaccataactttcatacgaactattaacgctgaaccagtcagtcttatctacagggaaatattcaatttcacggcgaagagaatctacctttggaggtacagcaccaaaggtacgcaaaatatatgcgatttcataatgccaagtatcaatatcttctactttaaccggaactgtaatttcaagaccagtttcttcgtcttctttcatatcatcaacgaacattggacgaatagtaggttcacctcggtttttcatgacagtataaccggtggctttaccattatgatatgatactacgttaaatgtactcgtgtagctcagtggagatttagaaccaagaccaagagcaccgatgaaatcattactgttattctttgtggattcaaagaacgttttatacatcgtcatcatgtcattatgattaagacctgggccataatcacgaattacaaatcgtgggtcaagacgagtaggagccttgatataaaatggacgattttcattaccgttcagtttatgagcatcatcgcagttagtagaaagttcacgaacaacagcacgaactttatacttatagagtttatttgacagaatgtcaaaagctttacctgaagctttaatggtaaacgttgaatcgtcagcgtcagaagaaccaataattacttcatcatcacatttaattttcattttattcctatcaattatgtcgtttaatgatttctgctacttcaagtaactcttcagcagtagcggtgttagttgtaaaaattttattatggatttctttgaagcgttctttgaattcctcagctgcttggatgtcaaagaaccgctggatgatacgatattcacgatatatagcatcgttgaataattcttctgatgggatgtaactacgtttcataatattttcctcagtgatttaggggaaattatatcactataactttaagcaagaatcctagaatcatctccaagcacttcttgattaaagccatataaatccattcttataaagaaaaagggacccggaggtcccttagattaccacaccctactaactcgaccataaacctcatgtttagaaccatcaatgttttccacccagatagtaacacaagttccgggcagaggtttcttttcagcgaacagatatccatagtcgcctgagatcaaagtaatccaataacgttgcatgttaattccttctaagtaagggcaatagtacccttactatttattctttattcactcatccatgtcttacgtggagaagcatcgttacccatgattaattcaaacagttctttccagttttcaggaagagtgactacatcataaaccgggtcttgaataacacgttcgtattcatcttcttcaagagagccaagacctttaatataacgaagtttccaacctttgaaatcatctttatggtcttcatattcaccaagagaatagaaccaacgttgttctttacctttggtgagaataataaccggagttttcacaaagcggattctaccttgttcaaacagttcaggccaattactgaaaaacgctaaaagacttgggaaaattgaaccaacaccatcaacatccgcatcggtcatgatagcaatatttcggtagttagtattttcagcaggctcaccaatcgtcaaaccagtgattgcacaaatgtcaaatacttccttgttcttcatagcatctgcagcagacattccccatgtattcatgaatttaccacgtagaggatatccaccatgaagttcacggtcacgtgttgtgagcagataaccaatcgcagaatcaccctcggttaagaataaagtggtgtcagcatctttgccatatttgtttgccttgatgtgcttagctactttagctttctgcgctttcttggcggctttagtttctgcagctttctctgcagcaagtttacgagctaacattgcctcgataataggcatatgaatatcttcggatttcataatagcgttagcaagtttcttgtaatcaatatcaatatggctacgaatttctccccaaggagaagtcaaacgctctttagtctgagaatcaaatcgcatgttagacatatcacgaataaacatgataacagtcaagcattctttaattcgtgctttgttaacttctagtttgtacttacgttttaatgctggaataagttcattgctcagttcatcaagaactaggtcaacgtgagtaccaccatttttggtgtgaatgttattaacatatgaaagttgacggaacccatcatctgagcgaccaatagcaatagcacaagtatcagaatcctgcactactgcattttcatcatacatctgggcgtaagctttaaacttaccttgaacccgtttacccatgaatttaaattcaatatcaggataaactactgctaacgtcatcagacgatcgtggatgattgactggtcaacatcagtcagtcctgtactttcaaagtgactaaaatctggaatgaatgatactacagtaccagtcttatctttgatgaattctttatcttttgctgggtgttcttcccaggagatattttctgcgccattagaacaacgaacaatgatttcatttttaccatcgcatgttgcaccagtgaaagatactgaaaagatattagttaacgcagaaccgacaccattcataccaccagttttacgctcagcatcatcaccaaagttaccacccgcacgaggacgagtccatgcagctactggtcctggaatagtttctccttcaggtgttactacaggagcctgcggaagaccacgaccgttatctgttacaataattttgttgcctttaatgtcaactgaaatcttattcgcgtgtttgaaattagtacgaatagcttcatcaacagagttatcaatgatttcatcaataagtttgataataccaggaacatactttactgattggaatttaccaaaaagaaaacggtcatgcgcttcaaacgcagaactaccgatgtacatcccgctacgcttaatgatatgttctcggtcactcagaattttaatttcgttcttaatcattacatttcctcggttagtgaaggaattatatcaactattaattatagcaagtaattcttctttgatatacatcaatttaccaagaacctcatggcctcctttaaccgctttatactcgggatatcgtggccgctgtcgttcaaacatagtccattgagcatcactaacgttagcgtatgcatatcgagttccgtagtactgttcaatccggtactcgttgttttcattaagtgaaatccactcttcacagacttcataatatttctgcatccaaatagtacgaccattcacgtcattgattggccaccaagcaaacctatattttccaatagcccgctctactatttttaaatgtcgtttagcacgcctttgcgcagttgtcattccaataatcataatattctcctctggccaacaagactataataccaaaacacgatgtccatgtaaacagctaaatgacccgaaggtcatttattcataacgaattgtgctgttcttgagaaaaagccctgagcacactgttccgttaacgggtttccctgttggcccaatagccgtaaagcctgtgtgctgaaaatcatcctctgagcaagaaaagaacttatatccagtgattttgatatcagtaaatcccgcgttatctaacacgcgagttgcgttatcagcgtcagtacatccaactatcatgaaggcaagcgctgcaattagaatctttttcattttaattttaatttaaccctataagttatattacctactttaataacccggatttctccgggtttcatggtaatgcgtgctttagttcccatcaataatcaccgctctttaatccatcatagtgaactgccggagcagaaaccactcgcttcatttggccttcacacttagggttaaagcagttaacagtgtagtcacgatgggaaattttacgcataatttctatcttttttccacagacttcacacttgtaatcatacattggcattaacagcatccttccatttttgtgttttgaccatgatttgctcattcagtgcacgagtaaccatcatggagatttcatcatctaatacatgcgcatcatctttatgacgatttctgaaatgaagccaaagtgcatctactacacagttaataacatctgcgcactcgccttcaaattcttctttctgccgccatggacgattaatccaatcacacatttctccagtttctgaagaaagttgcagcatgacattcccaatgctacggttaggaataggataagacagttttgatgcttcaaaaataggagctaaatttaacattgatatgcactctgcagtgctgcaatagcagcgattgcttgaccacggttatgaatagaaagattcataaccaaatcggttggaattacattcgcggaagttccaacttcagtaaagtatttgaattcgctatcaaaaattacaaggtcttcaccgccgacttcatcacattctgtgccattagcccacgtaattccggatactctgttattttggtggtcaactttagtaacagtaaaactcccgccattttcatagagttcatacacaaagtcttcattaacctcatagcgtgaagaaaattcttcttcagcttcatcattgacgaatttgtactgtacgccttctttaaaattcattacacaatctccatgtattctgggccatcaactgtaattacacgagcaaaggtacgaactgggacaatatcaccatggttcgcgaatacatacaaccaggtccaatgctcttctttaccgaaggttttctctttctgaacgacaattaagtcaggattgaacagaatgtcttcaaaagcttcggcagtaatttttacggtgttttcagttttcatgttattctcctcagtagttgataagataatagtaccacatccttgtggtaaagtaaacaacttttatactaaaccttgacgctgtgattctgtcggctctacatcagctttaggcaaaactgcatagttgccttgaaacactacgtttactagggttttaccgtcttcttcccactcatcagtgacaagaacatttttgccttgatttagattttttgccggatttttggggtctttggattgagtgacaacatttttaagggttttaacacgaacccacttacgttcaaagctttctttaacattgttagtgtctttaaacttcaaatgttttgcaggaactacaaatttttctaagcaatgaatataatcaccataatcagaatgaattttataacctgctttaccatcattacgattagcaactttaacgatcacaccagtatgaccaacccacttgccaccagtaacttctacagcatcgcctacaatcaaatttttcatcgtgtttctctcagtttgttaatgtagagccattatataacggctctttcataaagtaaatagctatcggtgagaaatttcacatccaacatcgacgccgaacagatacccagcttcccaccctttagccatcatagccttggccaccagaaccatcgttggagagatttccgggaggatttcccggttgaaccactcttcaaagttttcatcgaactcaaactcttccattagccacgccccttaggtaaactcagtggatcggtatcttctgggcttggtgcttcgcttaggcctagagcataacgttgagcatatttaagcattaaaatatccttagcgcagtcatggatactatcatgcgcgataaacccgtcgagcgtaccctttggaagaggggtggttgtcagaccacgagtcagaagcagcgattcaattgcagtacgaatatcacgttgattccagaacttgcatggttcttctttaaatgtatcaatttcttcttcggaaattccttgggctcgttgaacatcgcgaagacaatcaacaaaaattggaaagtcaaagctctgcccacgacaccagccaaaggaatcccatgggtgaattccattatcaatcagatattgctgggcttctttaattccagcaattactgataaatcgtctggcgttgaggccaggttagcccgggcctcagctgattgtttcttccaccactcaagagtagacttaccaaacaaccgatgacctttctgggatttaaggtcaaacttgatacgatgaccacgtttaaccaattcatcgaagctttccaaaacttcggggtcagaatcaaaggtgattagagcaaggtcaatcacagaagagcttgacacatttccgaatgtttcaaaatcaataataaagtctttagccattttgagcctctagcataaatttaatttcgcgtaactggcaagcaatatattcgctcagatacacctttgggtcatatcctgtgaaccaagtaatagcattagcattatctgctatatcacgaagctcattcagaactgtatcaattttaatgttaatagcacgcttaacattgtctggtgcttcaaacttagattcttgtaagccaacaatcattgtttgaaggtcttctaatttcaattcaaacatattacctcacacataaaatacatcataacgaccacgagtagtaccaacatataataactgttgcgcgagagaagcatctgccatatgaatgcatggagtataaatgaagcttctgtcaattgaaataccctgggccttgtggaaagtcgaagccggtaatgctttcactttatgaaacttacgcttagcatcccagaactcagaccagggtgctttaccgcctttattccagttcttatatgtatctgcagtttttgccaaaaagaattgaaacttattcatttcttcttcggatgagatgacacagattttctctctagcgtactcttcatcgtcgccataggtttcaatatctaatacccaatgacggaccagatattcacctggaacacctctggcacccaaaaacgtggtggtttcaattgcatctaatatgcgaacaaactgaccattattgaaaagaatttcgctgaatttctttccttcaaatttaagttccttggtaagaggttcttgcataacaacaatctcacctacgacaaacggctgatcagtttcatagattctgcgccggattatttcattcagtttatcaacagatttattcgtgaatgcaagcattctgttttcaaataaatcttctggagatttcactaaactaaaataatttagcataaaatctttaagggcagttcctttagtaaaaccacggacaccatgaccatcaactacacagtcacgaatccatccaccatttctgatttcagtagcaacttcaatgattggagcattactccgcatcacctcggtcaaatgaagttgtaagaaatctttatgagtgaagaatggactcagtgcaggttcattacttccaggttctaccggacgtatctgagccttatcgccaatggcaatgacaatacaccaggcaggaatagttgccatcaaaatcttaaacagtttacggtcatacattgaagcttcatcacagataagaactcgaatagatgccatatccggaactttcttttgttcaaacagaacgttttcttcatatgtcgtcgggttaattttcagaagactatgaatagtactggcctgcattccgctgagcttagataaaacctttttggccccatgcgtaggtgctgccaacgcaatgccagagataccctgagaaatcaaagcgtcaatgataaatttggttaaagttgttttacctgtaccggcaggtccattaatcgtaatatgttgacctttagctccttgtttgaccatttcaatgactttattaaaaatcgctttttgactttcttttaattggtcaaacgtaatcatgccacttttaccctcactacatgtagatttttaatttttgctttgagtttttcacgctcaacatcgctaagtggttcatacactagctcagttgttttccaccaaagcatccctttggttttgcttttcccagtaaaattcccctttgccaatttgtctgttaaaaccgacattgtacgaatccgtgctttattagccgattcttcattagtgaagactacacatcgttctccatcatacatatcagttgtgactggatggtcaaatccgtctttatccttatacgctactacatatccatagtgttgcattacattttacctctcaaaagttggaagaaggacgcagtcaatggaagaccttttttcaattttaacttatctaacattgagcatttttctaaccgacgaagtgagttaacaattaaccgtattgattgtacacggatttcagcatctgacggacgattcggaactgatgctaaaatagcagataacttacgctcaactttagctaattcagacttaccaccgctgatacgagttctcaatgcattaataagttctaaatctgccgaggttgcagttccattcttttctttttgcacaaattgagaaagatgattttcgcgattacgtaagttagttttaattgatgtgatagttttttcatactcacgaatcttttccaaacgagaagcttctttatcacttgttggcttaacagaatctgaagaacgaactatgcgtgctgcgatttcattcgcttttcgctcaaggccttcaatcgtattatttccacgtaaggtattatacttttgcttaacaggaataacattccccattacatatcccaagtcattattccagcgttcaagcgtcatgctgtcaggatggtttcctttgacggttccaaacttttcacctgagtatgcgcaatgagtctgttgcatgatgttaaacagatactcaggggtaagattgaactccttgttccgacgctgggcagaacccaaagttgtaatcaggcgagtataaatcttagcggtttcagcagtgaatttcattatattttcctcaaaaatgctttcgtcttacggacggtataatgggtctaggtccctagttctagataatcactagttgactaagctatagtaacactaaagtagtccataagtaaaccagatttttcaactttgttatgacccaccactttgaacttagttcccatcggtagcatcctttcttgttctttatcaatcatctcgatgtcagcgcttctgcgctgagcaatgttatcaatcacatcatttggtcgcatgaattcagaatctggtgcagtaattaaaagcgatttcatgttggtatgataatcaaatgattgctgacaattattgacttcaatgactacaaaggtcgagtaatgccatttgcctgcaaactctcgggcgatcgtttcatctgttgtgaatgacgccacctttccaaagtcaaattgctctcctttaataagagcttcataaaaggctttagcctcacggcatgatagacctctatagagagtgtctctgttatcaatttgatgacgcctaacgatagagtcaagtttcttatgaaattcttcgccaatcttattgttcatgcactgccacagaattgactgttctttgcagtcaaaacgattggctaatgcttcccatacgcttaaatcatataaaggtaatcctttgctttctcgcgcgaagttaagaacatcaatggaacgaatgggttcttcgataggaataacctttgataattttactgaaatagatgggtttaatgaaatagccatgatattctccattttggttacgagaggtatcatatcatggcgttttagaagagtaaactactttgtgaaattattttgcccacggagaccagggcggcgggtcagaccagattgaagctagttcatctagaagagcttctggggctttaataccatacttctgtataattatacggtattcgtctttgatgtccttagaaatcactggatgaacctgaacctcttcctgaggctcttccatcatttcaaacaaatccatcacatgaaccactcagtattgcgatacagacaaccactgttgttatatccatcagccgctttttgcaacagcgggcttggagaaagtttgataaaatctgcgcccatatataaccaaactaacttagtgaattctattagagaatctgtgctatcaatgataatctttttgcctcttgaaattatgtcattttcgtattcatataagctagtttcatgacatacattggtgtatcctttcaagtggagagcatgtagtatagcaacaggacttcctggaactgtatctacgtcaaagacatgggcagtcttaataattccataatcttcagaaggacgccaaccaaacgcctcgaatttattaactaagtctttgaaatctttgtcgaacgtactgtatagagcaacagtaaaaattctatcttggtctagacgcaaaactccatttgcatcacttcttgattgaacattacgttgtaagcttactttatagatttttgcgttgaacacacatagctccttcagtcatgttgttgtcttcaaaccacttatcatttgctttaattaaagcaggcgcagcttttagtaataacgctgcagctcttacacctctgtaccaacaatcaaaatgagacttctttaatggcgattgataccagggcttagtataacatatcattttcttctcctcagttagtaggaataatatactattcccagtatagcataaaaggactcccggaggagtccttaatttttatgcttctgcactagcttcaaacattttcgcgttggtggttgcccaagttgcagcatcatcaactactgttgaataagcagctttttcagatgggaaaatctgatactgcgcattagcaatacggtgcgaatcagaatataccttaaaagctacagatacttcagtacctttaatttcgccatcagcagtggtatggtcaaaagttttgatatttacgtaagccattttaatctcctattagtttacaggagtatttatatcttcctttctgaacagatatattaaattttttagggctgaactagtgacatcatattttccctttaacgctttaactactggtccggtagtaggttttcctagtgaaatccagatgttatatatttctgttttaagaggttcatgccaatgtggagctattctttgcgcacgtgaagtaccttctgaaacctttttatttcctccatttgcataaaattctttcataacttcagattgtcttgcttttcggtcttctttattttgcgctattttctgggcttctctcattctctgtttagtttctggattattaagacgaagtttatgttccattcgttgtcgttcagtccattttataccttctcctccaggtcctcctggagaaatgttaatgcatgtatttggatgtttatttttaaccgcggcaattaaatctcgttctacatcataggatttttttcttgtgccatggcatttagaccattttattttataattaaacccatatttacgataaatgttccataaaatttttcctgaacctgggtatttatcttcatatggatttacgtgatacgattcatgtttacctgcgtaccaaaagacgcctttcggcgtcttaacttttaccagatatgtcctataaaatttttgtttaatatccattgttctgacgttcaaaattttcggcatttttcagataatataatttaaagatttcttctgcatccatacctaagccagcaaacatgtttaaaacgaaatgaagaatgtcaatcatttcaaacttaatttcaagttggtctttatcagacatatccgaaatacgtttttcttgtgcttctgtatagcgtgctttccattttttccagacagcggacgcgtctttttcaccgcgtgacatttcgccaagtgaagtcaataattcacggaattcatcatcaatacaatctttttgctcacgcatccaagcaacaacatcaccagcggtttctaatttatctggatgataacaatattcacggtcatttgcaagacgaacctgaagagatttttgcatatcaagcattacttgcagagggtcaccaccaactttgcgtacgatacctgcgtatcgagcttcagctttatctgcaccagcgatcagttgactacattcgttaaagtgtgccattattttattcctttcaattaaattagataaatattatatcacttaacataaatagcaggaggattcatgtctgaagtgaaacaagaatgtaaagacaaaggaggatttggaagatatctttacgtcggaatcgccactgctgctttagctgcatggaattatgttgtagttccattagctagcgcacacgggctagttcttcctccaatgccgttagaaaaagttgtgtcgtttattatgactggaggattgctttaatttaaggggctttggcccctatatcttcgcatatttgtcaagacgcaatttagccattaaaccctgcgatatattttgattaatataatctgttatttcagaagcagttgccccctctttcataatcatatcatttatatctttgcttttccaaggcgacttatcccagaaaactaccttttcgccagcatctactaaacgtttcatacgcttaatcgtatcaggatgacgaggttcatggtccataatccatgctcggttatcatgacatggaacttgagctaaatctaaagacccaccggtaattgcaatagcattatcaatgaacaacgaatctattggtccttccatgacgaatacgagttttgactcatcaatcgtgtcgagaccataaattttggtcgcgtgttcatgggctttgattgtgatgtatttttgtggagcattttttcgtagtgctcgtccttgaaacgactcaatctctcctttcttgttgaagataggaataaccaaacgtggttcgttcgtctcattcttataggttcctggattaacggagttaacaagagaaggccattggttagtaaaccataaccttttccaagaagtgcttggaatacatctggcagtcacgtatttaactatcggatgttccttaggaagtctatctaatcgctcacagaaattaagtttttctattactgggagttttgcattaattttctcagacggttctacagcctttggcttatcaaagacttgctcctttcttttctcaagaagatactctcgatagagatcgggttcattatctttaagatattgtgatagccacttgttatactcacagttgaagcaatgacagcgtaatccttgacctgcatcaaaaatccagaatcgggctttattgatatctttctgtgagtcaccacaaattgggcaacggcagtttaacttaaatgttgaagatgtagtaacgtgtctaaatttaggtaggtgagatattgcgcggatagcgaattcgttatcaacccatgacatattatattcctctggccttaaactaataaggccattgtatcacgtttcaggttttgatttatctcgctttttctttgggagagtttctgggcctttatttactactgcgcccgaagtagtgcctgatgcaatgttctgaggattaccgccggcatcgccagcaaccatttcctcattaagtttaacaaactctttaaatgttttcatagagcctccaaactatttattatttccaccatcaatacgaatacacttgtatgtagtgtagactgatggtgaaccgaacccggaataggctttgatgctagtaaattgttttcccgcatcttcacatttctgagccagcgaagactcgttcattcctgtgaatgataacttttcagtagaaacaccgccggcaccagtcattatagccattactaatacgtatgtaatcatccgagaatccagcttgcaattgtgaagttatcaaaattagcatcgcagtacagagcatagttcagtttaattgctgcgccatcattggagatttctgcctgaacttctttcatcttgcttgggtcagtgttatcaatgatatgacctacatcagcacgaatctgctcagcaacatctttttcatctgcagtcattgaccattcgcagaggtctttgtcatagttcgccagagcgggaacaacagagcaacttgatactgcgaagattaaagcaagtacaatctttttcattttgttttcctcagtttgtttcagtaaggctatagtaacatggccaaacttaaaagtaaactatcttttgaataatttttcgaggacttcgtcggatgtcaaattcttggttggaaggtatatcgcagagttaacccagataccttcgtcattatatgccttaacttcaccatagtcatatgaagataaatctgctttgttgtaagctatgactccacgatggacgctatcagacgccgtcaccacaaaggagcgacctgattggtcgcgaattacgctaaacacaaaaatcataaaatttaccttagaattttaattcttctgctagagcatcaagcttagaacgtgatactcgttcctgacgattagattcggctacacggttctgtgcaccggcaccttctcggacggtattgcttggattaggcttagttgggtcgttttgctgctcaatttctacccaacgttgattagccttatgtacacccatagagaacttattgttgatgttcttatcaccgtaccgtgatttaatctgcttaattaattgttgcttcatctgagcaagttcaggggtttcaatcacagccagcataaagtctgccgtagcaggtagacccgcagattctgcaatatcactcatgtccatatcagaagcatcccaagccgaacgaccgacctgagccgcggtccaaagaacagtttcagattctacagccaatgcgcgaagttcttctgcgatagctttaactaacgtgtaactgttttcagtatattgacgaatacgacaagaagcacaaataccaagatagtcaatgatgataacagtcggtttaaagttcttcttgagtttcaattcatttagaagagctcggaatgtattagcgttagcaccgccagtcggatactgtttaatgattaaacgaccaagagtactagaactacgccatttttccattttgcctttatattcggcgtatgatacacaaccatcgtcaatatcatcaagtgatacatcgagcaaattagcatcaatacgtttagcacaaacttcttcggccatttccatggaaatataaaggacgttatgccccatctgaagatagtctgcagccaatgaacacaatcctaacgatttaccaacgttgacgccagccatcaatacgtttagtgtaccagtctcggcaccacctttagtaattttgttcagaatgctaagtttaaacggaactttacgagctttattctggtatgataaccaacgagcttcataatcttccatccaatcatgaccaatatagctatcaaacgatactgataacgcttcacgcatgatatcaggaatagcccccatatcaggaagacgcttatctcgcttatttggctcaagctgggcattagcctgaatttcaataattcgagacgtagcgttatacatagccttttcttgaacgtacttttcagtttccttaactaaccaattcaaatcttcgggagcatcagataacttatcaataagtttctttgcgccttcatgttccgtttcagttatagacgaattatccagtgctacacacaacgcagtctttgaaggaattgctgtatattcattaacgtgtttcttaattatgttaaacaccgtctgagcaggtccttgctcgaagtactctttgtccatatatggccaaaccttcgtaaagaaagcctggttgtaaatcagattagctaagattgtttctaccactttaacctcttaaaagattttccataatgattttttcttggtctttaatgcactctggatttgttgtttaacacaagcttccacatgaggataaagttcatccttatgagcttcagacggagtactaaactcaatagttacttccccggaaggggaaatattcaatttatgaacataaaccaagtgtgattgaccatttaattttatcacaatttcttggataacagtcttcatagcttcttggattatttcatggcttttcttgaacactcgttcttgacgctcgaagtctccctcttccgagggagattcttgttcaaatttctcgagttcagattctaaatcaaactcagtcttcattcatgaagttctctaattcatcttcaacttcagcagctgatactgaaccactctcagggagtttaacaccatcaaccttagttgaaacttttgagttaatcatttctgctaccgcttcatcaaccgcagcgtttgaatcaatagcacccaactgataacgagctttgatagcgtcacggaatggctcatgcttaaacagaggaccccaaaattccgtactgctcgtatcttttgcccgccaggatttttcttcacgaatcatctcaccagtttcaacgtccaggaattctcgtgcgtaccatccatttttcggtttaacaacaaatccgatatccagagccatatcaagcagaccactgtacggatcgataccaccatcgaatttaacatcaatgaagaacttacttttctctttgacagtacgtgatttctcggcgttcaggacaaactgatacccctcaagctcagtaccatctttaatttggcgtttaccgatgatgaacacagtatccgcagaatacataggacctgtgttatgagtaacgataccattttctaatacataatgctctacacccgcaacagacaaatcataaacttcttttttacccacagctttaacagatttaattttcatagtttaccttgaatttcatacgaccaaccttcaacaccatttctgatgtttttgattattgtatttttgttaattcctaattctcgcgaagccggtcgaacgcctctatacttgacaccatttattataacacccttttgacgaggatgagaattagctaaacgttttgatgctttttctgcaatagtgttaagagttttttcagagtgtttacgcccataaaatccgttattttcgccagaaatacccctagatatagcagctttatgatctttagaaagctttttatcttttgttactccaacatactcgccacttaaaactgcttcatgattaataggcaaacgaatacattttccggttacacagtgtttgtatgttccataatttgatttagcgtatgaattatgaccgcatgcataatctaaattaaaataatttggattagtctttgctctacactcatattgatatctgctctctattgacaataaatcttcatgagaaatattttcatattcttcaagtatttcaattgtagtattttcgtcaataaatgaatgatagtcaggatatcttgaagaaccaaaatactccttaccattttcttcaatgattttaccattaatatgtttggctttagttttactaccaatgtaataaaatggcggagtattttgtttaatacgggaattaaaaataactttatagatatagttcatatggataccttgagtacattagttcggtatccatatttatcacctaattacacaatccattccagctactaagtctttggcttcaacccatacaggaatatcttttgtcataacaaggaatttatgcgtatctgaagtagtaactttatatccatcttcaaattcaatttcaaaacattcgggagtgccttcagctagagtttcggggtcccaaacataagttacttcattatcaccaaccatggttttaactcgttcacctggcttaatatcttctacttttttagtagtgccatcagccatttgaattttagtacctgcaacaacgcaaccaccagtcattaccgtcttactgaacatctcgatagtctcgattgtgtggttaaccgcaacgcaaggaatgttcttaatagagaagtaaggagttacgatacggaagagagacttcagacttttcgcacgagtcatatctgcgacagatttctcgttcagtgcatcttcggtttcctttttagacgccatgttaccaatagagtcgataaacacgatgactttttcaccacgctcaatagcttcaagctggttaaccatatcgatttttaattgttcaaccgactgaaccggtgtatgaattacacggtcagggtcaacacccatagatttcagataagctggcgtgataccaaattctgaatcatagaacaaacagactgcatcaggatacttattaagataagcactaaccattgtcagagacatgttagatttgaagtgtttagatggacctgcgaagatagtcaacccggactgcataccaccatccaacgctccactgattgcgatattaagcatcggaattttagttctaactacatctttctcgttaaagaattttgatttagtcagttctgctgtcattttagaagtggatgctttaatcaggcgagattttaagtcagacattcattatattccataagtctccattatatttttctcacaggttaaaggatagagtaattatattactttgttcttgaagctattaacagaagttccatttcttcttggtgttataaaccactgtttccatatctatttcatagtgtattttacatccaacgcacatgccatgccaccagcaatgcattccatctgagccagtagttccttcatgaacaaactcatcagatttacatacgaagcatctgaattcttcagccttgaatatattaccagctacatcagatttatcatagatgttcataagaggtccttggagggctttcgccctcacagatatggttctaccttaccaaattcatggaaggcctgggatttcactcgagtgttaatacacatacgaattgattttagtggttcgtcatcaccgaataaaccacgcctttcaccgtctttagatttccagcgagcttgatttgggaaagcagcatgtagctgttcaagggctctattctgacgagcagtatcacgctgagtagagcaaccgccaggagactgcactttgccggatttaacgaggtacttaaacagagccagatgaggatgacccatgttaattaattttagaaaagcataagcatcttcgttaaggtcaataactccgtaaccaatatcttctgcggtaagtttagtcaaatcgtagaaagtattggtaaacccaaagctgttctcgcgataatgaccccagcttgatgtgattttgaaaatcggcaagcgagcatgaccgtgataataaccacaatccatagcagtctcgacatatttgaccatatcatcaaatacttcttggctcattgcctcgccgacaccaagcggaacacggcgatcgtcgcgttcacgaatttcagtcagatgaattgtcgtatcatcatcaagcatccaaattcgctgccctgcatacatttcagtaatcagacggcgagtaccagcgattccatcaacatcatcgggaatagtaacaattttagcagcatgaccatgccaggtttcgtatgcttctttttctgattcacgtactacaagatgtggaacataaccttcaggaaacatagtcagggcagttactgccccggcacgcttataacttggaattacaaactgaatcatttccattcacctttatagtctttctttgcgatatgagtttcacctgtataagcatagttatctacgagatagaaatggcgctcatacacgtgcaaagacccgacgttccaaataatatcgccaaccgaatagtttttacctgatgcattcagaagtttggttaactgttccagaacatagagctgccacgcatagtcattacgatatccaaagacgacatcattagagcgcatgtttacaacagcatgaactttattatcacgaatcagatactgaacattgttagtacacatgaaatcactcatgccatcgcgctcaaaatcatactgcatttgaggccgtgtataaatcataattccgcggcgagaatcaggattactgataagttcttttgcgcagttagcaaactgtgaatagttttgtgttgaccaaactgcccagccatagttagaattaatctcaccatgtttggatgcaattgctttccaaatagctggagtttcaccaggaatatctttaacgaataaactttgagatttataccactcaagttcacgggcaatgtacccatcattaactgcaccaaaaatcaggttttcatctgcaataaatgatgcacctacgatttcaatagtcttcacacccgtcttatcaatcacaaattctttgttgagcaaagcatcagcgaattcttggcggatatcttgtactgtcattggagttacaatcatgagacctcttatttaacttgctggataataattgtattctgttgtgcgttagaagcagaccaaatcagcgcaattaaccaaccgataatggaccaaccgaatactagatttgtgataaagattccaccccgtgatttatgcttacggctgcaagctacaaaagtcggcagaaaatagataaagataagaatgattaagccaaatactgcttccattttaatttcctcagttagacatgcatttgttgtagatgtggttttggagagattttaactgctccatacgttgtttatgctcattataacttaatccgccattagcaaaatcagttaaacgaatctgatcattcaccgctgcagctttagcagtgcacgtacgttctttttgggttttacgcaggcgcttgatttcttccagttcatgcttattctgctcaatcatgtcgagttccatggcagatagctgacgattatgattagctttttctttcgccaaacgacgctctaccgcgagcgattcagcagagacctggttgctagcacgatagtatcctaccgtaccgccaattgctcgcacctgtccaacagaagaagcagggacaatatcaccttgtggcatttgacaaccagtcagcgtgagagcaacgataacagcaagtaacgatttcattgtaatctcctcagtatgttatttcgagaaccatggtaccacatccttgtggtaaagtaaacaaccttttaaaagtcaaacatatcaagaagagacgatttctcttcgtagtctaaccctgccgcttcagacatacccgtcagaggtttaacgaacgatttttggaacagaacactgtggtcaagccacactagaacttcctgtcggatttcttgtggcagctcagtgcccgatggccatgccatgcatttctcaccgtacgggttaccttcacgcagcgggatgaccatcaccttctcgccttccatgattggtgttataccttcaaatcctgcggttgctcggttatatgccaaagcacctttaacgtgatatggtgtacctttatctggatatcctgcaccgtcatcatacttaccgatgttgttggcagtcttaacctctgcgattactttatagtcaagctcacgatactcagactcaaactgcttataatattgctgtaaagattcttcaccttcttgcagcatacgacgaatagattcttccaatgcgttttgaacagcagttggtgtagaactttgctgagtttccatacccatgattttcagatgcggttctgcataacgggtaccttccatatcatacacgttcagagcatatcgtttcttcgctttccaaaatccaccaatgccgtttgaacccaacggaggacaagaaatagcttcacggtccatgaacattaaatgttctttgttgttcatgtattcacacatctcacgatatgattggtcaatccaaggttccattttcttcttaccgaattggttcaggaattctaccaaatcgttagtttctttgaaacgctcaagacctaccttctcgataaccttatcaacacaaacgtaaattgagtcagtatcaccggctactacaaacgaatgtccttcagtaccgcataccttgttgaggtattcattaactttacgttcaatccattggattgccatttgaccaaacaatgtgattgctgatgcgttacgtaaatcataataacggaagtaaatgttacccaatgcaccataaagggagttgatcagaatcttacggtttaactggttagtgttacccaagatttcagcatgtttacattcaaacatcagtttgtcaagacactcttcggtatatgtcagcagttctgctttcatgtcatcagagaaatcttcatagacattaacttctgtgaatttatcgatagttccaaacttcttatcattcagaacctttttaatcagttcttgatttcgtttggcacccatcattttatttttccactctttacgctgataaaataccttcgcgatttcaactggaatgacaccatctacatctttacgatacatccaaccatttggtgaacatgaatattcatcagacggacgaggagcagtcttgttaatgtactcacccaacggatgaagtttaaattgtccaacgatggtttctggtgaaatattgacctgtcggataattgacggatacagagatgtcaagtcaaacgacatgatataacgatatgcagcaggaactggttccttaacatacgcaccaggatatgactgtttaacatgagaacgactttgcggaataaccttgtcttgttctttcagactgttaaagatgattgcgtcccatgttttaattggactcattacaccttgatatggcatcttcgcataataagacatcgagatagccaggtcaataaatccgcgaacagcatcaatcgcttgtactgattcaacgtcgatgatgttatacgaaatataccgttggtggttagtttcacgcaatttattgatcggaccgtcatatgctaatttacctttcttggtttcataataagcaatgaaatccaacttatacgtcggttggttcgtgaaactaaacttcttatacaaatccatgtaatcaagaatagtcacacccatgatagaataaatttctttatcaccatacatgtttgttataatcttagatgaaactttattcagaggagagaaccgtttcatcgtacgctcaccaagaatctgtttcacacgattcatgatgtacggaatatcaaatccttcaatgttccatccagtaaagattgctgggcatttctgttcccaaagattgatgtactcaagcatcatttctttttctgaattgaacggcatatacaccacgcgatcaagaatatgttgcggaacttcatcaccaccctcagaatctaaacgagcagcgagtttcttgtcccactcggaaacagaaccataaagcgaatgcagtaaatcaaatacgtagaacttatcatcaactgaatcatagtgagtgatagcatcaatttcatattctgctttcatcgggtctgggaattgggatgccgtaacctcgatgtcacagtttgcgattcggatgaattttttattataaacgatttctgaaccgtaagtatcactgatatacgcgagtttgaaatcatccatacccattgcttccattcccatgtcttccatacgacgcatccaatcacgggcatctttcatagttgggaatgtgttcttcttgcaatacttgccatagatatctttgtacttcgtttcttccatgcaatggctaaacatcacaggagaatatggaatacgacgcattcgttcttcgccagtagaatcgatataacgctctacaatgtcattgcctagagtttcaacgctaatataaaattctttcatgggtttcctttgtttatagaccgagttattagtctttaggtgggataattatactccaatttttataaagtaaaaggcccgaaggcctttatttttcatctttaaaatttcttatcattgacgcataatctacatctggatatccaatattataaacttcttttctgaaagcctttctacctgggcaatttagccatttccatatatcaaaaagctcatcataataattccaatgcggatacttccgttgcgagattttctgcccttttgacattttaagtttggtttctttagatacagtgtgtccaatttttgctaaacttaaatttttacgatgtgattttgtaaaaatttttattttcccagattcactcattttctttctagtttcaagtgaaacgaaagatttagaatgcttaatagcttgtacatgagtaatagaaagttttctaccagaaagagaatcacttattttatttttatgtaaatcggaaagttttcgttctttcatagcgttgctaaattttaatttagcactttgatatccgtgcgaagatacatatctattggtattatttccattgcacattttccaaaacgcgaatatcattttattactatcataaaccttagttaataaccaatgagcaatgaaatgctctctagctgttaatttaactaaatttgattttaaatcagttcctcctaaagattttggaataacatgatgtatttctgtatatccagataaatttgagcgggtttttgcccgctcaataagttgaaaatagatttttctataattcaattaacaccctatcgtatatttggatttaagagtccattcattcttgcttttgaatgaaataactctaaaattattctgcatttcatgtagagtttgccctctattgatgataagcaatccccactgttccagtaattgggcaatagaatcacggcgagcaatgtcttctaaatcaattgttactggacgtccatcaagtttaagcatctctttgaagtggacaatatagtatcgtccttgtttctgaagaatatgacatgattgataaatatatttatctttgttattagcaattcccatacgggtcagagtttctttaactttcaggaagtcttcaggtttcttcagtgtaatttcaatcatctttaccattccaatgctgttttcttaagagttttttgttctttcaggtttttcgtgattgtcttgagcaattcatcagtcacaagacctttcattttcttgagagcaggtttaagcttgtttttagcttccagggtctctctatacatcctagcatcaatcgcattgaccttgtaatatgtcattataacttgaagaatcaatgcatcctggatgttctctgttaacttagcccatttgccataccgacgacctctaggaacagaggccatcatatagttatagtgtgcttggtcagataacccttgaccaacaaggttcataacataaacagcaggcatacagtcagcatgctgagaaagagcgttttcaaccatgaattttgaataatccatagtcgagatgttcaaatgctctttcttttcattaatagaaccgataatctcgaagaattgattttctgccttttctttatatgaatcagataattcctggactttcgcccagtctttacctaaccacgcgatttggtgctcattatactgatcatcatcttcaaataaactcatcatttccactgcatctctacaacaagttgaataagcatataaaccaaatgtaattcaatcgaagctgctacaccatgatactggttattttcaccaatgatttcatacattcggataatacttgggccagtaaccattgtatacagctcagaagaaagtttatctacaaaccaagtatagtctgctgcatatttcggagcaagagcacggagttctttgatgttcttggttttaatagcttcaatgacatcttcaattgaaccacggtcatttaaaacaatagacaagatacctgcatcaatcacacccttagaagaataatgatcaagcatgttgatggtcttacggaattctgggaaattctttttgaccaaagcagctacaactttcttatcttcaactaccacgccttcattttcacaaatcgcgagacaacgtttgagcatctcgatttgcattggcttaacatcagatggagatggtttaccaaaattaattacacggcaacgagactgaagaggtttaatgataccgtcaagattgtttgcagtaatgataatagtacagtttgtgctatacgcttccatgaatgaacgcaaatgtcgttgagattctgcaagacctgctcggtcgaattcgtcaatcacgataattttctgcttgcctgcaatagaagcagaacttgcaaatgcagttaacggtccacgaacgaaatcaattttacaatcagaaccattcacgaacatcatttcagcattaatgtcattacacaatgctttagctactgtagtcttaccggtgccaggagaagtgctatggagaattaaatgaggaatttttcctttagctactaaagccgaaaaaatttctttatcttcagcaggcaatacacactcagaaatagtacctggacgatatttctgttcccacataaagtctgcttcgtttactgtcaatttcatttatatttcctcattcagattaaagatggggccgaagccccgaatttattactcaaaatcaaaggtactatctgcttccattgctaccacataagaggctgatgcaccttcaaattttgctgcagtctgtttcttagcaccgttcatttttgcccacagcatcagcttgtaatcaccaacagtcattttcatattgctcatgttgatgatgaagttgaagttaccttcgccatcataatcaccgagggtcagggaatacttcggacgggtcagtgcagcgtcttctactttattataaccacgtagaacaattttaccatcaacgttggtgatagcaattgtgtcaatctgcataccacgagacactcgcatcagttgctgcaggtcttcacctttaaaatcaataattacgtttgctaccgggaatgggattggtttagtagggaacacgattgtgctcggatcagctgctggccagaaaatagtggaacgagcatctttaattgccaggttaccatcttcctgcatgataatatctgcatcgtcaccaaccagagacagaatgctaaggaaactgtttaggtcataaattgctacatcagtatcgatagtatcagagattgtggcttcagcataagtcgtaccgttaacagcacgagtcatgataaaattgccaggtttcagcatgataccagagttgatggtggagaagtttttcagaatgttcagagtttctttagagaatttcatttcaataccttttaattaagttcaggataattatatcaagctgcgaatgtagcagttaattcttctgcaacaatctgacctgccgcaacgagttgctcatcagcatctacacagtaatcattttctagacgttcgccaccatgacggtcagtaacaattttagcaccagccttgattgattcgttgtaatgcttacgcatcaattcaatccatttttctgcaacttcgtcgtcaatagatttatagaaagcaaagcgagcttcagaatctttaatcttatctttaatagctgctttagtttcttcagttagagccagaacccaagatttacgaatacgattttggttattcgggttggagtctgcacgtacgtttttaacctggatatctttcacatcaacaaaattaatcattatatttaccttaatcgtaataatcttcaaccatccaaccgggattcctgctggacatgactctattatattcatttcctgtaaaagcatctcgtaacatttcttctgttactaagtgcttttcatcagaaaacaaattagttaacacatatcgctttacttcaggaaaggccagcagatgctggccagttgtaaactcattcattccatcaccgtaaatcgtcctactttcttcatttgaagatgttggccgtatgcctgtgggtcatggtcacggtgagaaataataaacacattagcatctaccatcttattcagaatagcagttattgccttaacaccttctgcgtcggtagccgagtcgtagacttcgtcaaggaacagacagtttattttaacaccagaaaccttttcagcaatatcacgccacgtgaatagtaatgctatatcaattcgagctttttcaccttgactaaacgaggcataactaaattcttctcgtccacgcgatttaatcgtttcagagaactcttcgtttaacgtaaacgaatagtcagcttccataatttttaggtagctattaatttgcttattgaacatcgggatgtacttcttgatgatagctcctttaataccggagtctttcagcatttcagttaaaatacctcgacgatatttttccataaccaaattagttttgacgaggataattttatctaattcctcttgtagcagttcaatcttgtcagagttatcaatgaactcctgtgatgctttatcaattgctgctttaatacgacgtgctttatcaactgcagttaaagtcatctgcttcaaattactcatttgatttttgatgtctcttgcacgcgtacgaatagtattatactcgcgagctagttcatccagttcactctggcgcgtctttaactcgccaagaatggtattacattcttcaacatgatgattaatcttagtgattagagtgtcattagaatgcaaatcctgcaagcacgttgggcaatgaccacctttatcatacaacccaagaacctttgagtatgattcaattttagaacgaatcttaaaggttttaccttgaacttcttgaattgactctgctgggtcatcaccaatcacgagttcaagcagttcgctttgaagagtttctaattctgctttatatcctcgtgcctctttcacttgctcatcatacatcgcctgcaggcgagctacgttatcaccagaaagtttcttctgcttttctgcgtactcatgatgagttttaatttcattggttaatgcttcacgacgaacatcattaacttgaatctgctggttaatttctctgatttgggttttattcagtttgtccatatcagccaggagagacacctcaagtaggtcttcaacgagcttacgtctattcccagtggacaatcccatgaatggagtatatccggcagttcctagcacaacaatttgcttaaatgatgagtatgacattccgataaggctttcaaagtatgattggaaatcctttgaacttgcagcctcatcaagcttgtttccgtctcgtaaaatttcaaagacgtttggtttttgtccacgtttaatgtagaaactatgaccgtcatactccatccataattctactacagagtccttcttattaaaggagttaattaattgacctttcttaatatcacgaaatggttttccaaatagggcaaaggtgatggcttcaagcatagtacttttacctccaccattcttgcccgtgattaaggtcttttgacatttatcaagttgaatgtcaatagccgcctgaccaactgacattatattcttatatttgacacgatttagtttaaaagtcttcactgattttgtgcctcaatatataactgtttagacataacttttaaggccttgatgtcatctttagacaggtcttcaagtgcttggatatattcttccattaaatccaataagcttttaacttctacttcttcaccgtcttcagactcgaccgagttatctaccttagaaacagttcttaattcatgtactactttttcgagttcggattcaaactttggaagattttcatctactgcagtaacaataattcgcactgcaagatttctgaactcttcaaaatcaactttccctgtgacaggataaatcaattttctatgccaggtgatttcattagggacgaaatcaaaggttgataatccagtgtcttgaacccagaatccgcgtgggtcgttctcatcacccgctgtaagcgtccaaggcgttccgatgtacttaacgtttgctgcgcttgagatggtgtggaagtgtccagaccaaacttgcttgtactttttgaggaaatctggttccaacccatgagatttcatacctttataaaaatagaagccattaagctcccagtgaccaatgcagtattcagcagacgattctttgatatgcttcataatttccgatgtgttctcttcacacatccatgggcacaagtcaatcaaagtcccatcaaaatccatagtcgtaggtttatcaatcaccgtgatatggtcatacttaccaagaatttcagttgatgcattgggtgtcaacgtattcttgtagtgcatatcatggttgcctacaatagtgattaaattaattccttctccttcaagggattcagcaatttcacgagcaaattccattgtcttatgagtaatggctttacgaacgtcaaaaatatcaccatactgaatccaagtagtgatttcattttcttttgaatattcaatcgcctgttgaattccatgacgttgaacgtcttgaacccacgggtcatcgttgcggacacctaagtgccaatctccagtatgtagaattttcatataacctctctaatagagtttaattttatattattccgtgaatagcaaaaagggcccgaaggcccattacttattttgtcattaactcaaattgttctttaaagcaatgctcagaatcttggtgttctaccaggaattcatatgctttatttcgctctttatcatagagcttccggtcagatgacagatgtttcattcgttcaaagacttcatttttattttcatcattcaaccacaaaatgccagaatcatgagaagtcaacggctttccatcaacccggaatttcaaagcatcaccagtagctttatggaacacaggaatagttccacaagcgcctagttctaaatgtgtgtattccagcgaacgctcaaggaatttatccggaagacgtgacagctgatagccaaatccagactgagacatacgctcaagcatctcagagttaacatatcggtcaagaacttgaggattcagacctggcccagttttaacctgatgataatggcggcaataatcaatttcatagcgttctttgatgttaataaatgcaggactgcgttctaacccttccaagatagttgttttgcctgcggcccgcagatgactttcatgaaagtcaaacatcaagaaataacctttccatgtagtagtacgaccaatccaacgatggatatcaaaatcaatggcagagaagtctttccaatacttatcacgaattgctttgatgttcatagcaggttgaaagttataaaccggaggagctgagtcagaatcatcaaagaaactcaacccgccgcttggaaaatattcttccattagcacggtattaaaatcgccgtttgagctatgactaaacagtacatcagcacgcttaacggtttcttcaagaccagcatttctacgaagtgacaatgctctatggtcatgttgatatacgactacccgaacttcaggtttaatgttctctatgagcttcttatagttatcaatcgctgcttctggagcgttgacagcaggtactgagttgatgataagaatgtcacatgcgttaagcagagataaagtcttatcgtagtcatctgcaagagacacaggaatagttacatctttatagctatgtgctctattacgagtaaacgctttatctttagcgtaaatgatatttacttcatggccatgttttactaaccactcacggtgctcgagactgaacttggttacgccgcatccctcaagtccgcgagccattaaaatattaatcttcatatgttgacctttgttgttaattttgaatattttaccattcccgtaataaagcaaaagggccgaagccctttaaattttcttgtatacaacataacccgccgcttcacatatacgcttagcttcttcaaagcgtctaagcatatctaccttggcattatgaattgcttcataatcgggagcgggtgcttctctcctagcggtatcacatttatagcagaagtaactacgttttggtcctgtataacgttctgaacaattactgcaccggcacgtgtaatttccttccggccaatcatgtccaggattagaacccatcaaattcgtcatacatcccaattctcttcgctagtaataaaatccgggtgttcatctaaatcaatgaatccccagttttcttcgtttaccattcataccaccgtttaacctggaaggtgtcaacccagacaagagagttcttatctattagcttacatccttcggtagagcctaacacgcgatattgattatctgctacctttactgccatcgtaccagtcgcagtgtttaaagtaaatcctgcgtctttacgaacacgtttaaattttacttgtaccagcatttagaatgtcccaaacagatttacgagaggtattccagcaagtcagaataatctcatcattaaaaggttgttttaaaatagtacgcagtttttcaatagcatacttgtaagcagggaaattattgtctaataccgcgtctccagcatgagcttttaatcgctcaagttcacgacggtttttacgaacaattttgttggctcgagcaatagcttgttcttctgccgcttccattagtttctgttgaagttcgtcgcgctcttcctgggtaatattgttcatgttattcctttggatggtaatttatttcaaatgtgaattcagtatcagtccaattataactatgttcaattatagcagaatctgacctgaaatcagcgtcatgtggatttttcgggtcaatgtgaatatcaagatcaagcacctcccttaaatacatctttagcaaataagggatagcgtctaggtcttgcacatcttctaaaaacccgtcgaggttaatcttcagcctcatataaaaattccagattaggtccatcgcttgtaggttcgctctttttagcagaccctggcgccttataagcggtggattcatactgcgtcattttatcgtagatgtcctgaataaaggtttcatctgctaacgcaaccatatcatcgtcccgtgaatcatacacgttgtggacaaaatagctgtatttctttgccatttctttgcgttcttttttgatacgctgaacgaatgcattgaaacaagcttgggttatatacgcatgcgggttatcatacttagtttcatcgaagttgattaagcctttaattgcggcttcaatcccgtctgaaatcatttcttgcttccaggattgggtgtatcctgaaaagttgaaacgcttactcagaccttccgcgatcagcataatagcaaggccgatcgtatcgttctgttttactactcgaggaccgccagcagcttcagactcccgacacttctctttccatgcacagattgatttatacagttccttgttatttacataattactcatattgcctcttcgcttcaattaataatatctattataacaaatttgggaagcgagaggattaaagcattacttaatcaattcagcgcatgcaattaatttcatcatgatacgataaaaatcgttatatgtgaaatttagcggaacttcaataacggcttcaaaatcttcaaatacgcgctccattccataaccagcgatatcatctgattcagcataccagtacgttccatcttgtgcaaaagttatttggctattttcaagacagaacacacctttaatattttcatgtgtaagagtcaattgaattttcatagttcacccttcataatacgatagcattggaacagctgttccatgatatgtttgaactcaaccaaactaagttcaaaccaatcagattcatctacttcatgcatcatttccatgaatgaagagtataaactttcataatgagtttcatttaacatagaggcatgcgtttcccaatacatgccctcttcattgtcaaaccaaacacccatataagaatctatagtaaatccgccaatgccttctactacaatcataatttggtttactttagccatgcattcaccgagtcaatagcgtcttcaaatttagagaaagcatccacggatgtgtattcattctcaccagagcgttcataaatccaaaacgcgtcaaaatcttcttcaatgatgaattctccgttaggagtttcaatcgtgtttctgccatcaggcgttttagatatgaaccatccaagaaaaccaacttctgcaatctgttcttcagtcatttaaaatttccaccaattgattatagtttaatgcttttccagaagaaatcataacattacaaaatctgtataatgcttcttttgatactttatacacgtaatcggaagttgttacaatgtatgaaatacgtacaaatgttggggatttttctgctaattcatacgccagttttctagctctgccaatgtcatcagcaaacttggtatcagcaagcaaaatactatcaaatacccaacggttagtaaaaatttctgtgtatagaataaccttacgcatcaagatactctcgcagttcctgctcgtttaacccttcttgccacatctctgacggagacggaagttggctgtctagagtggatgaatcaattggaaatactctgataattacgctagtatcttcatcccattgatttgcgagtatccgtttagcctgactaatatcaggctcagaatgagcccggatatacttaatccttctatgccatacacctgtaggaatagatgcgcatacgatatatgaaatcatttcgccgccttaaccgctttaacatcgcggaagcctttcttacgttgattcttcatcttacgaatagtgctttcagaaatttcaccgatacccggagtgattggttctacaccaaaggctttgatgccaaattcagacagaagataagcaaccactaattcacggatgcgggctttaccaattttttggccttcttctttcatcgtaccgtgaagctcaacttcccactgatcaagcaaagacggagttacacaacgtccttcttccagcattgcagatactttatcataagcaaaagagttcagtacgtttttgattgcttgggacatattaatttcctcagtaacgattgttttgacagaggagattttaaatcaaatctcctgtagcaaatcaatctttgagagattttagctcttcgagcatatcatagtattctttactagcaaccggagctacagtgcagtggtagctatttaattcatgatatttcacgaagcgttcaagttgccactcaatcagattgttaattcggtgaagcagaaccccctctgaaccgacgtagacaactacttcaaattgaagcccatcccaaattctggtacggacgatatcacctacattaaatgttttcatgcgatgtaccaatgttcgttttgccaagactcacccttgtaccagcgagtcatatcatatccgttctcgtcacggatagcgccattacgcatatagaagtactcgtcatcagtaaaatactcatgcttaacgatacatcctttacgcatagcttctagagcttgctgccaatttaaccaattcatattttcctctcgagttaaacggtatgctgttatccgttgatagggctatggtatcactcatcaactagcttgtaaacaactttgtgaaatgaatttaaaataaaagagaggtcccataggaacctctaaatgaagggtatagaaatatacagaaggtggtcaagatgaccttagaaaggaactggctaatcttctatgatatctggatcgtatccagcagcaataagattggctttaaatgttggaatgtcatactgcttaacgctatccataaaaatgacaggataccgaatagcaagcgatggatagcacccgatgcgtttagcaagtgactcaatcagcggacggtcataaaccggctgaccgtcaacctcgttgattacattatagaactcatacggaagttgcagcttatcgagcaagtcacgaactgctttgcatccagggcatctccaaacctcttcagggatgccatagatttctatcatagttcagccttaatctcagaaatcaatctttcaattaattcaagtttatccgctgtagtcataggataaattttgtcaacagtggcttcttcgagatagcaacggtcagcatcattaagtatacaccactgatcaaaatcatcagcatctatgctaacaccgttgaaggtcttaactcgttcaacagacccgtcctgtgtcagagctgttaccaaaaatggcttaaacttgagcatgttgtagaattcaacatcctttgacgatgcgttatttagccatttatcaacagagtcttctttaaacttgtaccacttatcgcaacaaaataattctatcatttcatgacctgttgaagtttggcagtcagagtattaacacgcttctgaaattcttcattagacagtttttcatctttcttggtaggattaatccagtcagaaataatgatgagaacaataaatggaatagctacgaaagcacctgcggttaatgcaaccagcgcaataacattagaaataaatttacgaatagcattaatgaatttcataattttccttaaatagttaagatgaatgctgtcatagccagaaattctggtccaaacagttcagtagccatgtggttcagagtaaacataattttgtaagtcagcatataaatttcctcaatcatgtgtccaggtagaaccgtttcttacccagagtctttggttatcagaaccacgccaatttttagtggttggcagtgattgctcgtatttcccatcaattataacatcaatgtgttgtagcaaatctaagtctttaatatcttcaaatttatatcctgtccacatccagatatctttctccggaaatcttgctttaacccaagaaactaaatttgaaatctcttcccggttctgtggataaagcgggtctccaccagttaaggtaagaccttggatatacgatttgcttaaatgggatgcaagctctttaacagtattcatagtgaataactggccgtttctagcattccaagtagatttattataacacccttcgcatttatgcaaacacccggtgacaaaaagaacgaccctgcatccagggccattcacaaagtcagaagggtagattctgtcgaaattcattgaaccttacctcattacgtgcttctacttctgcatcatatttccagggctcatcagtttgaatagccccagccgataatccactttcagggtcacgggttatagcaattccaagcgggtgcagaacctctttgttgattttccaaatcaatccccattcgctaagttggttccaatcaacttgcttcattggtttctctaacatgttttaccctatgcataatttctttgttcttaccaagattgaacccacgctcagaaggattaccaagatagccacaagtcctacggattgtattcattttctttggatcagtttcaccgcaaattgagcaagtgaatccgttttcagtaggtgtcatctcatgagtagaaccgcaagaaagacatttatctactggcatattaacaccaaaataatccaacttctcgatagcatagtcccataccgcttcaagaccttcaaggttgcgcttcatgtcaggaagttcaacataagaaatatgaccacctttagcaatataatgatatggtgcttcacggtcaatcttttcaaaaggcgacaggttttcttctactgacacatggaagctattagtgtaccagcctttatcagttacgccctttacatctccaaatttggcttggtcaatcttacaaaaacgatagcatagactttcagccggagttgagtacagactaaaggcataaccggtttcttccgaccatttgtttagcttagtattgatatacttcaggacgagtttaccgcttccttttaatgtaagcatatcaaattcatggatgccaatatatcctaatgaaattgaactacgtccatttttgaatagttcaagaatttcatcatcaggtttcatacgcacaccaaaagcaccttcctgataaagaataggagcaactgatgcagtaacaccttcaagggatttaattctagttaaaagagcttctttacaaatatcaagacgttcatccagtagtttgaacagtttattactgtcatctgaacttttataatttgcatccagagctatcctagggaggttcagtgttactacccctagattattacggccatcaagaacgggtttgccagaagagtctctccaagcaccaaggaaacttctacagcccattggagatacaggagtttctgaaccggtaattgctctattatttcgagcactgatgatatcaggatacatacgtttagctgcgcattctaatgcaagctgcttaatatcatagttcgggtcttctttacgtagattaatgccttcttctacaaacatcacaagctttggaaagattggagtaattccatcgcgtcctaatccacgaatacgattatcaagaatagctcgttgaattaatttttcttcccatgacgtgcccataccaaatgtgatagtcacaaacggagtttggccatttgagctgaacaaagtattcacttcatattcatatgcctggaaagcatcaaatacgtctttttctgtttttgaaatagcataatcttttactaatgctacttgatatttgcgtgcatcacgtacatgtttagcgaatgtcttctctacataaggagccaatactaaatcgacgttagcaaacgtagttccaccatattggtgagatgctacttgtgcagtgatttgcgccatgatagcagtagctactccaatactcttaggagtttcaatttgagcgttaccaagtttaaagccgttctgcaacatacccttcaaatctaccaaacagcagttagtgaaaggcaaagctggactatagtccatatcatgaaaatggataacaccttctttgtgtgcttccattacagaggcaggaatgacctgattagcgatatgtttagatacgataccagccatcaggtcacgttgggtaggaaaaacgcgagaatctttgttagcattctcgtttaagaggtccttgttggttttattaataagtccctggatttctaattcaatattcattttaaactcttacgaagctgcttcttgtattttgaagcaagttgtgattttccatcactttcctcgtatgtaaacccatgcaattccatttcagcaatcatctcaggtttaccaagacgtgaaaagcgtttagccatatcggcaacatattgcgggtgaatattattgtctttacgattctggcggagatagaccagcaaattctctaaccattcgaggtagtcaatatcttgaccttttaaaccagaacggttgaacttatgcttcatttggccttctgccgcattgcacaggttacagagcaagcctctgacctttcctgcattgtcaccttctaacgcatggtcatggtcgaggtggttcttttgaatatcctcatctaaaggacgtttgcagcaaggacataaaccgttctgtgccttatatagtttttctttttcttctttatataacttacctgttaataacattactcttacctcagcgattagataagagtatttatagttaaattaacgagtaactactatatacattatgattagattctttgatgcagaatgaagtacagaaagcatatatgccttcataatcgtctacagtgaactcaatgtatgaattagtttcttcatgaagaagactcattttagtccaagccattccattgatgtcatcgtcgtaatagcctccactaaattctactatatcgccaacttcataccaatgactgcgtaaaatttcttttgtaacacgatgaatatcagcgaaatcgagaatttttactgtaatagttttagtaatgcacgatttagacatggcgaactccaagacgttgttcaagtgcgacaatgtaatccgcagctttttgcattaaagcatactcttctgaatcacaattttcctgtccagcaaatgcgtaaagagctctggtaattggaacgattgcaccttggaaatggttaagtttaatttcagaaatcagaggaacatcttcaccttggccaatttctttaatttggtgcatcgtatcttcgttgtagaaacaccagaaccaagattcgccgtgtggagttgggtcgttaatagtaatgattttgtttgtcagcaaatcaattacagcagtaattccacatgtttcaaggtcatcttcattaactgcattgataacctgaaatttaaatccaggaacaaactggggaaattgttcagttaattcatcatcattttctataacttcaaactgcttaccaataagtcccattcactttgtcctcataatcaagtagttcgtttatggtaggttcagaggtattataatcctcttcaggaatagcatcttcctctggctcgacagtttcccatcgagccgcataccatggttttaaacctttgctactttgcatggtgttggttcagaatcattagcagaatcatgttcaatacgccattcaacttcagtgcgagtaaccactttttcatggcgagaaacgatatttacttcaggaggactataataccaatcagtatgatatgaacctgaacgagattctgataccatgaaatgaacgccgcgtgctggataataccaaatttgagtgcggtcttgatacttgtgctcttgtgtccaatctccatcttctactaaaacaaagatttcttctgcatcgtcgtctggtgcatttggcggatattcaaaatcgtagttgtcgtcccattcaccggtgacaccagcaatccgtttgatttcttttactaattcagcgttagtcattttaacctcgcagcttctgtaagtcttcatcatcaatccagctttctaaaccagacggaagtgcacactcaatttcccacagcagttcttcaatagcttgcaagcggatgaactcttctgctgaaattgttaccatgcacggagcttttaaatcaccaatatcataactcatagttcttcctcatgccaagaacagtcaacttcaaagtctggaccaaggtcttcatcttcccaacgccaagaccctaacggattaccagcatcgttgtaatcaatttcaagaccaatataactccactgaacaccatgaatggtatttccttgctttacaaagaattcaccccattggtgcatgaaagcatactgtggatcagatatagctctttcaatcattgcttcacgaagattacgttctaaatctacttggtcgccttcaagaaaaacaaactcaattgggtatttcataatttcaccatacactcgccgtatttccatttagacataaccttaactccattagagtaagttacctctaccttcgctcggtgattcttaatctgcttaatttcaccagtttccaatccaccgtagccataataaagagctacaatatcaccctcccgaaggagggttccacgataatcatgcattgaatttgaatttacggagttcatcaaaaccgccgatatgtgtaccgtcaggagcaaaaatctgaggcatagttaatccaacttgcgattcacgtcctaaacggcgaagcaaatcactgataaccacttcatcaaatacacctttttctggcattacattgatgaatgcatactcttgtttcttaacatcgagcagacgctttgcattatcgcaaaatacacacttatgaatgctgctgtcgtaaccaaaaaccgtgaacatcttcttctatttccttaaatacttgagcttgaacttggttccaactcgggtgtttatacgctttataaacgttaatcattccaaggcgcttcgtgacttcgccatcaattgcagcttgggcaaaatttcttccacgggtcatagctcctttgagattggagctgttagcaatttgaccagtctcattataataaaccgaatacatgagtagcattactcgttcggcttcttccatatatcgtttacgagccattttcagccttagtagttataactaatgttttaccatctaacgcatcgagaatatctttgatgcaattatctggcattggttgaacactagctaattgcctagcaatatcatcaggaattcccatgcgaggaatatttaatttgctaaaatcaattttatccattagcagttaccgggaagtgttctgccaatttagcggcgatggcagcgttaatttgatcagcgaaattcttattcattgcgttaacaatgatttcttgaattcggcggttagcgctttcaatagacagcttaatacgaccttcagcttgcttaacagcatcatcaatagtttgacgaaccatatcatcaatagcatttttagcacatgattgggtagcgttacgcatcatgtgcgacatttcttctttagcagaaatatcactccaaccacgagtatggaacatctgctgaagctgtttcttaacttccgctcgaacatctggaatagttactgttgcaatattaacttaagattgtactgcttgttttagtttattctgggaatcttttaacaccatttctttaacgatgttattgattactgactgctgcagttgagcacgggctgctgtaccttctgggaataactggcgtactgcataagtatctaatttaatgtcaatcattttaattttctctcaaatttatgcttacaagtccgacatttcattttcagaatatcggttgtccaatcaacaagctgtacttgaatactaccacatttttcacaaggcacaacttgtttagctgcagcttctcgacggtctaccatttcaagacaggcattccagtcaattttgaattcaggtacaggtggatactcaaactcaatttcaaggtcgttatcatcaacgaccatgtcttcttttaattggtttctcacagcaagctccgggcatactcgagagattcataccgctctttgtactcattaagcgatttgactaaatctgccatcatcaattcatgtttagccaattcagcttcttttgtatcaataaaccgcttaactgattccatttcagctgtaatactgtttttagcgatttcaatatgatttactggtgttaatggaagaggtttaacaacattgagatacatatgtgctacatcttcatcaataactggggtggtgctcaatgttttaggaaaaatcttaaatgggtccaaatgtacttcaagaacagatgagttttcaccttgctgtttacagcatgtttttttaactacatccatatgctctaaagcagtacgaacttgcgctaaaagcgcccgggccggatactttccgctggacaaatggctgttaatatgaattcgtacagttacattgtcaagttcttcggcacgaatgaatgaaacacccttaggatttctagaactagtagaagatacctggtatttcacacggtcatcgcctttaagcaagcaaattgaacgattaagaatacggcgcaggtttgcattaaattcagaacagaaaatttgagcagcgctgcggtcatgtctttcttcggttttaaacgctcctgccgcaaaattataacgctggccgtaaattttagcattgccgatagcaaactttttgagctgtttctctgctgacattgcacctaaccagcgagaacgacgaatgttttctacaacaaaaccagcataattggcttcatgcgctgccatgctatttagcacacgacgagctacattaccagcaattgctacattataagcagctgggtttaaatcatgcaaagctgccaaaacctttacgtgcttctcacgctttgacaacccctttccattatgcttatcaaattcaccagctacaaacatctttaattcattcttattcattatcttttcctctattttggactgggctcaaagagtatctcaaaatctccctgaacccattatacaacaattattcttcaagcattataactttgcttgggcgcttatagaaagcatgagttttatcatctttcgctaattcaaatgtagcagtaaactgtactttgcctctgtattcaaacggaatactttttggaagggagccgtaaaccgtagctccattctcaagtacaaccatcatcttacattgtacgccgtaatagtcttcataaacttttactgacgttacggtaccggagacagtcactcgtccttctggtgcatcccctttattcttattcagctcattgaatatattatcaaagacctgttttgaatgttcctggatagcctctaagatgctcttatgggctctaacttctgccataacaacatctgttccgtcttgcaatttccactctttatatggaacgcgtacttcaagaggataaccatactcgcgaagttctttgtactccgcttgagttaagcggagtttccaccaaccgtggtcacctgtatactcaggcttatccagcgaatcaaattctgtaacatacggcaagtaactgcccgcgtgataagcttcaacttcacctaattcattttcccaaagataaccatcaaagggagcatgagggcgatcatctttgccccaagtaggagctacaactttatcaaagtattcacgaccgaagcgggtcttcgcccatccagcattcaactcctcggcgcgtttttcaactttcgctcggtgtgcttggcgggctacacgattttcttcaacaagtgcagagataatctcggttaaagttttcattttattctccagtttggttgacgagaccatcttatcaacagcctcgccgaaagtaaactactttgtgaaaaattttctccaaagcagaactgcatctctacgagatacttctactgctcctagagcaactgcttgcttgcgacgaacatcgcgcaaatcatagtgtggaactcgcttatcttggaaccaagaacgtttcattccgatggcttctgccatagcgtgtaactcatcaaggttgtcgctaaacatatgacaattctttacttgatgacctctcattttccaaccatgattcatcaagacatctacgtatactgtcatttctgattctcggtgtaggtttcaatgatgaactgtgctaaacatagaagattatcttctgaaggagaatctactaaattctcaaccatttcagaaatagttccaaaagcttcttcagtattgaacatttcttgaagttcgttccaagtaggtgctttcatttcaatctcctcattagttaacggaagctatcttatcatggcttttctaagatgtaaacaacaaaagggcccgaaggcccttaaaaagatcggaaatcactgttaaaccatggcgactggtgctgtcgccgcttaagcaatttcagttggtatttcctattgtcttctataatcatcttagaggcttttagctcttcagccaatgagacctgtttacggtccatcaagatgaggttctgggtcttctgggcaaacgtctgaatacctttgagacattccacagattcctccatccctcgtttatacttggttcgggcagcatttaactgcccttcgtaatacgcatgtatagacactatagtactaaacaccttttacctcaataacatctaagataatatcttcaacgtcttgctcagggaatgccacgccattggtctgcccatgctgaaatactgcttggtacgctgacggcgcagaaattcgggttgaacgttctttattgtcatagcatttgccatcaataaagcgtttaaatttaacttcataggtttttaacattattacaccttagcataattgacgatttgttcacgatcagcgggccaatttaaatcagaacgtttcttgtttgaccacgcaatattttcttcagcccaatgaagtttagccgatacgctcttttgtacgtctctgattgcttcttcaagataaatgcctaaatctctcgggttagttccttgagttttaaatgcattgagcaaaatatttcttacgacttctttaaattgattttcaacttccgggtgaatgaattcgcgataaccattgcatggatatccgaaagcatctaccatacgagtagtactaaattctttgctcataatccgagggcctcgcgttcatcaggatttaatttagccaaagcggcttctttaattttttccaaccgtttacgcttagcttcaggtgtttcttcctgaacactaatagcagcgcttttaggaaaagtccatgatttaccattttcatcggtgaatgtaattagttttgttggcttacgattaactgtaccatctgagccccaccaagactgccccttaactgcttcttcggcaacgcaatatgaaccataataaccaaacaactcactacggcgatcgtctggtgaaacatacgctgcataggcttcactttctgtcattacccatttcattttaacacctcatagcgaataagttcaatacgatttttaagctcttggtatgatttacgccaaggcttataataagcatttaaatcttggtgttgtttatgcatttcgtctaaatgctttactgcatcctgcacatttgcaaggaaagtatcaaatactttattagcgtattctttcctgagttcaatgaatggaggtgcacggaacacatttaccattacagaaagctcatgataagaagaatggacttcagctaatacatttttcttatcgccaaagttaaacttataaagtttttcacagattgcttcacaggctttctctgctttacccttgggtttacccgcaaagatgtgtcctggcggatatactttaatatcgtttaaccaacattcaatatctttaatagctgctaaactcattgtacccacgctccgttttcatcaatgtaattaatccactcgttaatagtccaggaagaggtatcacctttaggagtatcagcgatatacattccgcctttaaacaaaacacgttttacatcattagaaattaaagtagccattatattttcctcagttagggaggatttctcctcccgtttaaattatttcagcattgttacttcagcgattgtccgccaatttttacggtcagtcgcgacgaaatcaccaatataaagagcagtacggagagatacgttacgcagacgatttacgttatctttcataaattccaaaacttcaataacttcagaatttcttaacccacggttctgtaacatagaagtggtcattactacatcttgaacgcggaccataatctcttcattagtgtgaacaccaaggtcaagataaactgaacgagatactaaagcgttcaggtgaggagcgagtttagaaccgcgctctaattcacggtcaatatcaacgttagtgataaagaccacagtaccttcaaactcaaactcattaggaattcctttatcttccaagaaagaagatgcagtgctccagcatactttacgtttctcccctgaatccaaagcagctttcagaaggttaagaatgtccatatcagagaatacatctacatcatcaatgagcagaactgaatttgcttcacgtgattcccaaagacggcagtataaaccaattcctgagattttaccgttcactgatttgtaatcaatagcgttagtatcatgggcatgttgtaatgctttatccaaagagtaagtcttaccgatacctgctgctccggagataatcagagaacgaatattcccgtggattaaaccgttagtcattaatcccatgacgttaaagcgtttcttgatacgctctttcatttcatcaacggattcaacaacttcaattttagcagctactccgtcaattacgatatcatctttgaatacccaaacaccacgctttttaccattcagttcaacaaagactttaccatcaccctgacgagaatcttcagcacttaagctatccgggaaccactcaccgagtaactcataagtacctgaaatctctttgccgaagtaaatccctttcttgatggtgatagttgacattttattctccattactctgttttgttttgatggagctatagtatcattctacagctccaaagtaaactactttgtgcattcttttgaaacaaaaagaggagcccgaaggctcctcagttatgcatgcttattgatagcattttctgctatacgttttggaagtttacctgcccagcggaagaacatgataattgctccggcaataaacgcagggaaccaaaagatgagataaaaccaatactctcctgctttctcgatggttccatttttgattagatgcttacagacagaccaacccacgataaagtaaattattgcaacaacgattggcactactatgctccaaagtaaaatcatatttcagcccagtaaagtgataaccggagagtttctccggcccatgacataaaacgatgtacttgttttcgagtaggtcgagcagagaacttagcattctctctacgaccagtctctctgcaaactgcttccaaataccaccgtctacctttatgaggtcttccataattcaagaagaccttcattgtatcatttgtagtaagaattgtggttttcaagataaaccttctcgacgaaatcgtcccagaatttcatgtctactttcttaggcattccattcttttcggcttgatgagcaagacgctctactgcgtcaacggtcgtttccaaaatatcctgaacttctttgaacggtaactcacccgctttgattttcttaatcaagggagcctgcgctagaggatacttaaggtcaccggatgaataaatctcctgcagctgaagaccaccacgaagggcatgactcagcgctttccaatctacgccttcgttggcttctgccttacgagcacgttcaccatattcagcatcaagcttctcaagggagtacttcatttctttaactgtgatagttgtctggaatttacgacctaacacattatagaaatactgctgacctgatttatggtctgtaaaggtggtccactcaaggaattcacctaccggaagacgatcggcaatgtccttaactttccaacggtcgttaatgcctttctgcttgggacgatcgtcatatttccattcaggaacatctctgataacatccaggactttatgtaaatcggctaaacgagaacccttaacaccatacttacctgcttgcttacggacatatccaagataagccttcatgtcagtagtatagaaacgagctcggttgtcttgaatgaatttccatacttcaggaaggtcagatgcaactaccaattccggtggagtatgcagcatatccaacgcgacagtttcaccgtcagcagcgagcttgaagaaatactttaagctgaacagctcatggtcgacgtcgtctttcgtatttttggttgcgctgttattagtattacgattagtatgattcatcgcttgacacaacagaacatcacgcggatgaggaacaaagatttctttaaaatccacatctgactcgggagttgaagtaccatacagatgtgaaccaaaataagattttacgattgttttcataagtaaatatgattccctttagcgaatttaactaatgcattagaactcttggcggcttcttctgctcgagttttatctgtagttctttttgatgtacgataaacattaccaattttttgactggtgtaataatacactacctcatgagtatgatactcttgtccatcaggatgctgctcacgacaggtgtcttcgcgtaatgttgtttcatacataggaactaatgcccaatcaattcctatgctaatgattgccacctgaatgtcaagtctgttccagcgaaatgaattgatatatcctaggacccgtgattccgggtccatcattgcgaatttaatgttttcggctgaagccagaggcatctgttttacaatgctcatactaagttttttcttagtagttacgagttcaatttccatgacccgccctcataatatatgtctaaatcaatgttatctttgccgctgtacttgccagtcaaaggaataaatttaaccgtaaccttttcgccgtcatcaaaagtaaattcggcaatagggtatgtagaaattataccacgttcggttttagcacgaaatacggcccgaaggccgttcacgatataaacttgatcattcttcactagttttaccttctacataatcaatcattgggcagactttccgcttacgggcttttaaatactggacaaataacgatggttcggcttctgccggaagacccgcttttacccgagccagttttttggtatactgtttctgattgcggtagtgtttaaatttttctaaaccaaaaataaatccaaacgctatagctgcaaataaaagcacaaatgctgctataaccactgcgccaactggtactgctataacatttaaccaaagcgcagataaactaatacccatccaagcgagaattcctgtctctgccacaatcggccaaccgaacatccatgcaacagaaccgatgaatgtgataatcgctgaagagaatagaacatgaagtactgttgtccagaagtatccacatagagtttttggcattttccacatgttgtcagatttaaaccacaggttcattttgaaatgccaagagtttttattaatattcattagttatcctgtttcatagttggaatcattgcggtaagatatttgaccagttcaatagcgtcgcttttatcaatagctacacaatctccgtcacgttcaatttcgatgatagtattacgttcatacgtgtgaaataccgtaagatacaaatcaataatatgcgggctttcatcttcaattactgcatcgcctttacgggattttccgtcccattctaatttactcgccatcttttgcctctatcaagaattgaattaacgaatcaatttgtttagtatcaagatgaattatatcattgccctgttttagcacgatacgactcaactttttagtgaaatacgaattcacaacctttacatgcacatcgctgtacggattatctaaattgttactatcaagaatactttccataattacctcaattgtgaatcttttgaaccgcgacgattataggcagaagtcattacactgtcccactttccttgacattctacacaccgttgacagcctttaaccaacagacgacgagctactgggatttcctcatcacaatcaacacagaactcttcggattcccgctgttcttggagctgtttctggagacgggcccattcaatcccgtctgctattgtagcttcacgagttgcaaatccgtcatctgatggaccccatccgttcatttcaaactctccagaatcatttgcaccaaattatatgtaaacatcggatgctggtattgtaccacaatatagatgataaataaaacgtttctcattcttcgccatcatcaaagtcgtagtaatcataatcacaactgtcaagataagaatccataaattctttctgacgacggaagtcttcaataggagttaatctgtcagcgtatgcttgatcatctggatcgctgaacttatcttcttgcaattctttaatgaactgttcagcttcttcacgcgtccaaaacccacgattaagattatgaaccgaacgtttttcacctggcttgaatacgcccatatcatgagcagaacgctcagttgaataactttcagttttgccggcatagttttcatattcacaaatcaccttgaagaaaggagattttcgcgaatacacaccacgaagaccaagttcaacatcatacgtgcctgatgcaacaatgtaacgcgaaatagaaccagacttggtttcagtgcgattaacaccacacacgtgataaaagatttttccaggttgaagctcggtagttaacttaatcataatgtttttctcgtttggttgttgatatgtctatagtatcatgtaatgaagggaagtaaacaactttttgaaaagaaaatgcctcccgaaggaggcggagggtattactgcaatgataacaaatacttagtcttgtagcatagacctgtaatgtcatccagaacactttggagggcggcaggaactgacttgtagataccatcggccttagccagaatgaggtctagcatttcaatggtatcctttggcagctctttctgtgatggtaaagccggtgtataactcttacctgagaatcctaaccactgctcaccaaaagcatctatcaaatctggaatctcgttaaagaaaacttcatacgctttatgcctggcatacgatttggtatcaaaatgcgctgaatgaaaatacgcttgagacgccataagtaaaccgatgaattcatcttgtggagtaagtttaccgtcctttacaaaatcattgaacttcattatcgagttgtatcctcatgcggttagcatattcttcacctgctgaacgtcctaaagaatcgcaatctttagaacaagactcgctcttccatttactttgtatgaaagcatagaactgttcagactcttgcttactaggctccttaaatttagcataaacttgtagagctccctcaacatacgaattataatctgaaatgtcgtcgtgtgatgcagctgggaatgaaatcccgcagcccaacaccagggctaagcaaatgtgattaaaggccatacggcctcctattatttttgtccagtattacgtttgtgctgaagtacagccttaacttctttgaggtatttttccagcttacgtttacgggtataatctgcttttgaactatgttgacgaatttcttcctgaaggtgcgaaataccatgcccaatctcacgacgaagttcgtccagctgctctacagtaagattacgaagttgcttttcacttaaatgctgcatatacacctcatcagttagtaatagtatttatataagtatgtgttacttaatcccaaaggcattcgcagatgccttgctcaatggttctagcaccagcttcgtcccagttatattcttcatcatacttcagtgcgcgtttaatttcggctttatgaaataaacgcggaaccggcatagcataacgggtccaacgtagagttttccagaatccatcgcgctttgatttagcgatcagtttcttggcctctaacggtctttccctgttttcagaaatacacaattctacatatttctgctggttttctttatctttctgagttttaacgtattcgttatagcttttaatataagcaaattcgttattattctgatcgttccatttggaagattttactacatgccagcctttacggcgaattgttctagacattattacctcgttaagttaaattacctcaacgatagtaaaatcctgatttgaaaaatttaatattcatgaatagatgaccttgcatttacattttggacattcaggttctttggttttaagacgcttggtagtagtctttggagcagtgttgtaatcatatacatgaagacaacgatagcacatcacatatttttcatattaaaccaataacgaaagcaatattacgtatagtaaaaacccaatcacgagtactagtactataccacccgctatagcaaataggctactcatgtttaatataacacccattcgtattagcaataaagtctttaccctgtgccaatactttacattcggaattaagacgattttgcatttcttctcgtctatcgctttgtatagatgctgccacaccaatccaaatgaatagcatacccataattagcatcaggatagtgttatacgttcttggcttcattataaacacctaccagttcgcaccagtgtttacgacaaagagaaacgtatttgtcttcaccaccaagttctactacttcaccatcggtaatagcatttccgttttcgtcaatacgagctaccattgtagccttacgtccacagtggcaaacgcccttgagctcaacaagtttatcggctacagaaagaagagctttagaaccttcgaataactcgccgcgaaaatcagtgcgaagcccatatgccattactggaacatcatacaagtcaacgattttacatagctgaagaacatgttcagcagtcaagaattgggcttcatcaacgaaaacacaatgaatatcacgctgtgtttgtgcccacttgaaaaactcaaggatatcaatagattcgtctactgtattagcttcatgacgaagaccaatacgtgatgttacctcggtggcagaatctcgagtatcaatagcaggtttaagaatgagagttcccattcctcgttctttatagttatgagctgccgtgaggaggttagccgatttgcctgcgttcatactcgcatagttgaaataaagctgagccattaaagggtctccataaaatcagaaatagctttcttagaacgaatgagttcatcgtattcttcaggtagaccatttccgtaaatggcactaatagctactacttgctcagcacctgcataatcgtcaatcaactgccacagtttagttttttgctcttcagtaatcatctatttacctctaacaaaacagatttagcttttagcctcttcatattctaccaccataatgtcaatatcaggtgttgctaaattgattaatttctcaattagttcccaatcaccgccagcaataccagctccaatttttggaatgtatagaggacgattataaacaacacgaccagaatttagttcatggaatgcgttaaagattgcgccataatcaacatttggacctggcgcatactgagtgtatagattatagcaatatgcagtgccgttcttgtgggtagctcgtgtatgagttccaagcttagctaaattgttgtcataataacggtcttcatcgatgtcaatatctaaaatcggcggatatgctttagcaagctgtccagctacaccggcacccattgtagtaaagcaattacatccatgagcaatatcacattcatgcttcatgaatagttctacaatattacccttgatatatccagtaatcatttattcacctacggaattttataagttgcatattcattaagattattgtatactcttaaaaatatagcattgttacagttaaggatagggtttaacacgccttgttctttagggtgcattactccgtcaatagaaacgccgtcactctgcattccacatccacgagcgttatattcgacaagtggaactattacctggtcatctttatcttgataattataaaatgacattagcaattttctactgctaggaacaaatgctatttcaatgttgttcttgaatgggccattactttctattttagtcccctgtgctgcaagcacagtttcaggatagcctgggagcttttcccaggcattaactgaaaatgcgcagcataataaaatagccgcttttttcattttgacgatagtcctgacatataacgagccattaattggtcacgatacattaaacatatattttcgttaggagcattgacacataaatctttcatgctcttagccttacgatttattagtgttgtccactgagccggactacgtgaatcttttactccatcgctgaatgccgaatctaattcaagcgctaatatatcaacacattcagagttcgtattgcaaaatgttttagcgatacgaagtgaatccgacattgaattttcagcattaacagagaatgccaatactaatccaagaagcgcggcgtactttatcattattccacctttatatgtagcattttatgtttctttaagaaatgagctttctctaggacatctgacgcataagagtttcctcttttgacattccatcctgcgttataactagcaagagcttttcgcatattgccgttatgtatatttaaccaatatgaaagctcaatatatgcccattccgcggaattctgtctagatttaagcatttttcttatttcagaatcactaaggtttttgccctctaatttagctctggctttaaccgtaggcaagtaattttgaaataccccataagaatgatgcccctttcctgcttttaaattggctcctgccgaagattctttccatgatatagcagccattatatatcctaagccgttattatcataacgattttgtggctctttctctttaccagatttttgatattgttcaccaaaattatatgcgtaatgcaagttatcaagttgacttgaagtaaataatggttctgatgcatttgaaatattaatcaaaaataacccagataatattaaaagtttacagttttttaaaaaagtcatattcaactaatcccttataatttacatttggaaatcctttgctaattgcaatagttgtaaatctaccgcactttggtttatttgaatctatccataaatcatataatttagtatacatgggttcatgccaaatcggtgattttctcattccctttttctttttatctactacttctattgaattctgtataattttagcattttttatattatttgggtctttgtaaaaattaattctagcaatactcattttttctttagaacaagcacgatttaacgcttctttatgtttttccaaatttaatgaatttgaataaaaagcttttaatgtatttgattgttttattctattgctaggatttttataatattctttaagcttatttgattgagcttttgaaaataattttttagcttctgcatagtctttagcggaaatatagtattgtctatttccagtatttgtattactcatattccaccatgcagttaaaactccatagtgatttggatatatttttgctaaatacttatgggctaaataatgttcttcggctgttaataatactaagttttccttatcatcagaacctcccatgcatttaggaattatatgatggctttcagtataaaaatttaaagcattcttatttaatcctctttttttagaaatttctataatatgattatacatagtaatccaattcatgtttacctcaattaatgtgtataacttttgtgctgattttacctttcaaacgtttatcattaacgaatgccatacgacactttatactaggtccttttcctggtcttggaatatccatggtaaatcctagccacagatttccatccgtaatttctaaccgcattggcttatactcgatattttcatcaatgtcttttgggtcaattggaagccaaggcattgctaaaaattcattaatttctttaagatgattaggaattttggaaagaacagagaatacatactcttcatcaatttcacgttggatagcacggtccaacaaatgatcagagtacttagtgaagaaaggctctttaccctcggctttcgcccgggcacgaactgataaattcaaagagcgaaaagcttcctcaaacttacgacgcagtttagttctgcgaatgaatacttctgggttagttgacatagttcattctcctttatttgtagggccatagtatcatggcccgtaaggaaagtaaactactttttaatatttttcttctggacagaacactgcacggcaagcccacatagaagcttccttcagtttctgttttgctgtacgaatctgggcaatacgttcgtatgcttcatcgagtacctgcttaggttcattgactgacacttggtaattaattaatgcctcttcttcttcaagagcagtaaagataagaccaagacggacttctgcgtctttgatagcattcactttaccaatcttttcatcggtatgtggcttatatccctttaatatcttcaattgacattatagtgcctctgtgaaagtacgagcgataacgtcgcgctgctgttccggcgtcagggagttgaagcgtaccgcgtagccagaaacacgaatggtcagctgcgaatatttttccggatgctcaaccgcgtccagcagggtttcgcgacgcagcacgttaacgttcaggtgctgaccgccttcaatttttaccgttggctggtattcaatttctacttcacgggccttgtatccgtaaaaagtttcagcatccgtaatagtatcttctttaagaacttttgaaacgattactcgtgcgtcatcaccatcttcaatgtaaatagtgcctttaagttcgccttcaagaatttggtatgctttcatatttccccttaattagattctttattccaaccatgcatatatgcagtaactacactcattttattccattcgtctgaatgaaacttcgcagctgcttctagataagttattttatcttcatgataagtaacttcttcgtcagtttctttatcgtactctacaatttcaataggctcgtcaactccatatccacgagtgcctatatacgttgtagcttcttcccactgttttgtggcttcattccaagttccattctgatgggcttcatagaaatcttgctcaccagaattactgaactattcacagaagctctcaactaaatgtggaggacaccttataacaatttcagccattgcattgttttctcttgaatgcgttggtcatatgtgattaagcttgaactaatcacgcctttgagcttgccggatataaactcaattctaaaattaggatagcgattcatccatttcgtgttaggagcattagaaatgaattctgcgcctttgaacggaccagacagaaacttgtagcgcttgtactcaagcaggttgccagccgtaaccattgttattaattgcttcatatcggcaaatcctgtattttccatcactgtaatcatatcaacaatttctgtctgtgtcatcattgcattcctatcacgaaaaataaaggtaaggtatcattaggcatagaccatctgatagcttcctggtacatatcatagaacttcatcatatcgggaactttcattggttcttcaatgataattaatgctcttccaaactttcttcctctaaacttataagaggaatcattggatagaaattccctgattgtcatcggaacaattgatttagctatctcgttagccggtaatttattaattaaatgcgatgaattatattctcgtagaataccttccatcaattcagatgattgtgtgtatcgagtagataagattataaccgaaccatcttcaagcaaccaatcggtagcgaattgacataaggctgtggtctttccggtttgtcttccaccgtctagacgaagggtaccgtactctcgcataaggcaagacggttcataaaaactgtagttgggattattcaatcgtctgtctgcagcgtctctgaaagcatgcatcagggtcaaataaatgggagttaagtgtttcattttagattccagttaaaggggccattccttggcacatgtttaatccatcgacacactatgtaaaccccttaccgcattgcgctcgaccttattacaggtaggaaaagctacttcactcagaggactcgacgttcatgaggagaggtcgtgttcggctttattaggaattagttttaattacgggctgcattagcaacggcgtaagcgtactgaacattagcgtctttaaacgtacctttagtggtatctaaatctgccttaaatccgcctttagtcataatctcggcgaattctttacggaaggccatggcgtcaagatttttccaggctgccttatgcttggcgaattcgaggcctgcaaagttgacagccttagccaatttattgtcaataacccatttacctgctttaggtacaaataccgggcctttctgtttagagaatagttttaaattccaacggcgaaggtctgcatcggctttaacaaaagctgcgtctaagttactagcaacaacatcttgaatatggccaaatttaagtccatcagcttcaatatttaggtcgttacgccagcgaagtccttcccaggcgaaggctttaaagtctgaagcctttgtagctaaataccgctcaataggagctgttttagggtcaaagccgtttcctcggtaggtccactcatctttattaatgccttggacctttcctacagaagcttcagtgataaattctttatatgttttcattttatatcctttaagttaatacgtgttttaataaggctactataccacattaccgtctcaatgtaaactacttaattgatttagcgtaacgaatagcgccacgatcgtttacgaacgcaattttgccattacgcatgtacatggtaacagtacgttggtaaccgttagaagttttgccagactgataacctactaatgcaaagttatcttcaccaggtttgttctgcttagacttaatacgctcatgaccaagtgccattaaggagcgtgcatcgccagatgctactgccttacgagaagattcatcttcaaccgaagagacaaaatcatcgaatgaatcaaacttagcatggctcttattatataacttgccgtctactacgtagttatatccaacaacgtccatttcaatttctgtaccatcttctaacgtggcggtcatcttctgacctttttttaaatttcagaagattacttccaacagattcagtcattacgccaactgttgctaaacgggattcatttaaaaattctttataagttttcatttattttccttgataagcggcccaagttccggtccgcatagtttcaattacacgacgagcacgattaggtgtctgacgataccaacgtgaatttgcaagttccttggcagcagcttcccactttttagcgagtaataacttcattgaagctgggaacccggctacaccagacacacccatttggaataccatgttaatcagagcagctctacgaacatcatctaatacattatataccgggtttaatgtagcattagcaacaatacctttaattgccttctcaacatctttggcaaaaattacttctgcctcagcctgagtaatttggccacctgtagaacgacctactagcttgtccaggttagaaatagccaaagattttgacgggtctttagtcagtaagtggccaataccaatagtccaatacccttcggtatctttataaattttgctatcgtatccttcatcaatacgcagcatgccaaaaatatccataaggacctcctattaattataggagtatttatttggccctgcacttggctatgaataattcaaggctacacttctcgtatggcgtccatttacctttccaccacacataatctcttctatcgtcctctggaatttcattaaatcctggacataacttttctgccatgtaatacgacgattttgcatactcgctatcactgaagacataccgtgacttcattagtgtacgtgacaacttatctcgaggatgaaatatgctaatccatcttccgtcacgaacaaatcgtagttcatgcttataaatgtgtggaatgcctaattcaatagcttcttccataataacctcaccgagatgtgctatacatctgtgtcatgattttatacaaacttggtcccatcacatatttccattgagaaggtttaattaaagcaaatgcatcgatttccgggaaagaaattccattttcatctttatggtaagctgtacaacggcaatttctgaacatttctgggctcacagggagcgtatatccaaacagatgaatatccttattgctggcataatcatgtcgtccaaggtcatataaaaggtcttggtcaaactcggtaaatccagtctcttccttgcattcgcgaatagcagcttcttcatggtaaactcgaacgtagtactcttcaacagcaggccaatctttgcgaacgtgtttaatcaaatctttcagttcacgggtttctgctacgttgaacactgcattctcatgttcacctttaatccaaatcgcgcgataacggtcaggagtaccgtattgattataaccacgttcaatttggataaagttgaatttagacattttattctccgttactctgttttgttttgatgtagctatagtaaccgagttgactagcgttgtaaacaactttgtgcacaaattttcaaataattttagggaatctggaaggactttctggaggatagaatggatttatacagcttgggatacagaaatgcccagacgacctctagaaggtatctgggctataatttcggtattatcgtatactaaaaagccccgtccgaagacagggctctgagaatcgacagcatcacctactggcagatgacctgcgaaattcattcctttggactcggaggcatcagtctcatccaaagaagtatagcgtcaggaggttatgcttgcgacagggaacaaccgactagcggcaatggacgaaccattctcttctatctgacgactcaacgagggcatacgcaagtttcccttcgaatttggtgccgattgcaggagtcgaacccgcgacatcttcattacaagtgaagcgctctaccagctgagctaaatcggcgtgatttaaatttggtacccctaccaggactcgaacccggactaccgaccttagaacgatcgtgtgctaatccattacactataagggcaattaatttttcaacaaacgtttcattataaacattcgcatagtgaatttcatgtattttccatcctgcgttagatattaaatcatgtctttctttgtaatagttatttaatatacctaatttaggatcagaataatgctgatttccattaacttcaattgctatcattttatcaggaatagcaatatctatagaaaaacctctatctttaattggttgatattcttctataaatgaaatacctaagtcaattaagatttctttaagatgctcgcatggctttgatttaaatttatcatttcttttccatgggtgtttttctggattttctaatatccatttcttgcgagcattagaaattttaatacattcttcttttggttttattcttcctttagaagctatactcagtttttgtttagtttcatccgatacagtaaaagtataacctaaatttttagcttttacatactgatttaagttaccgtttttaattcgggcagaattcattgctgccactgattcttttccgtaattctttcttttcggatttaattcacaccatctagagtgattagccatccagcctttaggtttatcagatgtgtcaaattctttatgacaatgtttgcaaatactcattccaatctcctacaatataggagtatttataattggatagagcacaatttggtgcgtcgaacgagactcgaactcgtacgggtttaatcccgggagattttaagtctcctttgtctaccaattccaacatcgacgcaaatatttgttcaggcaggacttgaacctgcacgactgattccgtcagcgatttaccaccgtcgccagcatatgatgcaatatgcgagctcaaaaggtgtccgtcaccatgtctaccgatttcaccactgaacaagataattatattactgattatttatagcatttctcaaacgataaagttgattacagaattcacgttcagtcaaaatcgtttcagaaattttgtttttgcccatactgtgagtgagcgtagcattccgggtagcagccaaagcttttctgaatccttcatttttactaagtgcatcatatgctcctgttagtaaattctgatacgcttctgaggcacggtgaataggaacacctttccaataaagcgtttgtgttggccaccaacgtttcttcttacctttaaacttagcggactttccgactagtgtacatacatgtgcttgcatttcaggcgaagaaaatttgagggattgcaagaatccctccattgatgcgcattctacgccatcatagataaatttatgaggagcgaaattactcaaagcacatgatggatatgaactgcctgaaccaatatccattacttttccttcacgtatttcaaccaatcaacttttaatgggctttctttctgcttatacgtaattccaacatggaatgcaaccggagcatcaggaatacgaatttcttcttcaatgttgaagatttctactttctcaaatactcgcatgaaatcatagtcatattcaattggattacccaaccaagcctgaatagcatacataacttcatttgaacaagaatagtggttatctaaataagcatcaaactcttcgtctgaacaatcatatgcaggaacaccaacgccaaagaatttcttggaaaattcaggagttacatacttctgttcagtatgaagcttttcaagaattgcctcatggttgtaatcattatttccaaggcattcaccacgccggccacgagaagaaaaccattcaagaacatgaattacttgattaatctcttctttttctaagccataaaccatttgggtagaataccggtcggcatcattttcccaagtggtaattgccattgctaagcctttaggaataacttgtccaaatttaatatgcatttcaatttcctcagttgataatttggtgaccctggcaaagactcgaacatgcaaccaatcccttatgaggggaacgctctaccaattgagctacagggcctttatagaaatcttacgacttttataaaagccctccgaagagggcgccttgtcgggcttatccacctgctaggcagaattactcacacataaaatcagctacttcccagaagtcatttttaactgctactttaaccaccggagaaatttcagatgttttaatagaaacaattacatcacctgcgacagtttctaccagaccaacgattttctcgctgcgagcaacaaatttactcaccggatgaaatttaccggtagcagcgaacatagcttcttggtcaacaatcagtgcgatacgtttcattctttttccttgtttgttttgatgtagtaataataacaggttattcttgtagcattaaatctcgaaaatcgttccgttttcccacattgttgcgaacataggagaaaccttaacgaatgatttgcttcgcattgcaacgtagtcgttatctactttagccaatcctgaagcaatatcagtaatacggccacacttcatagaaccgcgaccacctttattgtatgtgcgttctccgtagaaaacgatatcaccaacttgtacttctcggcctttagaatctttcatcatattttgcctgctgaattcgtttaaaatcgttaacaagttcttttgggcctgacacattgttaaatggaagaacttgacgtagtttacttactttacaaccagaatgataagcaataacttcttgaatatcacgctcactgaagtattcatatttaatcagtgaatcatatcggcatttaatccagacccacatacctttgcgttcatcaaatgcatatgcaaagtcagcgttaatcattaaatcccgtttagcacaagatgaaagccctaatgctaaattaaccggtccatccaaagacagcttcaccgtaatagcatttactttatttgcaacaccaataaaaatattcattctatttccttcgcttgtttttggccttcttgtcgtacacgagaacgtcctgctttatgcagtgattcgtaatatgctcgacgtctatcaatgttttctgtacgatatgctttcccgaaatgggatgttttgaagccgtaatatttcataatataattctcaatggcaagtgattggacggtatgcccggtctcgaaccgagtcacattgactttgcagaatccatgtgtttaatatatcacccatactcgatagcatatctgaacgagactgcaatcccgctactcagcttacgccatcttgtattgtgtcataccgataatttggtctccatagaatgactcgaacattcgacctctccatcccaaatggagcgctctaccaggctgagctatacggagtaattttgatttaaaattcttcttgcttgagtgtgacttacaccaatatgtttagcatatttagataattcgcctcgtttagaaaaatcatataatttagaaatttccattctgtaagctctttcatctgtactaactctagctaagtttaattcggatatctttttcttgaattcagccgaatggtgttttcctgtaaatccgcttggcttaccagccatattatctttccatgtaggtaaatccaaggatttcactgagtttgaaatctttttcttatgctcatctgataagggtttattagcacaagattttccaacttttgacatattagttcttcgttgctcggacaagatttcattattgcatatgtggtcccatccgccttcgccaccaagctttaagttatatgtgtcaggtcttttaataaattcttcatttactagctgtctttccgcattatacatatctttagcattatcaaaagtctcaagaatttctttttcaaaattttctttgccgtactttttaatagcacgctttaaatttttaccagaacccatgtatccatcttccaacttagaagtagaatgaactccaatataaaacttttgacttattttatttgtaattttataaagatagtaatgcatatcagttcctattaaaagaaccgagcgtctctcgacgagtcacaatttggagcatccaaagggaatcgaacccttatcaagtgagtggaagtcacctataatagccgttatacgatggatgcaaatttggcaggccctgaaggaatcgaaccctcatcactgggtttggagcccagcataatagccgttatactaagaacctgttatttggtgggagtaactggactcgaaccagtcaccgctcgattatcggtcgagagctctaccaaatgagctatactcccatggaaagctaatcatctaattgttgatgtaccactgctatgggcagcgtttaactttcataaatttggcggaggcaggactcgaacctgcgcgtgtcgggatatgagcccaacattctaccaactgaagttaccccgcatttatccgggttcttgaagtactaacaagtagcttgatgtagaacacgctaaagatataatcttacgaatatagagcttattccgtgggaacaaacagcttcgtcctcggcattatcttataggactcaaactcatcttcaagaactgccacgttcttatttggcggacctaacggggatcgaacccgtgctctctctcccgtgacaggggagtattttaaccaactaaactataggtccataattcgctttcagagatactctggcacgatgccgaagcaaaggggaacaggactctcatcaccttggtaccagatgaatcttgtttagcactctgttctaagatgtatccctgaaagcgaactttcaacaccgtaagaaattataacatgaacaagcattaagcaggatgaaatcatactccttaatacaaacgccatgccagggatttctgtgccgacgattttatcagaacgtcttctgacttcttcatttggcggcccgagaaagacttgaactttcaaccatccacttaacgggcggacgctctaccaattgagctatcgagccgaattaatctttttctctttaaagagttttattatactatttatatcaccctttatccattcgccttcagcatttaaagacttatgataagagaactcttcctttatacgattttctgaaaaataatagcattcaagcttgtaatctctgagtggagaatatgtttgataagaatttaatctatcataaacgtccacagatgaacctattttataccatcctttaaaagcaggattagtaatacaataaacaaatccttcctttattcctttagacgaatttccatttctaaaatatttaacacgtaataaagataatttagtaaaattgatttgtcgcgaaatcattttatctgctttacgactgttttcatctaaatactgtattttaaaattaggatgaacatatttaaaataaatgtatcttgcaaattcgtcgcttattggaaaatcaataccaaagatgtgttcttcatttaagaatctttggtatttttcaattatctcagctttattcaacttgaccatccccaacctttgccgggtccatcataatgtatacatatgtcaggagaaatagtatattcatatacattactgaatactgcaatgctttttccaaaatcagtaaaacaaaattgctctcctggtgaccaaacatcttcaaacaagataatactcaaaactgaggaaaattcatctaagtcttcatctgttaattcgttatcgcatagtttaatataaaattcttcttcagcaatagctacaatgtgtaataataaatcgcctgtagacattataattcttactaactgtccgctaaaacatccgcgatttaactcagatggagttgtgtaattaaatgcaagctcagcaatatcaggattttcccaagttttattgttaaaatccattaaaattggttctatcatatttttctcactctgtactgtagttgatagattaataataacaaagaaaacctaaagcatattacacaatcggtgagctctttgatttaaccaggaatacccgatgtggtgaatccatatgagagagcaatacccggtgctcaggaattggacttgtatggaaaggaaccacacgataacctttaggagtaaatcctagcaaaataccaacgcttgctgcagaaagtgacccaccacagtagtatgatactaaatcaccaggctggatttcattgtcaagagaatcggttttggtatgcttaggcgtaactaaatcattaggaattggaacgccttgtgcatcatagtattcatgggcaagaagcttataattctcttgatagaaagtattaaatgcagctctgatattcatcacaatttcctcacaattaatctttgtatgcttcagttgaacctttagcaacagtctcaaatcgggaattcagtatctcaaaatagtcttgatacgttccctggagggcttcatagcattcttctaccgtagagtagacacctctgatttggtcagagccaggagcaggataataattagaccaagttaaaagtgcgtacattacttacgtttccagctgtagtgagccaaaataagaagcactgcaatagcaagtagtgatgaatgcagtgctgccagtagtgcacctagtcctacacccaaagtaacataatcatacttagttacttcttcacggtttaaatcatagtttttgatgaaccactgcttaatctttttcatgtgctattttatccattatgaaagaaatgatacccattagaaatgcaacgcttaatactgatactgtttcaggaagagacataaaggctgcaccgataatgccaaaacctaatgctcccatgcagattgttgatgcaacatttctaattaattcacaacgtttcattttattctcctcaagttgatagggttatagtatcactactacaacccgttgtaaacaactttgtgaaataaattcctatttcaaatcttctgaccagtccagttttagtggctcttggtactctctgtcaagcactaccggcacttgaacttcaccctcgaagtgagctggacctacattgtagctgagagtaatgtgcggtgagtaatctgggaaatcgtgagttgctcccaaagctcttgcatattggtgacggaattttaagtattctgaatctagcttaagaactagcgtacgtccgtcttgtgtgtcccatacttcaagtttacctgatgtagcaacttcaaaacttcctgaagcacaaacgtatggaacatgaactcttgaatagcatatcgtcgtatgaatcttatgacgaggtacaggattagggaccttcaactcacgctgaaggtcctcaatagcatcaagagttttctcagagaatttagcagctacatatagaccagtgctaaaatcgctgaagttcattaggcatcagcttcttcagtggtttcttctgcgaactgtgcttcgatttttgcaaccaggtcatcaagtttaacctgaccgtcttcactgatttcaacgccggacacagcaatcagtttctgtagtacttcttcatactgtgcacgcagagcggacagaccttggatggtttcagacaggtcaaatacacgaactttcagagtatcgacttgggcttgcagttgttcagtagtcatttttgaattcctaatatagtgttgatttttgaataaagttcttctagagaaccgtcgttagttattacgatatcgccttcgcgaatcggaagtccacgctctgtgacgtgagtatcttttttagaaccttcttgctcagggcgaactacatgaataacagtagcacccatcgccctggctacatcaagttcatggtcttggcgggtatctgggacaatgaaataatcataatcaccaaaagtatcagccataaccaaagtgaatcgtttcacccaatacatgcgatcgagcttatcacagacaatgtcagtcccaagggtctgcatgagacgacgaattgaccatggctcaacaggtttatttattacaacttgacggatgacttccatcgtatcgccgtcaagaattttacgcttgctatcataaaccaccccaggtaaaggcaaatcatgatggacatattcaatagcattcgccataatacgaatcacgtctttagtagacagatttaaatcctgctcacgatcgtaatcaataccttcaatcattgaccgagtaatgcgcggaaactcacgagacgtatcgcgataccactcagtaagcattgcatcagccaacgcatctttaattggacccgctaactgatgctttgttgcattgtagttatccataatgtaatcagcagtagtgtctttgccactgcgttttttaccaatcaaaaataaaagcttcaaattattacctcatagaaggatgcattcccataactttctgttgatactgggattcgcgagtatcattgacagaaggtctaccagtaattattataccatctttttcaacttcaatgtatttgtactgcaaagttgctacacataccattgctgggtcggattcttcggttaaagaatactcaatttcagataaatcactcacccaacctccgatgtagcggacagttaatactatatcatgtttatcgttatcaagaacatgcattaaaaccgcaccaggaaatccttcaccgccgttattccatccagacttgtctcggtcaatgtagttttgacagcttaacatccatttgtacatttgtacccatgaatcaagattttcatctactaaaaatctaacaggaacagcgtcaaactcaaaagtagacccaggcaatttagcacgatgcatgccttgaggcgaacctacagtatcagtagcaggaatatgaattccaggaactacggctgtttgaagattagctttaaacgcttgggtgaggcccccgtcagggacctctaatataaagttagttgtgttagtttgattaaacagtccagtagacattatgatttccatacagaagtagcagagtagcgtttgcctttcgacatgaactgctgcagtggtaacatgactacattcgcccaatcagccggttttatctcaattaaagcaccctttatattaccaggaatatatgctttaatcattttgtcagcgccagcaaatcctttaacttggctccagtttatctttaatctggtcttattagatatcactggcgtattagcatactgtttaagaagttcttctaaaaactgctgacgagcctttggcggaatgtagtgaaggtttaacccatacatcaatgtggttgtaccttgctttccaagaccaagataaactatcaaaggaaatttatcccagaatggaagagtgtctttgtgcttagcgtcatatatgtaagcatatagctttccaggttgaggcttggttacagaatgaccacgtatatttttctttatagtttctgcaaaccatttagcagatttattgtttactgctgcgccttcattacgaattttatctttgatagagcttcgaaatgaatttaccatcacaagagcacgctcctgtttggtcattttgttagcaggttttttctcaatttctgctactttaattgccgttttaattcttgatgcatgacgagccattgctttactgaacgtagcaggatttattcctttgctttcagcgaatgatttagacgtcatgccttttttacgagcagcagagtattcaactcctaatgctacccattgattttcactacgggatttagctttaggcgattctgcagcttcagtgataaattcaaatatagccatcagcctttccatcctaattttttaagtgaatcttcggtaattaacctaaattctatacccattttactggcagtagcttgagctgctttccacttatcaacgtttacagaccaagtgtaaatttcatcaatgtaccgtttcttcgctgatgtcgtcaactttgtgggtttgaccggaggtctagtttctttctttggcttaacttcaaaaaagaactgttgaccattagaaaacttagcccagaaatccatgaaataccggcgtttctttccatctgcattactaaagtatggaatgactacctcttcgctgttccattggactacatctggatgattgtcaagccaacgcatcatgtactgttcccatgtagaacgataagtaatctttctaaagtcacctttatatttgtggagattctgcggcatgaatttgccagaatatgccatagtggcctccttataaatactgttattaatatttataagaggataaactatgctcttctcattttttagtccgatagattattctgcaaagaccgtaaaaggtgctaaggcaaaagctatcccaaccgctgacatatttcgtaattatcgcaaatatttcgacactgtagcagaaaactatcttttacaaacatattacataagtggagctcctagaccagaagaattagcatatattctttatggaaatagtcagctgtactggattcttttaatgtgtaataacgtatatgacccgtttagagattggattaaaacccaagatgcatgctatcaatttgcgcagcaaaaatatgcagatgtaggtggagaccaaatactctatcacgtggatgcaaacggcaatcgttattataacctcgagcaatatcctgaaaattcaggcatttggtatgataaaggggactttaatcatcagtaccctcaatatactggggctttagctggtgttgacatttatgaagactctattatagaaaatgaaaaactgcgccaaataaacattatcaatcctagtgatattgaagcatttctttctgatattatacgagaaatggaaaaagcacctgacagcgaatacgaatcaggccgatacaaatcccagactaccatcggagaagttttatgattgaaatgaacgattcattaaaatggtttactggtgttgttgaagacagacaagacccgttaaagcaaggaagagtgcgagtacgcgtttacgggcttcatccgtttgaaaaggtgcaaggagctataactggtcttcctaccgaagaccttccttggatgtcagtgattcagcctacaaactcagctggaatttccggagttggctcatctataaccggaatggttgaaggaacatctgtatttggcttatggcttgatgaattcaaaacagcaggattagtaataggaacatattctgcgcacagaaaaactaagccaaactacacggaaggtttttctgaccccacaggtcaatatcctagacaggttgggtcagatactaacccactagttcaaggcgatgaaactgggtatagtgctgtaccaaatatcatccaagatagaaacttggatattggcattaatcctgacgatgctgacctaagcgatattcctgaagacccaaatcctgcaattacaataacagatatgcttaatagggatgaaggtcttagattgaaggtctactgggacacagaaggatatcctaccataggtattgggcatcttatcatggcgcaaaaagtacgtgatatgtctgtcatcaataaaacattatcaaatcaggttggtcgtaccgttacaggaaatcctggtatcattacaatggacgaagcagttgcactatttaagaaagaccgtgataaaatgctttctgacattaaaacaaattcacgggtaggacctgtatatgctaaagtcaacaagtcaaggcagatggctttagaaaatatgagctttcaaatgggtgtaggcggtttagcaaaatttggtaaaatgcttgatgccatgttcattggtgattggaaaaccgcttatacagaagcaagaaactctgtttggtttaatcagacaaaaggtcgtgcttctcgtgtttccatgattattctaacgggtaatatggaatcatatggagttcctgctccaaagccagaaggaaaaaacctgtctgctgcttacgtagaaccaaagtctggaggtaatcctgaagacccatggactccggaagattcaagaattcttttcaaagaacctgagtcttcatataatggtcagtatccatatgttcacacaatggaaacagaatcaggtcatatccaagagtttgatgatacacctggctatgaacgttatcgtattgttcacccaacaggttcatacgaagaagtagctcccgatggacgccgtaccagaaaaactgtagctgatttatatgacatgactcagggtgatggaaatattttaatctctggggataagaaggttaacgttggagggaacgagacctattataacatgtataatcgtcgacagcaaattgatggcgataacacgctttatgtacgtggaaatgaaaccaaaactattgaaggcgatggtactatttttgtcaagggtaacattaagatagtcgttgaaggaaatgctgatatccaagtcaacggtgatgccactactaaagtagatggcaaccacgacgtaaccgtcggtggtaacttaacttggcaagtagcaggtactgtgaattggaatgttggtggggcttggactgagacaatggcttctatgagctcaatcgcccaaggtcaatacactgttgatggttcacgaattgatgtaggttaatcatggctgatatacttcctattaatacaacgttacgcgaagtaatagaaggtgaatacgttgagcagtactttactgctcaattatctaccaacgaaacattaaaatcaataaatattatcgactatcaaccagtatctgatatctctgtgtctgaaacctattataaaggtaattataactcagtttttacttttggaaacgatgtgcttaaataccgtgaaggcgatgagctaaagtccgcttcagcgtgggaggatttacctaatcccaaaactgctgatttatacctgtggaaagcccccagaacactagagaagacatttacctatacagttgagataatatatacagtgacagaagaatcgtctggaggttcatccggaggttctagtgctccaatcgtaacagaacataaaaagcaaaaggtttactctcaaaccgttaaaggtaactggagcagatggggcgaccaacttcgtgcttacgtatatgcggggaattaaatggctggtctttcatatgataaatgcgtaactgccgggcatagtgcgtatcctccgacagaagtaaatgctacacaaagtaaagtattcactggtggaatagcggtattagttgatggtgactcaattacaccgcacaccaagacggttgaccctcatgatacgcatggaggggttgttcaacctcgcacatccaaggtatttgtaacaggcaaaaaagctgttcaaatggccgatccaatttcttgcggcgacactgtcgcgcaatcaagctcaaaggtattcatacactaatggctattaaagaacctttaaattatcagttaacgcgtactgcaaacgctatcccagacgcatttactggagcaacattcgatgaaattaaaaatcagcttattaactggcttagcggtcaaaaagagtttcaggactttgattttgctggttcgcgtttaaacgtgctattagacttattagcatataacacgctttacatacagcaatttagtaatactgctttatacgaaagctttatcggaacagctaacttgagaagttccgttgttcaagcagctcagcaaaacgggtatttgccaagttccaaatcagcggctactgcgtctattatgcttgaggtaactcatccaaatccagagccagcaataaaaatacctcgtggaactaagtttttggcatatgcgcgggattcatcagtagacccatacaactttgtcgttactgaaaatgttattgcgctaagagatacttcagcaccagaaggagttaataggtatcttcctattgtcaatttggcacaaggacgtattattcgtactcaattgtcatatgacccgaagaaacctattgttattcgtgatcagtcgattgaccgtaagcaggttaagctgtgggttgatggcgctgaatggactaactggacagacagatcaatggttcatgcttcatccatttcaacaatttattatatgcgtgaaactgtcgacggaaataccgaattcttctttggtgaaggcgtggcagaagcctctgtagcaggaggagttcttgaaagtaatttcattggtggattaaaacctactaagggcgcgcaggtagttattgaatatattcgtactgatggtgaatctgcgaatggcgcaactgatttcagctatgctgatactctgcaatatattgtagtaaacaaaatcatcgaaaactggtcggattctcctgactacgttggagctgatggtggtggggaacctgaagacattgaacgtattcgcgaattagcacaaattaagcgtgaatctcaaatgcgttgcgtgtctaaaactgactatgaatcattcgttagttcacgctttggttctatcgtacaagcagtgcaatgctttactgatcaggacaaaccaggatatgcatttatcgcaattaaaccaaaatctgggttgcagttaactgcggttcaacgtgaagacattcaggattatcttcgtccattctgtcttgctcccattaccccttcggtaatgagtccagactacttgttcatccgtcacaatattaaagcttcttatgcattgaataagttgcaagaatcagagcagtggttacagtcaaaaattatagactcgattaatagatattacgttgatgaagttgaaatgttcaacaaaaatttcagtaaatctaagttgttgacttacattgatgacactgaccactcaatcatcggttcttctgtggatattcagatggttcgtgaaattgtcaactatttcactcttcctagcgcaggtattaaatactataatactattactccgcggacgttacgttctggtgatttggtctttactgttaccccaactgctgaaccgtattcagttaatatcgttggaactgacccagataaaaatggcaaaggaaatatggttattggaccgtttaagccaggtgatattaaagagaatactcatattcagccatatactgaagacgattttgatagaactactaatggagaaagaactcgttggtacaaaatcggtgaagtagattattatggtgataacatttactggagccttggagctattggagccgatcctcttcagtttgaagaccaaagtattgagctttattctactcctactcaggatatcgtcttcgcccgcgatggaacacttatcgtatttgagaatgatcttcgtcctcaatacacaactattaaattggagcctattactcaatgacaattgcaccgttcgtcaccagcttacgaattcataagctatctgcgaatcaggtcaatattcgttgggatgacgttggtgcaaacttctactattttgtagaactggccgaaactcgaaacagagcgggggaagttatccccgctgataacttgagttggtcttcactgggttataccgcggataatgattggttcgagcaaaatcgtattgaaccgcttacttattataaaatgcgtgttcaaactacgtcagcaggatttgaaccgtctgaatgggttgaaacagaagagttccaaacttttgaagaaaacgcatacacatttgagcatatgcaagaattcagtttagtgaaagaattcattaaacagaagttttctttaaacaacatgtcgtatgttaacttcaacacatctgccatgatggcatctttgatgactgagtcttttcagtttagtcctgaatattctcatttatcagctattgaaaacttcgttgtaggtgaatctggatatcatgaaattcagggacctattgaagcagtgtgtgttgataaaaatagaactatgctgggagaaatagacggaattttgtatctgtttgaaagattccaacatatggttaaagtatcaaatgataaaggacagaattggcaatacgttcagttatttaatgaccgcgtcggaaatccggtttctagagtggtaatttatcaatctaaaactacttcttatgttttaggatatgataaaatcttttacggaaggaaatcatctgacgtacgttggtcatcgaatgaagttaagtttagcgataacgaagttacatttgctaaattgggagaccagttaaagcttggatttgaagtagagttattcggaacgtatgcatcattgcccgctgacgttaccaaatatgctgaagcgtttacatgtaatgatgactatttgtacgttgttgcaaaagacactgtccgtaaagttaaattaaaagatgctccaatagatactgaccctttaagtcctacatttggtgaaaaggtgtttgaaaaggaagtatctcatataacaggcaatcctaaatctgtatgctttaaaatggattccgttggaggcaaaatctttgccattattaccggggaagttaaaaccttaggattagacccaacagacccaagtaacgttgtggattctgcaactaaaggcgtctatgtttaccaagaaggcacaaatacttggaagcgtgtatttggtaataccgatgaagaaaaacgtcgtatagagcatttatggacttctatgtcaactgacggaaaggaaatattcttttcatcagctaattttaagacaacagagtacgctcaggatattgagcttgagacgaaatatccagaactaatttctaccgcagttaaaaatgttaatccaattcagtatcactctgataagcattatcacatgatgagtttcagagcagatgaattttcaagatgggaaacatttgttcctggacctatgaggttttatgctgaaccttggtttgtctggatggctcgtgaaggcaacagatgctggataagtacagctgaccatgcagttgtcatttataatgatattctttatcaaaaaagagtagatacagcggcgcagggaactaccgagcgcattctttcggaagtgtgggataaaggcgacgcgacgttttattgccctccggtttcatttaatggatttttgcagtatgcttctggcatcatgtttcacgaaccagacggaaaactgataggctattacgcatttgactatcgtgttcgtgaccaggtaacgcttaactggaaaccaactgatgtaatgtttaaggcgtttctgcagaaccaaacacgggaagaagactggacacctgaacatactccaggcttacgtgacccagatttgcgtccgtatcttactaaaatgatgccggatagttacttgctacaagatagtaattttgagcacttttgtaagtattatctccaattcctttcagacggaaatggaacgcattacaacagtctcgttaatcttgttaagaacaaatatcctcgcgaagaaaatgcatgggaatatctgtggtcagaagtttataaacgcaacatttatctgagtaaagacgctcgcgatgctgttgtccgtttctttgaagcccgtaagaatgatttctatgctaccaaaggaattgaagactcatacaaattcttgtttaaacttctttataatgaagatgttgaaattgacatcgagtcaaagaatacgacagaatatgacattatcgtagagagtacaaatatttctgatgatttagttggtcgtacgatttatactgcttccggtcgtagtaatgtgacttatatcgagagagaataccgggatggtcgtctgttatggcgtattactattcataacttatcaggacggttcattgaaggccaggaaattaaatcagagcgtacggactttgagggtattatagttcaaggtgtccgtggaaaggatatgctgagtaataacattgattatataaaccgcagccgttcttactatgttatgaaaattaagtctcagcttcctacttctcgtttccgcgacgatgtattaaggtttgttcatccggtaggtttcggtttcattggtataacattgctgacaatgtttatcaatagtggcttaaatatgaagcatgttgagactatcataaataaactcaaaaactataaatgggatgcaggactgccatcagtttatcctgatagagttgctattatcgcttcagatgatacaatagaaagagacccaataaccaatgagcctaggtattcttcacgtgctcaagctggtgaacctttcccgttacctgctaactataatcaagaaaataacaatagtgttatcgctggacaaaaccctggacaacgacgtaagccgttaagtcctacgtttgaccaatcagcagtaacgtttgctaattatcgcgatttagttaaccaacgtcttaaagacgatgcaggtaatcctcgcgatcctgaaaatccgccacaggtaaaaattgatgagtaattcaacaagagcaagttcaacgcgtagcacgatttatcgtgctatcattacatctaagtttagaactgaaaagatgtacacattttataaatcgattggtccgggaacggaccaaaacacgttgtatgtttcatttggtaaaagcactccgtggtcagataacgaatctgaacctgggtttgcacctccatacccggccgataatgaagacggtgtggttgatatttggacaaatatgatgggtgcagtcaaaattgaatcatctatgcttgactgtgttgttccaagaagagactggggagatacaagatatcctaatccacgcacatttttaatcggcgatatcgttgttgctaactctgcgccatataacagaactgatgctggatttggatggatggtatatagatgtattgatgttccaaagaatggaatgtgttcaattggtaatcttacaagcaaagaagaatgtattaagcttgggggtaaatggacaccatccactatttccggttcagcgcctcgtgggcgtggtgatgcaaacggtaccgtcgat

SEQ ID NO: 15 - DNA, 164874 bp, unidentified
  source 1..164874: mol_type = genomic DNA
cttccgagggagattcttgttcaaatttctcgagttcagattctaaatcaaactcagtcttcattcatgaagttctctaattcatcttcaacttcagcagctgatactgaaccactctcaggaagtttaacaccatcaaccttagttgaaacttttgagttaatcatttctgctaccgcttcatcaaccgcagcgtttgaatcaatagcacccaactgataccgggctttgatagcgtcacggaatggctcatgcttaaacagaggaccccaaaattccgtactgctcgtatcttttgcccgccaggatttttcttcacgaatcatctcaccggtttcaacatccaggaattctcgtgcataccatccatttttcggtttaaccacaaacccgatatctagagccatatcaagcagaccactatatggatcgataccaccatcgaatttaacatcgatgaagaacttacttttctctttgacagtacgcgatttctcagcgttcaggacaaactgatatccttcaagctcagtaccatctttaatttgacgtttaccgatgatgaacacagtatccgcagaatacataggacctgtaccaccagtcattaccgtcttactgaacatctcgatagtctcgattgtgtggttaaccgcgacacaaggaatgttcttaatagagaagtaaggagttacgatacggaagagagacttcagacttttcgcacgagtcatatctgcgacagatttctcgttcagagcatcttcggtttcctttttagacgccatgttaccaatagagtcgataaacacgatgactttttcaccacgctcaatagcttcaagctggttaaccatatcgatttttaattgttcaaccgactgaaccggtgtatgaattacacggtcagggtcaacacccatagatttcagataagctggagtgataccaaattctgaatcatagaacaaacagactgcatcaggatacttattaagataagcactaaccattgtcagagacatgttagatttgaagtgtttagatggacctgcgaagatagtcaacccggactgcataccaccatccaacgctccactgattgcgatattaagcatcggaattttggttctaactacatctttctcgttaaagaattttgatttagtcagttctgctgtcattttagaagtggatgctttaatcaggcgagattttaagtcagacattcattatattccataagtctccattatatttttctcacaggttaaaggatagagtaattatattactttgttcttgaagctattaacagaagttccatttcttcttggtgttataaaccactgtttccatatctatttcatagtgtattttacatccaatgcacatgccatgccaccagcaatgcattccatctgagccagtagttccttcatgaacaaactcatcagatttacatacgaagcatctgaattcttcagctttgaaaatgttaccagctacgtcagatttatcatagatgttcataagaggtccttggagggctttcgccctcaaagatatggttctaccttaccaaactcatggaaggcctgagatttcactcgagtgttaatacacatacgaattgatttcagaggttcgttatcaccgaataaaccacgtctttcaccatctttagatttccaacgggcttgatttgggaaagcagcatgtagttgttcaagggctctattttgtcgagcagtatcacgttgcgtagagcaaccaccaggagactgtaccttaccagatttaacgaggtacttaaacagagccagatgaggatgacccatgttaattaattttagaaaagcataagcatcttcgttaaggtcaataattccgtagccaatgtcttctgcggtaagtttagtcaaatcatagaaagtattggtgaacccaaagctattctcacgataatgaccccagcttgatgtgattttgaaaatcggtaagcgagcatgaccgtgataataaccacaatccatggcagtctcgacgtatttgaccatatcatcaaatacctcttgactcattgcctcgccgacaccaagtggaacccggcgatcgtcgcgttcacgaatttcagtcagatgaatggtcgtatcatcatcaagcatccaaattcgttgccctgcatacatttcagtaatcagacggcgagttcccgcaattccatcgacatcatcggggacagtaacgattttagcagcatgaccgtgccaagtttcgtatgcttctttttctgattcacgtactacaagatgtggaacataaccttcaggaaacatagtcagggcagttactgccccggcgcgcttataacttggaattacaaactgaatcatttccattcacctttatagtctttctttgcgatgtgagtttcacccgtgtgagcataattatctacgagatagaaatgtcgagaatatacgtgcaaagacccgacgttccaaataatgtcaccaactgaataatttttacctgatgcattcagaagtttggttaactgttccaaaacatagagctgccatgcatagtcattacgatatccaaagacgacatcattcgaacgcatgtttaccacagcatgcacacgattatcacgaatcagatactgaacattgttagtacacatgaaatcactcatgccatcgcgctcaaaatcatactgcatttgaggtcgtgtataaatcataattccgcggcgagaatcaggattattgataagttctttcgcacagttagcaaactgtgaatagttttgtgttgaccaaactgcccagccatagttagaattaatctcgccgtgtttggatgcaattgctttccaaatagctggggtttcacccggaatatctttaacgaataaactttgagatttataccactcaagttcacgagcaatgtatccatcattaactgcgccaaaaattaggttttcatctgcaataaatgatgcacctacgatttcaatagtcttcacacccgtcttatcaatcacaaattctttgttgagcaaagcatcagcgaattcttgacggatatcttgtactgtcattggagttacaatcatgagacctcttatttaacttgctggataataattgtattctgctgtgcgttagaagcagaccaaatcagcgcaattaaccaaccgataatggaccaaccgaatactagatttgtgataaagattccaccccgtgatttatgcttacgactgcaagctacaaaggtcggcaaaaaatagatgaagaaaagaataattaaaccaaatactgcttccatgttaatctcctcagttagacatgcatttgttgtagatgtgattttggagagattttaactgctccatacgttgtttatgctcattataactcaatccgccgttagcaaaatcagttaaacgaatctggtcattcactgctgccgctttagcagtacatgtacgttctttttgagttttacgcagacgcttaatttcttccagttcatgcttattctgctcaatcatgtcaagttccatcgcagacagctgacgattaggattagctttttctttcgccaaccgacgctcaaccgcgagcgattcagcagagacctggttgctagcacgatagtatcctacagtaccgccaattgctcgcacctgcccaacagaagaagccgggacgatatcaccttgtggcatttgacaaccagtcagcgtgagagcaacaataacagcaagtaacgatttcattgtaatctcctcagtatgttatttcgagagctatagtaccacatccttgtggtaaagtaaacaacttttttaaaaatcgaacatgtcaagaagagacgatttctcttcatagtctaaccctgccgcttcagacatacccgtcagaggtttaacgaacgatttttggaacagaacactgtggtcaagccacactagaacttcctgtcggatttcttgtggcagctcagtgcccgatggccatgccatgcatttctcaccgtacgggttaccttcacgcagcgggatgaccatcaccttctcgccttccatgattggtgttataccttcaaatcctgcggttgctcggttatatgccaaagcacctttaacgtgatatggtgtacctttatctggatatcctgcaccgtcatcatacttaccgatgttgtttgcagtcttaacttcggcgattactttataatcaagttcacgatattcagactcaaactgcttataatattgctgtaaagattcttcaccttcctgcagcatacgccgaatagattcttccaatgcattctgaacagcagttggcgtagaactttgctgagtttccatacccatgattttcagatgaggttctgcatatcgagtaccttccatatcatacacgttcagagcatatcgtttcttcgctttccagaatccgccaatgccgtttgaccccaacggaggacaagaaatagcttcacggtccatgaacattaaatgttctttgttgttcatgtattcacacatctcacgatatgattggtcaatccatggttccattttcttcttgccgaattggttcaggaattcgaccaaatcgttagtttctttgaaacgctcaagacctaccttctcgataaccttatcaacacaaacgtaaattgagtcagtatcaccagctactacaaatgaatgaccttcggtgccacataccttgttgagatattcattaactttacgttcaatccattgaattgccatttgaccaaacaaggtgattgctgatgcgttacgtaaatcataataacggaagtaaatgttacccaatgcaccataaagggagttgatcaaaatcttacggtttaactgattagtattacccaagatttcagcatgtttacattcaaacatcagtttgtcaaggcactcttcagtatatgtcagcagttctgctttcatatcatcagagaaatcttcatagacattaacttctgcgaatttatcgatagttccaaacttcttatcattcagaacctttttaatcagttcttgatttcgtttggcacccatcattttatttttccactctttacgctgataaaataccttcgcgatttcaactggaatgacaccatctacgtctttacgatacatccaaccatttggtgaacatgaatattcgtcagacggacgaggagcagtcttgttaatgtactcacccaacggatgaagtttaaactgtccaacgatggtttctggtgaaatattaacttgtcggatgattgacggatacagagatgtcaagtcaaacgacatgatataacggtatgcagcaggaactggttccttaacatacgcaccaggatacgactgtttaacatgagaacgactttgcggaataaccttgtcttgttctttcagactgttaaagatgattgcgtcccatgttttaattggactcattacaccttgatatggcatcttcgcataataagacatcgagatagctaggtcaataaatccgcgaacagcatcaatcgcttgtactgattcaacgtcgatgatgttatacgaaatataccgttggtgattagtttcacgcaacttattgatcggaccatcatatgctaatttacctttcttggtttcataataagcaatgaaatccaatttatacgtcggttggttcgtgaaactaaacttcttatacaaatccatgtaatcaagaatagtcacacccatgatagaataaatttctttgtcaccatacatgtttgtgataatcttagatgaaactttattcagaggagagaaccgtttcatcgcacgctcaccaagaatctgtttcacacgattcatgatgtacggaatatcaaatccttcaatgttccatccagtaaagattgctgggcatttctgttcccaaagattgatgtactcaagcatcatttctttttctgaattgaacggcatatatactacgcggtcaagaatatgttgtggaacttcatcaccgccttcggaatctaaacgagcagcgagtttcttgtcccactcggaaacagaaccataaagagaatgcagtaaatcaaatacgtagaacttatcatcaaccgaatcgtaatgagtgatagcatcaatttcatattctgctttcatcgggtctgggaattgagatgcagtaacctcaatgtcacagtttgcgattcggatgaattttttattataaacgatttctgaaccgtaagtatcactgatatacgcgagtttgaaatcatccatacccattgcttccattcccatatcttccatacgacgcatccaatcgcgggcatctttcatagttgggaatgtgttcttcttgcaatacttgccatagatatctttgtactttgtttcttccatgcaatgactaaacataacaggagaatacggaacacggcgcatgcgttcctcaccagtagaatcgatataacgttctacaatgtcattgcctagagattcaacgctaatataaaattctttcatgggtttcctttgtttatagaccgagttattagtatttaggtgggataattataatccgatttttataaagtaaaagggccgaagcccttttcttacgcgccgattgtgtacttagattttaaagtccattcatgtttctgtttgaatgtaattacccggaagttattctgcatctgggcaagagtttgaccacgattaatacttagtagaccccagtcagcgagcagttgtgcgattgagtctcgacgaatttcatcttccaaatcaatagtaacaggacgaccatcaagcttcaacatttctttaaaatggacgatatagtaacgaccttgtttctgaagaatgtggcagctttgatatagtaccttatctttgttattagcaattcccatacgagtcagagtttctttaactttcaggaagtcttcaggctgtttcagtgtaatttcaatcatatttaccattccaatgctgttttcttaagagttttctgttctttcacgtttttcgtgattgtcttgaccaattcatcagtcacaagacctttcattttcttgagagcaggtttaagcttgtttttagcttccagggtctctctatacatcctagcatcaatcgcattgaccttgtaatatgtcattataacttgaagaatcaatgcatcctggatgttttctgttaacttagcccattttccataccgacgacctctaggaacagaggccatcatatagttatagtgtgcttggtcagataacccttgaccaacaaggttcataacataaacagcaggcatacagtcagcatgctgagaaagagcgttttcaaccatgaattttgaataatccatagtcgagatgttcaaatgctctttcttttcattaatagaaccgataatctcgaagaattgattttctgccttttctttatatgaatcagataattcctggactttcgtccagtctttacctaaccacgcgatttggtgctcattatactgatcatcatcttcaaataaactcatcatttccactgcatctctacaacaagttgaataagcatataaaccaaatgtaattcaatcgaagctgctacaccatgatactggttattttcaccaatgatttcatacattcggataatgcttgggccagtaaccattgtatacagctcagaagaaagtttatctacaaaccaagtatagtctgcagcatatttcggagcaagagcacggagttctttgatgttcttggttttaatagcttcaatgacatcttcaattgagccacggtcatttaaaacaatagacaagatacctgcatcaatcacacccttagaagaataatgatcaagcatgttgatggtcttacggaattctgggaaattctttttgaccaaagcagctacaactttcttatcttcaactaccactccttcattttcacaaatcgcgagacaacgtttgagcatctcgatttgcattggcttaacatcagatggagatggtttaccaaaattaattacacggcaacgagactgaagaggtttaatgataccgtcaagattgtttgcagtaatgataatagtacagtttgtgctatacgcttccatgaatgaacgcagatgccgttgagattctgcaagacctgctcggtcgaattcatcaatcacgataattttctgcttacctgcaatggatgcagaacttgcgaatgcggttaacggtccacgaacgaaatcaattttacaatcagaaccattcacgaacatcatttcagcattaatgtcattacataatgctttagctactgtggtcttaccggtgccaggagaagtactatggagaattaaatgaggaatttttcctttagctactaaagccgaaaaaatttctttatcttcagcaggcaatacacactcagaaatagtacctggacgatatttctgttcccacataaagtctgcttcgtttactgtcaatttcatttatatttcctcattcagattaaagatggggccgaagccccgaatttattactcaaagtcaaaggtactatctgcttccattgctaccacataagaggctgatgcaccttcaaattttgctgcagtctgtttcttagcaccgttcatttttgcccacagcatcagtttgtaatcgccaacagtcattttcatattgctcatgttgattatgaagttgaagttaccttcgccatcataatcaccgagcgtcagagaatacttcggacgagtcagtgcagcatcttctactttattataaccacgcagaacaattttaccatcaacgttggtgatagcaattgtgtcaatctgcatgccacgagatactcgcatcagctgttgcaggtcttcacctttaaaatcgataattacgtttgccaccgggaatgggattggtttagtcggaaacacgattgtgctcggatcagctgctggccagaaaatagtggaacgagcatctttaattgccaggttaccatcttcctgcatgataatatctgcatcatcaccaaccagagacagaatgctcaggaaactgttcaggtcataaattgctacatcagtatcgatggtatcagaaattgttgcttcagcataagtcgtaccattaacagcacgagtcatgataaaattgccaggtttcagcatgataccggagttgatggtggagaagtttttcagaatgttcagagtttctttagagaatttcatttcaataccttttaattaagttcaggataattatatcaagctgcgaatgtagcagttaattcttctgcaacaatctgacctgccgcaacgagttgctcatcagcatctacgcagtaatcattttctagacgttcgccaccatgacggtcagtaacaattttagcaccagccttgattgcttcgttgtaatgcttacgcatcaattcaatccatttttctgcaacttcgtcgtcaatagatttatagaaagcaaagcgagcttcagaatctttaatcttatctttaatagctgctttagtttcttcagttagagccagaacccaagatttacgaatacgattttggttattcgggttggagtctgcacgtacgtttttaacctggatatctttcacatcaacaaaattaatcattatatttaccttaatcgtaataatcttcaaccatccaaccgggattcctgctggacatgactctattatattcatttcctgtaaaagcatctcgtaacatttcttctgttactaagtgcttttcatcagaaaacaaattagttaacacatatcgctttacttcaggaaaggccagaagatgctggcccgtagtaaactcattcattccatcaccgtgaatcgtccgaccttcttcatttgaaggtgttggccatatgcctgtgggtcatggtcacggtgagaaataataaacacattggcatctaccatcttattaagaatagcagttattgccttaacaccttctgcgtcggtggccgaatcataaacttcatcaaggaacagacagtttattttaacaccagaaactttttcagcaatatcacgccatgtgaatagtaatgctatatcaattctggctttttcaccttgactaaacgaggcataactaaactcttctcgtccacgagatttaatcgtttcagagaactcttcgttcagtgtgaacgaataatcagcttccataatttttaggtagctgttaatttgcttattgaacatcgggatgtacttcttgatgatagctcctttaataccggagtctttcagcatttcagttaaaataccacgacgatatttttccataaccaaattagttttgacgaggataattttatctaattcttcttgtagcagttcaatcttgtcagagttatcaatgaactcctgtgatgctttatcaattgctgctttaatacgacgtgctttatcaactgcagttaaagtcatctgcttcaaattactcatttgatttttgatgtctcttgcacgcgtacgaatagtattatactcgcgagctagttcatccagttcactctggcgcgtctttaactcaccaagaatggtattacattcttcaacatgatgattaatcttagtgattagagtgtcattagaatgcaaatcctgcaagcacgttggacaatgaccgcctttatcatacaacccaagaacctttgagtatgattcaattttagaacgaatcttaaaggttttaccttgaacttcttgaattgactctgctgggtcatcaccaatcacgagttcaagcagttcgctttgaagagtttctaattctgctttatatcctcgtgcctctttcacttgctcatcatacatcgcctgcaggcgagctacgttatcaccagaaagtttcttctgtttttctgcatactcatgatgagttttaatttcattagtcaacgcttcacgctgaacatcattaacctggatttgctgattgatttctcttatctgtgtcttgttcagtttgtccatatcagccaaaagagacacttcaagcaaatcttcaacgagttttcgtctgttggcagttgataaccccatgaacggagtatatcctgccgttcctaatacgacaatctgcttaaacgatgtgtatgacatgccgatgagactttcaaagtaggattgaaaatcctttgaacttgcggcttcatcaagcttattgccatctcgtaaaatctcaaagacattcggtttttgtccacgtttaatgtagaaactatgaccgtcatactccatccacagttctactacagagtccttcttattgaatgagttaattaattgacctttcttaatatcacggaatggtttaccaaataaggcaaaagtaatagcttcgagcatagtacttttgccaccaccattcttacctgtgattaaggtcttttggcatttatcaagttgaatgtcaatggccgcttggccaactgacattatattcttatacttgacacgatttagtttaaaagtcttcactgattttgtgcctcaatgtataactgtttagacataacctttaaggctttgatatcatctgctgataggtcttcaagtgcttggatatattcttccattaaatccaataagcttttaacttctacttcttcgccatcttcagactcaaccgagttgtcaactttagaaacagttcttaattcatgtactaccttttcaagttctgattcaaatttaggaaggtcttcatcgaccgcagtgataataatgcgtactgcgagattacgaaactcttcaaagtcaatttttccagtaacaggataaatcagttttctatgccaagtgatttcattagggacgaaatcaaaggttgataattcagtgtcttgaacccagaagccacgtgggtcgttctcgtcacccgctgtaagcgtccaaggcgttccgatgtacttaacgtttgctgcgcttgatatggtgtggaagtgcccagaccacacttgtttgtactttttgaggaaatctggttccagcccatgagacttcattcctttataaaaataaaagccattaagctcccagtgaccaatacagtattcagcagacgattctttgatatgcttcatgatttctgatgtgttctcttcacacatccatgggcacaagtcaatcaaagtcccatcaaaatccatagtcacgggcttttcaataacagtaatatgcttatacttaccaagaacttcggttgatgcattaggcgtcaacgtattcttgtagtgcatgtcatgatttccgacgatcgtaattaagttaattccttctttctcaagagactctgcaatttcacgagcaaattccattgtcttatgagtgatagctttacgaacgtcaaaaatatcaccgtattgaatgatagttttaattccatgctttttggcataatcaatatgctgcttaattccgtgtcgttgtacatcctgtacccacgggtcatctgcgcggacacctaaatgccaatcgcctgagtgaataattttcatataacctctctagtagagtttaattttatattattccatgaatagcaaaaagggcccgaaggcccattacttattttgtcattaactcaaattgttctttaaagcaatgctcagaatcttggtgttctaccaggaattcatatgctttatttcgctctttatcatagagcttccggtcagacgacagatgtttcattcgttcaaagacttcatttttattttcatcattcaaccacaaaatgccagaatcatgagaagtcaatggctttccatcaacccggaatttcaaagcatcaccagtagctttatggaacacaggaatagttccacaagcgcctagttctaaatgtgtgtattccaatgaacgctcaaggaatttatccggaagacgcgacagctgatagccaaatccagactgagacatacgctcaagcatttcagagttaacatatcggtcaagaacttgaggattcagacctggtccagttttaacctgatgataatgacggcaataatcaatttcatagcgttctttgatgttaataaacgcaggactacgttctaaaccttccaggatagtcgttttacctgcaggacgcagatgactttcatgaaagtcaaacatcaagaaatagcctttccatgtagtagtacgaccaatccaacgatggatatcaaagtcaatagcagagaagtctttccaatacttatcacgaattgctttgatgttcatagcaggttgaaagttataaactggaggagctgagtcagaatcatcaaagaaactcaacccgccgcttggaaaatattcttccattagcacggtattaaaatcgccgtttgagctatgactaaacagtacatcagcacgcttaacggtttcttcaagaccagcatttctacgaagtgacaatgctctatggtcatgttgatatacgactacccgaacatcaggtttaatgttctctatgagcttcttatagttatcaatcgctgcttctggagcgttgacagcaggtactgagttaatgataagaatgtcacatgcattaagcagagataaggtcttatcgtagtcatctgccagagacacaggaatagttacatctttatagctatgtgctctattacgagtaaacgctttatctttagcgtaaatgatatttacttcatggccatgttttactaaccactcacggtgctcgagactgaacttggttacgccgcatccctcaagtccgcgagccattaaaatattaatcttcatatattgacctttgttgttaattttggatattttaccattcccgtaataaagcaaaagggccgaagcccttttaaattttcttgtatacaacataacccgccgcttcacatatacgcttagcttcttcaaagcgtctaagcatatctaccttggcattatgaattgcttcataatcgggagcaggtgcttctctcctagcagtatcacatttataacagaaataactacgttttggtcctgtataacgttctgaacaattactgcaccggcacgtgtaatttccttccggccaatcacgtccaggattagaacccatcaaattcgtcatacatcccaattctcttcactagtaataaaatcagggtgttcatctaaatcaatgaatccccagttctcttcatttaccattcataccaccgtttaacttggaaggtgtcaacccagacaagagagttcttatctattagcttacatccttcggtagagcctaacacgcgatattgattatctgctacctttactgccatcgtaccagtcgcagtgtttaaagtaaatcctgcgtctttacgaacacgtttaaattttacttgtaccagcatttagaatgtcccaaacagatttacgagaggtattccaacaagtcagaataatctcatcattaaaaggttgttttaaaatagtacgcagtttttcaatagcatacttgtaagcagggaaattattgtctaataccgcgtctccagcatgagcttttaatcgctcaagttcacgacggtttttacgaacaattttgttggctcgagcaatagcttgttcttctgccgcttccattagtttctgctgcagttcgtcgcgctcttcctgggtaatattgttcatgttattcctttggatggtaatttatttcaaatgtgaattcagtatcagtccaattataactatgttcaattatagcagaatctgatctgaaatcagcgtcatgtggatttttcgggtcaatgtgaatatcaagatcaagcacctcccttaaatacatctttagcaaataagggatagcgtctaggtcttgcacatcttctaaaaacccgtcgaggttaatcttcagcctcatataaaaattccagattaggtccatcgcttgtaggttcgctctttttagcagaccctggcgccttataagcggtggattcatactgcgtcattttgtcgtagatgtcctgaataaaggtttcatctgctaacgcaaccatatcatcgtcccgtgaatcatacacgttgtggacaaaatagctgtatttctttgccatttctttgcgttcttttttgatacgctgaacgaatgcattgaaacaagcttgtgttatatacgcatgcgggttatcatacttagtttcatcgaagttgattaagcctttaattgcggcttcaatcccgtctgaaatcatttcttgcttccaggattgggtgtatcctgaaaagttgaaacgcttactcagaccttccgcgatcagcataatagcaaggccgatcgtatcgttctgttttactactcgagggccgccagcagcttcagactcccggcacttctctttccatgcacagattgatttatagagttccttgttatttacataattactcatattgcctcttcgcttcaattaataatatctattataacaaatttgggaagcgagaggattaaagcattacttaatcaattcagcgcatgcaattaatttcatcatgatacgataaaaatcgttatacgtgaaatctaatggaacatcaatgacggcttcaaaatcttcaaatacacgctccattccataaccagcgatatcatctgattcagcataccagtacgttccatcttgtgcaaaagttatttggctattttcaagacagaacacacctttaatattttcatgtgtaagagtcaattgaattttcatagttcacccttcataatacgatagcattggaacagctgttccatgatacgtttgaactcaaccaaactaagttcaaaccaatcagattcatctacttcatgcatcatttccatgaatgaagagtataaactttcataatgagtttcatttaacatagaggcatgcgtttcccaatacatgccctcttcattgtcaaaccaaacacccatataagaatctatagtaaatccgccaatgccttctactacaatcataatttggtttactttagccatgctttcaccgagtcaatagcatcttcaaatttagagaaagcatctacagatgtatattcattctcaccagagcgttcataaatccaaaacgcgtcaaaatcttcttcaatgatgaattccccgttaggagtttcaatcgtgtttctgccatcaggcgttttagatatgaaccatccgagtaaaccaacttctgtaatttgttcttcagtcatttagaatttccaccaattgattatagtttaatgcctttccagatgaaatcataacattacaaaatctgtatagtgcttcttttgatactttatacacataatcagaagttgttataatgtatgaaatgcggacaaacgttggagatttttctgctaactcatatgccaattttctagctctaccgatatcatcagcaaactttgtatcagcaagcaaaatactatcaaatacccaacggttagtaaaaatttctgtgtatagaataaccttacgcatcaagatactctcgcagttcctgctcgtttaacccttcttgccacatctctgacggagatggaagttggctgtctagagtggatgaatcaattggaaatactctgataattacgctagtatcttcatcccattgatttgtgagtatccgtttagcttgactaatatcaggctcagaatgagcccggatatacttaatccttctatgccatacaccagtaggaatagatgcgcacacgatatatgaaatcatttcgccgccttaaccgctttaacatcgcggaagcctttcttacgttgattcttcatcttacgaatagtgctttcagaaatttcaccgatacccggagtgattggttctacaccaaatgctttgatgccaaattcagacagaagataagcaaccactaattcacggatgcgggctttaccaattttttggccttcttctttcatcgtaccgtgaagctcaacttcccactgatcaagcaaagacggagttacacaacgtccttcttccagcattgcagatactttatcataagcaaaagagttcagtacgtttttgattgcttgggacatattaatttcctcagtaacgattgttttgacagaggagattctaaatcaaatctcctgtagcaaatcaatctttgagagattttagttcttcgagcatatcgtagtattctttactagcaaccggagctacagtacagtggtagctattgaattcatggtatttcacgaagcgttcaaggtgccacttaatcagattgttaattcggtgaagtagaaccccatctgaaccaacgtagacaaccacttcaaattgaagcccatcccaaattctggtacggacgatatcgcccacattaaatgttttcatacgacataccaatgttcgttttgccaaggctcacctttataccagcgagtcatatcatatccgttctcgtcacggatagcgccattacgcatatagaagtactcgtcatcagtaaaatactcatgcttaacgatacatcctttacgcatagcctcaagagcttgctgccaatttaaccaattcatattttcctctcgagttaaacggtatgttgttatcagttgatagagctatagtatcactcatcaactggcttgtaaacaactttgtgaaaggagtttagaataaaagagaggtcccataggaacctctaaatgaagggtatagaaatatacagaaggtggtcaagatgaccttagaaaggaactggctaatcttctatgatatctggatcgtatccagcagcaataagattggctttaaatgttggaatgtcatactgcttaacgttatccataaaaatgacaggataccgaatagcaagcgatggatagcacccgatgcgtttagcaagtgactcaatcaacggacggtcataaaccggctgaccgtcaacctcgttgattacgttatagaactcatacggaagttgcagcttatcgagcaagtcacgaactgctttacatccagggcatctccaaacttcttcagggatgccatagatttctatcatagttcagccttaatctcagaaatcaatctttcaattaattcaagcttatcagctgtagtcataggataaattttgtcgacagtagcttcttcgagatagcaacggtcagcatcattaagtatacaccactgatcaaaatcatcagcatctatgctaacaccattgaatgtcttaactcgttcaacagacccgtcctgtgtcagagctgttaccaaaaatggcttaaacttgagcatgttgtagaattcaacatcctttgacgacgcgttatttagccatttatcaacagaatcttctttaaacttgtaccacttatcgcaacaaaataattctatcatttcatgacctgttgaagtttggcagtcagagtattaacacgcttctgaaattcttcattagacagtttttcatctttcttggtaggattaatccaatctgcgatgataataagaacaataaacggaattgctacgaaagcacctgccgttaatgcaaccaaagcgataacgttagaaataaatttacgaatagcattaatgaatttcataattttccttaaatagttaagatgaatgctgtcatagccagaaattctggtccaaacagttcagtagcaatgtggttcagagtaaacataattttgtaagtcagcatataaatttcctcaatcatgtgtccaggtagaaccgtttcttacccagagtctttggttgtcagaaccacgccagtttttagtagttggcagtgattgctcgtatttcccatcaattataacatcaatgtgttgtagcaaatctaagtctttaatatcttcaaatttatatcctgtccacatccagatatctttctctgtaaatcttgctttaacccaagaaaccaaatttgaaatctcttcccggttctgcggataaagtgggtctccaccagttaaagtaagaccttggatatacgatttgcttaaatgggatgcaagctctttaacagtattcatagtgaataactggccgtttctagcattccatgtactacgattataacaaccttcgcatttatgcaaacatccagtgacgaagagaacgaccctacatccagggccgttaacgaaatcgcatggataaattctatcataattcatctttatatttccaagtatatcccttatgaatagattgaattcctttgcaacatttataaacagcagaatgaaaaaatcctgcatttcttatttcagttgctccagttagttctattgtatttccgtctggtgaatagccaataaccgttttggtgttaaagcgatttctagaactatttttgatatgctctttatgattagtagacaaagttcttcctgttagcccatcagatatcctttttccaaaatcatcaggaagagttactttagacctagctatgctcattagcttcttagttttatcgcttctttttgcgccacgctgattttcaaatttcttagcttttgcatacgcgtattgtgaagaagtaacttttctatgcttactattactcattatccaatatgcatcatacatctttccaccatatattttagccaataaatggtgagcagtatagtgggccttataagttaaaaatactaagttgtctaaatcatctgaaccacccatacttcttggaattatatgatgaagttcatacccggctttagtttgacggggcttagatgggtgttcagcagaattaactagatttgaatagattctgtcgaaattcattgaaccttacctcattacgtgcttctacttctgcatcatatttccagggctcatcagtttgaatagccccagccgataatccactttcggggtcacgggttatagcaattccaagcggatgcagaacctctttgttgattttccaaatcaatccccattcgctaagttggttccaatcaacttgcttcattggtttctctaacatgttttaccctatgcataatttctttgttcttaccaagattgaacccacgttcagaaggattaccaagatagccacaagtcctacgaattgtattcatcttctttggatcagtttcaccacaaattgaacacgtgaatccgttttcagtaggtgtcatctcatgggtagaaccacaagaaagacacttatctactggcatattaacaccaaaataatccaacttctcgatagcatagtcccatacagcttcaagaccttcaaggttacgcttcatgtcaggcagttcaacataagaaatatgaccacctttagcaatggaatgatatggtgcctcacggtcaatcttttcaaaaggcgacaggttttcttctactgacacatggaagctattagtgtaccagcctttatcagttacacccttaacatcaccaaacttagcttggtcaatcttacagaaacgatagcaaagactttcagccggagttgagtacagactaaaggcatagccggtttcttccgtccacttgtttagcttagtgttgatgtacttcaggacgagtttaccgcttcctttaaaagtaagcatatcaaattcatggatgccaatgtatcctaatgaaattgaactacgtccatttttgaatagttcaagaatttcatcatcaggtttcatacgcacaccaaaagcaccttcctggtaaagaataggagcaaccgatgcagtaacaccttcaagggatttaattctagttaaaagagcttctttacaaatatcaagacgttcatccagtagtttgaacagtttattactgtcatctgaacttttataatttgcatccagggctatcctagggaggttcagtgttactacccctagattattacggccatcaagaacagatttaccagaagagtctctccaagcaccaaggaaacttctacagcccattggagatacaggagtttctgaaccggtaattgctctattgtttcgagcactgatgatatcaggatacatgcgtttagctgcacattctaatgcaagctgcttaatatcatagttcgggtcttctttgtgtagattaatgccttcttctacaaacatcacaagctttggaaagattggagtaattccatcacgtcctaatccacgaatacgattatcaagaatagcccgttgaattaatttttcttcccatgacgttcccataccaaatgtgatagtcacaaatggagtttggccatttgaactgaacaaagtattcacttcatattcatacgcctggaaagcatcaaacacgtctttttcggttttagagatagcgtaatcttttactaatgctacctgatatttgcgagcatcacgcacatgtttagcaaatgtcttctctacataaggagccagaactaaatcaacattagcaaaggtagttccaccatattggtgagatgctacttgtgcagtgatttgcgccatgatagcagtagctactccaatactcttaggagtttcaatttgagcgttaccaagtttaaagccattctgcaacatacccttcaaatctaccaaacagcagttggtgaaaggcaaagctggactgtagtccatatcatgaaaatggataacaccttctttgtgtgcttccattacagagaaaggaatgacctgattggcgatatgtttagatacgataccagccatcaggtcacgttgggtaggaaaaacacgagaatctttgttagcattctcgtttaaaaggtccttgttggttttattaataagtccctggatttctaattcgatattcattttaaactcttacgaagctgcttcttgtattttgaagcaagttgtgattttccatcactttcctcgtatgtaaacccatgcaattccatttcagcaatcatctcaggtttaccaagacgtgaaaagcgtttagccatatcggcaacatattgcgggtgaatattactgtctttacgattctggcggagatagaccagcaaattctctaaccattcgaggtagtcaatatcttgaccttttaaaccagagcggttgaacttatgcttcatttggccttctgccgcattacacaggttacagagcaagcctctgacctttcctgcattgtcaccttctaacgcatggtcatggtcgaggtgattcttttgaatatcctcatctaaaggacgtttgcagcaaggacataatccgttctgtgcctgatatagtttttctttttcttctttatataacttaccggttaataacatactcttacctcagcgattagataagagtatttatagttaaattaacgagtaactaccatacatatttttagatgattctttaatacagtatgaggtgcagaacgcaaaaattccagtgatattatctgcatgataactatagacttcgttgctattcacatctacaagtttgacgcttttccatgccattccgtcaatttcatcttcataataaccatctgaaaattcaatgatatctccaactttaattccatggtctttaaagacgcttttaatctggcgatgcaactcagacaggtctaggagtttaaccttaattgatttagaaatgcaagtattagacatgatgaactccaagacgctgttcaagggcgacgatgtaatccgcggctttttgcattaaagcatactcttctgaatcacaattttcctgtccagcaaaggcataaagagctctggtaattggaacgattgcaccttggaaatggttaagtttaatttcagaaatcagaggaacatcttcaccttgaccaatttctttaatttggtgcatcgtatcttcgctgtagaaacaccagaaccaagattcgccgtgtggagttgggtcgttaatagtaatgattttgtttgtcagcaaatcaattacagcagtaattccacacatttcgaggtcatcttcgttaactacagaaatgacttggaacttaaatcccggaataaacacaggaaattgctctgttaattcgtcatcattaataatgacttcaaactgcttaccaataagtcccattcactttgtcctcataatcaagtagttcgtttatggtaggttcagaggtattataatcctcttcaggaatagcatattcctctggctcgacagtttcccagcgagccgcataccagggttttagacctttgctactttgcatggtgttggttcagaaccattagcagaatcatgttcaatacgccattcaacttcagtgcgagtaaccactttttcatggcgagaaacgatatttacttcaggaggactataataccaatcagtatgatatgaacctgaacgagattctgataccatgaaataaacatcacgtgctgggtaataccaaatctgcgaacggtcttgatacttgtgttcttgtgtccaatcgtcgtcttctactaaaacaaagatttcttctgcatcgtcgtctggagcattcggcggatattcaaaatcgtagttgtcgtcccattcaccggtgacaccagcaatccgtttgatttcttttactaattcagcgttagtcattttaacctcgcagcttctgtaagtcttcatcatcaatccagctttctaaaccagacggaagtgcacactcaatttcccacagcagttcttcaatagcttgcaagcggatgaactcttctgctgaaattgttaccatgcacggagcttttaaatcgccaatatcataactcatagttcttcctcatgccaagaacagtcaacttcaaagtctggaccaaggtcttcatcttcccaacgccaagaccctaacggattaccagcatcattgtaatcaatttcaagaccaatataactccactgaacaccatgaatggtatttccttgctttacaaagaattcaccccattggtgcatgaaagcatactgcggatcagatatagctctttcaatcattgcttcacgaagattacgttctaaatctacttggtcgccttcaggaaaaacaaactcaattgggtatttcataatttcaccatacactcgccgtatttccatttagacataaccttaactccattagagtaagttacctctaccttcgctcggtgattcttaatctgcttaattttaccagtttccaatccaccgtagccataataaagagctacaatatcaccctcccgaaggagggttccacgataatcatgcattgaatttgaatttacggagttcatcaaaaccgccgatatgtgtaccgtcaggagcaaaaatctgaggcatagttaatccaacctgtgattcacgccccaaacgacgaagcaaatcactgataaccacttcatcaaatacacctttttctggcattacattgatgaatgcatactcttgtttcttaacatcgagcagacgctttgcattatcgcaaaatacacacttatggatgttgctgtcgtaaccaaaaaccgtgaacatcttcttctatttccttaaatacttgagcttgaactgttttccaacttgggtgtttatacgctttatagacgttagtcattccaagacgcttagtgacttcgccatcaattgcagcttgggcaaaatttcttccacgggtcatagctcctttgagattggaactgttagcaatttgaccagtctcattataataaaccgaatacatgagtagcattactcgttcggcttcttccatatatcgtttacgagccattttcagccttagtagttataactaatgttttaccatctaaagcatcgagaatatctttgatgcaattatctggcattggttgaacgctagctaattgcctagcaatatcatcaggaattcccatgcgaggaatatttaatttgctaaaatcaattttatccattagcagttaccgggaagtgttctgccaatttagcagcaatggcagcgttaatttgatcagcgaaattcttattcattgcgttaacaacgatttcttgaattcggagattagctctttcaatagacatcttaatacgaccttcagcttgcttaacagcgtcatcaatagtttgacgaaccatatcatcaatagcatttttagcgcatgattgggcagcgttacgcatcatctgtgacatttcttctttagcagacatatcattccaaccgcgagtatggaacatctgctgaacttgcttcttaacttctgctcggacatctggaatagtcacagcagcaatattaacttcagattgtactgcttgttttagtttattctgggaatcttttaacaccatttctttaacgatgttattgattactgactgttgcagttgagcacgggctgctgtaccttctgggaataactggcgtactgcataagtatctaatttaatgtcaatcattttaattttctctcaaatttgtgtttacacgtacgacatttcattttcagaatatcagtcgtccaatcaacaagctgtacttgaatactaccacatttttcacaaggcacaacttgtttacatgcagcttctcgacggtcaaccatttcaagacaggcatcccagtcaattttaaattcaggtacaggtggatactcaaactcaatttcaaggtcgttatcatcaacgaccatgtcttcttttaattggtttttcacagtaagctccgggcatactcgagagattcataacgctctttgtattcgttaagcgatttaaccaaatctgccatagctaattcatgtttagccaattcagcttcttttgtatcaataaaccgcttaactgattccatttcggcagtaatactattcttagcgatttcaatatgatttactggtgttaacggaagaggcttaacaacattgagatacatatgtgctacatcttcatcaataactggggtggtgctcaatgttttaggaaaaatcttaaatgggtccaaatgtacttcaagaacagatgagttttcaccctgttgtttgcaacatgattttttaactacatccatatgatctaatgcagtacgaacttgcgctaaaagcgcccgagccggatactttccgctggataaatggctattaatatgaattcgtacagttacattgtcaagttcttcggcacgaataaatgaaacacccttaggatttctagaactagtagaagatacctggtatttcacacggtcatcgcctttaagcaagcaaattgaacgattaagaatacggcgcaggtttgcattaaattcagaacagaaaatttgagcagcgctgcggtcatgtctttcttcagttttaaacgcccctgccgcaaagctataacgctggccgtaaattttagcattgccgatagcaaactttttgagctgtttctctgctgacattgcacctaaccagcgagaacgacgaatgttttctacaacaaaaccagcataattggcttcatgcgctgccatgctatttagcacacgacgagctacattaccagcaattgctacgttataagcagctggatttaaatcatgtaaagctgccaaaacctttacgtgcttctcacgctttgacaacccctttccattatgtttatcaaattcaccggctacaaacatctttaattcattcttattcattatcttttcctctattttggactgggctcaaagagtatctcaaaatctccctgaacccattatacaacgattattcctcaagcattataactttgcttgggcgcttatagaaagcatgagttttatcatctttcgctaattcaaatgtagcagtaaattgtactttgcctctgtattcaaacggaatactttttggaagggagccgtaaaccgtagctccattctcaagtacaaccatcatcttacattgtacgccgtaatagtcttcataaacttttactgacgttacggtaccagagacagtcactcgtccttccggtgcatcccctttattcttattcagctcattgaatatattatcaaagacctcttttgaatgttcctggatagcctctaagatgctcttatgagctctaacttctgccataacaacatctgttccgtcttgtaatttccactctttatatggaatgcgtacttcaagaggataaccatactcccgaagttctttgtactcttcttgagttaagcggagtttccaccagccgtggtcacctgtatactcaggcttatccagtgaatcaaattctgtaacatacggcaagtaactgcccgcgtgataagcttcaacttcacctaattcattttcccaaagataaccatcaaagggagcatgagggcgatcatctttgccccaagtaggagctacaactttatcaaagtattcacgaccgaagcgggtcttcgcccatccagcattcaactcctcggcgcgtttttcaactttcgctcggtgtgcttggcgggctacacgattttcttcaacaagtgcagagataatctcggttaaagttttcattttattctccagtttggttgacgagaccatcttatcaacagcctcgccgaaagtaaactactttgtgaaaaattttctccaaagcagaactgcgtctctacgagatacttctactgctcctagagcaactgcttgcttgcgacgaacatcgcgcaaatcatagtgtggaactcgcttatcctggaaccaagaacgtttcattccgatagcttctgccatagcgtgtaactcatcaaggttgtcgctaaacatatgacagttctttacttgatgacctctcattttccaaccatgattcatcaagacatctacgtatactgtcatttctgattctcgatgtaggtttcaatgatgaactgtgctaaacacagaagattatcttctgaaggagaatctactaaattctcaaccatatcagaaatagttccaaaagcttcttcagtattgaacatttcttgaagttcgttccaagtaggtgctttcatttcaatctcctcattagttaacgaagctatcttatcatggcttttctaagatgtaaacaacaaaagggcccgaaggcccttaaaaagatcggaaatcactgttaaaccatggcgactggtgctgtcgccgcttaagcaatttcagttggtatttcctattgtcttctataatcatcttagaggcttttagctcttcagccaatgagacctgtttacggtccatcaagatgaggttctgggtcttctgggcaaacgtctgaatacctttgagacattccacagattcctccatccctcgtttatacttggttcgggcagcatttaactgcccttcgtaatacgcatgtatagacactatagtactaaacaccttttacctcaataacatctaagataatatcttcaacgtcttgctcagggaatgccacgccattggtctgcccatgctgaaatactgcttggtacgctgacggcgcagaaattcgggttgaacgttctttattgtcatagcatttgccatcaataaagtgtttaaatttaacttcataagtttttaacattattacaccttagcataattgacgatttgttcacggtcagcgggccaatttaaatcagaacgtttcttgtttgaccacgcaatattttcttcagcccaatgaagtttagccgatacgctcttttgtacgtctctgatggcttcttcaagataaatgcctaaatctctcgggttagttccttgagttttaaatgcattgagcaaaatatttcttacaacttctttaaattgattttcaacttccgggtgaataaattcacgatatccgctgcacggatatccaaaagcatctaccatacgagtagtactaaattctttgctcataatccgagggcctctcgttcgtcgggatttaatttcgccaaagcggcttctttaattttttccaaccgtttacgcttagcttcaggtgtttcttcctgaacactaatagcagcgcttttaggaaaagtccatgattcgccattttcatcggtgaatgtaattagttccgttggcttacgattaactgtaccatctgagccccaccaagactgtcccttaactgcttcttcggcaacgcaatatgaaccataataaccaaacaactcactacggcgatcgtctggtgaaacatacgctgcataggcttcactttctgtcattacccatttcattttagcacctcataacgaataagttcaatacgatttttaagctcttggtatgatttacgccaaggcttataataggcatttaaatcttggtgctgtttatgcatttcgtctaaatgctttactgcatcctgcacatttgcaaggaaagtatcaaatactttattagcgtattctttcctgagctcaatgaacggaggagcacgaaatacgtttaccattacacgtagttcatgataagaagaatggacttcagctaatacattcttcttatcgccaaaattaaacttataaagtttttcacagattgcttcacaggctttctctgctttacccttgggtttacccgcaaagatatgaccaggcggatatactttaatatcgtttaaccaacattcaatatctttaatagctgctaaactcattgtacccacgctccattttcatcaatgtaattaatccactcgttaatagtccaggaagaggtatcacctttaggagtatcaacgatatacattccgcctttaaacaaaacacgttttacatcattagaaattaaagtagccattatattaattttctctcaatttaaattcgtttatcatagaaccatatggctcatcaggatatccattctttacagctaacttattaaatcttctatacccaactttaccattatttttccatagcaaatacagctcttcaaaaaatttccaattctcaaggtgggcccgtttagctgccttaattcctgcgatatgccgggcctttacgtcacttcttgctaatgccttaatggtattatttctttgtttttcttttacctctggacgctgttgggataatttagacgccatcccattgcgggcttttactataggatttgataaagttttcttcattgaagctgacactttatccctatgaccgggagtagaccaaagctttttagcatgattggaattctttactctagtacttttataaacagttccgccttcaccgccatccgataaattcatacataatgaaccgtacttaattttaccggctttaatgtatagtgcttctgcgttagaagcaagttcatacgtactaaagaattcaagttttcttacactaatcttataacgctcaggatattttttaacatgacgcatataatatcctgaacctgaatacgaatcgtttaatttgttacttctatgttttccgaagtagtgtttaactactccggtcttaagattttctatctcagtgtgataaatgtaattatattttttcataatattatttatccacggagttgggttacttcagcaatttcacgccaatttttacggtcagtcgcaacgaaatcaccaatataaagagcagtacggagagacacgttacgcagacgatttacgttatctttcataaattccaaaacttcaataacttcagaatttcttaacccacggttctgtaacatagaagtggtcattactacatcttgaacgcggaccataatctcttcattagtgtgaacaccaaggtcaagataaactgaacgagatactaaagcgttcaggtgaggagcgagtttagaaccgcgctctaattcacggtcaatatcaacgttagtgataaagaccacagtaccttcaaactcaaactcattaggaattcctttatcttccaagaaagaagatgcagtgctccagcatactttacgtttctctcctgaatccaaagcagctttcagaaggttaagaatgtccatatcagagaatacatccacatcgtcaataagcagaactgaatttgcttcacgtgattcccagagacggcagtataaaccaattcctgagattttaccgttcactgatttgtaatcaatagcgttagtatcatgagcatgttgtaatgctttatccaaagagtaagtcttaccgatacctgctgctccggagataatcagagaacgaatgttcccgtggattaaaccgttagtcattaatcccatgacgttaaagcgtttcttgatacgctctttcatttcatcaatggattcaacaacttcaattttagcagctactccgtcaattgtgatatcatctttgaatacccaaacaccacgctttttgccattcagttcaacaaagactttaccatcaccctggcgagaatcttcagcacttaagctatccgggaaccactcaccgagtaactcatacgtacctgaaatctctttgccgaagtaaatccctttcttgatggtgatagttgacattttattctccgttactctgttttgttttgatggagctatagtatcattctacagctccaaagtaaactactttttaattatttttctaaaatttcgttgatgtagtaaggacggacctttgaaccgagatagaagtcatccacaaaatcaatcaagttgtcagtttcaccacggatgatagcaagtttagagaacgcttctcctaccatcattggttcaaattctacaccgtgagcttcagcagctttaaaggctttatcaatgttgtttacgacgatttctaaagttttcatcttattctccattgtatctgtttgggtggtacatgtctatagtatcatcagctaacgagcttgtatactactttatgcattcttttgaaacaaaaagaggagcccgaaggctcctcagttatgcatgcttattgatagcattttctgctatacgttttggaagtttacctgcccagcggaagaacatgataatcgctccggcaataaacgcagggaaccaaaagatgagataaaaccaatactctcctgctttctcgatggttccatttttgattagatgcttacagacagaccaacccacgacaaagtaaattattgcaataacgattggcactactacgctccacagtaaaatcatatttcagcccagtaaagtgagaaccggagagtttctccggcccatgacataaaacgatgtacttgttttcgagtaggtcgagcagagaacttagcattcactctacgaccagtctctctacaaactgcttccaagtaccaccgtctacctttatgaggtcttccatagttcaagaagaccttcattgtatcatttgtagtaagaattgtggttttcaagataaaccttctcgacgaaatcgtcccagaacttcatgtctactttcttaggcagtccgttcttctcggcttgatgagccaggcgttcaactgcgtcaacggtcgtttccaaaatatcctgaacttctttgaacggtaactcaccagctttgattttcttaatcaagggagcctgtgtcagaggatatttaaggtcaccggaggaataaatctcctgcagctgaagaccaccacgaagggcatgactcagtgctttccaatctacaccttcgttagcttctgccttacgagcgcgttcgccatattcagcatcaagcttctcaagggagtacttcatttccttaaccgtgatagttgtctggaatttacgacctaacacattatagaaatactgctgacctgatttatggtctgtaaaggttgtccactcaaggaattcacctaccggaagacgatcggcgatgtccttaactttccaacgctcgttaatgcctttctgcttggggcgatcgtcatatttccactcaggaatatctcggataacatccaggactttatgcaaatctgctaaacgagaacccttaacaccatacttaccagcctgcttacggacatatccaagataagccttcatgtccgtggtatagaaacgggctcggttgtcttgaatgaatttccatacttcaggaaggtcagatgcaactaccaattctggtggagtatgcagcatatccaacgctacagtttcaccatcagcagcgagcttgaagaaatactttaagctgaacagctcatggtcaatgtcatctttagtatttttggttgcactgttattcgtattacggttagtatgattcatcgcttgacacatcagaatatcacgcggatgaggcacaaagatttctttaaaatccacatctgattcaggagttgaagtaccatacagatgcgaaccaaaataagattttacgattgttttcataagtaaatatgattccctttagcgaatttaactaatgcattagaacgcttgacggcttcttctgctcgagttttatcagtagttctttttgatgtacggtaaacattaccaattttttgactggtgtaataatacactacctcatgagtatgatactcttgtccatcaggatgctgctcacgccaggtgtcttcgcgtaatgttgtttcatacataggaactaatgcccaatcaattcctgtgctaatgattgccacctggatgtcaagtctgttccagcgaaacgcattgatatatcctagtacccgtgattctgggtccatcattgcgaatttaatgttttcggctgaagctaatggcatctgtttcacaatgctcatactaagttttttcttagtagttacgagttcaatttccatgacccgccctcataatatatgtctaaatcaatgttatctttgccgctgtacttgccagtcaaaggaataaatttaaccgtaaccttttcgccgtcatcaaaagtaaattcggcaatagggtatgtagaaattataccacgttcggttttagcacgaaagacggcccgaaggccgttcacaatataaacttgatcattcttcactagttttaccttctacataatcaatcattgggcagactttccgcttacgggcttttaaatactggacaaataccgatggttcggcttctgccggaagaccagcttttactcgagcaagttttttggtatactgtttctgattgcgatagcgtttaaatttttctaaaccaaaaataaatccaaacgctatagctgcaaataaaagcacaaatactgctataaccactgcgccaactggtactgctacagcgtttaaccaaaacgcggataaactaatacctatccaagagagaattcctgtctctgccacaatcggccaaccgaacatccatgcaacagaaccgatgaatgtgataatcgctgaagagaatagaacatgaagtactgttgtccagaagtatccacatagagtttttggcattttccacatgttgtcagatttaaaccacaggttcattttgaaatgccaagagtttttattaatattcattagttatcctgtttcatagttggaatcattgcggtaagatatttgaccagttcaatagcgtcgcttttatcaatagctacacaatctccgtcacgttcaatttcgatgatagtattatgttcatacgtgtggaataccgtaagatacaaatcaataacatgcgggctttcatcttcaattactgcatcgcctttacgggattttccgtcccatactaatttactcgccatcttttgcctctatcaagaattgaattaatgaatcaatttgtttagtgtcaagatgaattatatcattgccttgttttagcacgatacgactcaactttttagtgaaatacgaattcacaacctttacatgcacatcgctgtacggattatctaaattggtactatcaagaatactttccataattacctcaattgtgaatcttttgaaccacgacgattataagcagaagtcattactgtatcccactttccttgacattctacacaccgttgacagcctttaaccaacagacgacgagctactgggatttcctcatcacaatcaacacagaactcttcggattcccgctgttcttggagttgtttttgaagacgggcccattcaatcccgtccgctattgtagcttcgcgagttgcaaatccgtcatctgatgggccccatccattcatttcaaactctccagaatcatttgcaccaaattatatgtaaacatcggatgctggtattgtaccacaatatagatgataagtaaaacgtttctcattcttcgccatcatcaaagtcgtagtaatcataatcacaactgtcaaggtaagaatccataaattctttctgacgacggaagtcttcaataggagttaatctgtcagcgtatgcttggtcatctggatcgctgaacttatcttcttgcaattctttaatgaactgttcagcttcttcacgtgtccaaaacccacgattaagattatgaaccgaacgtttttcacctggcttgaatacgcccatatcatgtgcagaccgctcagttgaatagctttcagtttggccagcatagttttcatattcgcaaatcacctggaagaaaggagattttcgcgaatatacaccacgaagaccaagttctacatcatacgtgcctgaagcaacaatgtaacgcgttatttcgccgcttttagtttctgtgcgattaacaccacacacgtgataaaagatttttccaggttgaagctcagtggttaacttaatcataatgtttttctcgtttggttgttgatatgtctatagtatcatgtaatgaagggaagtaaacaactttttgaaaagaaaatgcctccctaaggaggcggagggtattactgcaatgataacaaatacttagtcttgtagcatagacctgtaatgtcatccagaacactttggagggcggcaggaacggacttgtagataccatcggccttagccagaatgaagtctagcatttcaatggtgtcctttggcagctctttctgcgatggtaaagccggtgtataactcttacctgagaatcctaaccactgctcaccaaaagcatctatcaaatctggaatctcgttaaagaaaacttcatacgctttatgcctggcatacgatttggtatcaaaatgcgctgaatgaaaatacgcttgagacgccataagtaaaccgatgaattcatcttgtggagtaagtttaccgtcctttacaaaatcattgaacttcattatcgagttgtatcctcatgcggttagcatattcttcacctgctgaacgtcctaaagaatcgcaatctttagaacaagactcgctcttccatttactttgtacgaaagcatagaactgttcagactcttgcttactaggctccttaaatttagcataaacttgtagagcgccctcaacatacgaattataatctgaaatgtcgtcgtgtgatgcagctgggaatgaaatcccgcagcccaacaccagggctaagcaaatgtgattaaaggccatacggcctcctattatttttgtccagtattacgtttgtgctgaagtacagccttaacttctttgaggtatttttccagcttacgtttacgggtataatctgcttttgaactatgttgacgaatttcttcctgaaggtgcgaaataccatgcccaatctcacgacgaagttcgtccagctgctctacagtaagattacgaagttgcttttcacttaaatgctgcatatacacctcatcagttagtaatagtatttatataagtatgtgttacttaatcccaaagccattcgcagatgccttgctcaatggttctagcaccagcttcgtcccagttatattcttcatcatacttcagtgcgcgtttaatttcggctttatgaaataaacgcggaaccggcatagcataacgggtccaacgtagagttttccagaatccatcgcgctttgatttagcgatcagtttcttggcctctaacggtctttcccgattttcagaaatacgcaattctacatatttctgctggttttctttatctttctgagttttaacgtattcgttatagcttttaatataagcaaattcgttattattctgatcgttccatttggaagattttactacatgccagcctttgtggcgaattgttctagacattattacctcgttaagttaaagtacctcaacgatagtaaaatcctgatttaaaaaatttaatattcatgaatagattaccttacatttacatttaggacattcaggttctttatttttaagacgcttagtagttgtctttggagcagtgttgtaatcatatacatgaagacaacggtagcacatcacatattttttcatattaaaccatcaacgaaagcaatattacgtacagcaagaatccaattatgagtactagtactataccacctgccatggcaaataatctactcatgtttaatataacacccattcgtattagcaataaagtctttaccttgtgctaatactttacattcggaattaagacgattttgcatttcttctcgtctatcactttgtatagatgctgctacaccaatccaaatgaatagcatacccataattagcatcaggatagtgttatacgttcttggcttcattataaacacctaccagttcgcaccagtgtttacgacaaagagaaacgtatttgtcttcaccaccaagttctactacttcaccatcggtaatagcatttccgttttcgtcaatacgagctaccattgtagccttacgtccacagtggcaaacgcccttgagctcaacaagtttatcggctacagaaagaagagctttagaaccttcgaataactcgccgcgaaaatcagtgcgaagcccatatgccattactggaacatcatacaagtcaacgattttacatagctgaagaacatgttcagcagtcaagaattgtgcttcatctacaaatacacaatgaatatcacgttgtgtttgtgcccacttgaaaaattcaagtatgtcaatagattcgtctactgtattagcttcatgacgaagaccaatacgtgatgttacctcggtggcagaatctcgagtatcaatagcaggtttaagaatgagagttcccattcctcgttctttgtaattatgcgccgcggtaagaagattagctgatttgcctgcattcatgctcgcgtagttgaaataaagctgtgccattaaagtgtctccataaaatcagaaatagcattcttagaacgaatgagttcatcgtattcttcaggtagaccatttccgtaaatggcactaatagctactacttgctcagcacctgcataatcgtcaatcaactgccatagtttagttttttgctctttagtaatcatctatttacctctaacaaaacagatttagcttttagcttcttcatattctaccaccataatgtcaatatcaggtgttgctaaattgattaatttctcaattagttcccaatcaccgccagcaataccagctccaatttttggaatgtacagaggacgattataaacaatacggccagaatttagttcatggaatgcattaaagattgcaccataatctacgttaggacctggctcatattgggtgtatagattataacaatatgcagtaccatttttatgagtagctcgggtatgagttccaagcttggctaaattattatcgtaatagcggtcttcatcgatgtcaatatttaaaatcggcggatatgctttagcaagctgtccagctacaccggcacccattgtagtaaagcaattacatccatgagcaatatcacattcatgcttcatgaatagttctacaatattacccttgatatatccagtaatcatttattcacctacggaattttataagttgcatattcattaagattattgtatactcttaaaaatatagcattgttacagttaaggatagggtttaacacgccttgttctttagggtgcattactccgtcaatagaaacgccgtcactctgcattccacatccacgagcgttatattcgacaagtggaactattacctggtcatctttatcttgataattataaaatgacattagcaattttctactgctaggaacaaatgctatttcaatattgttcttgaatggaccattactttctattttagtcccctgcgctgcaagcacagtttcaggatagcctgggagcttttcccaggcattaactgaaaatgcgcagcataataaaatagccgcttttttcattttgacgatagtcctgacatataacgagccattaattggtcacgatacattaaacatatattttcgttaggagcattgacacataaatctttcatgctcttagccttacgatttattagtgttgtccactgggccgggctacgtgaatcttttactccatcgctgaatgctgaatctaattcaagcgctaatatatcaacacattcagagttcgtattgcaaaatgttttagcgatacgaagtgaatctgtcattgaattttcagcattagcagagaatgccaataccaatccaagaagcgcggcgtactttaccattattccacctttgtatgtagcattttatgtttctttaagaaattagctttctctaggacatctgatgcataagagtttcctcttttgacattccatcctgcgttataactagcaagagcttttcgcatattgccgttatgtatatttaaccaatatgaaagctcaatatatgcccattccgcggaattctgtctagatttaagcatttttcttatttcagaatcactaaggtttttgccctctaatttagctctggctttaaccgtaggcaagtaattttgaaataccccataagaatgatgcccctttcctgcttttaaattggctcctgccgaagattctttccatgatatagcagccattatatatcctaagccgttattatcatatcggttatgcggagatttttcttttccggatttttgatattgttcaccaaaattatatgcgtaatgcaagttgtcaagttgaacattactgaaagttggctcagacccaaaggccgttgaacataaggccattagaccgataagcgcttttttcatgtttacctcaattaatgtgtataacttttgtgctgattttacctttcaaacgtttatcattaacgaatgccatacgacactttatactaggtccttttcctggtcttggaatatccatggtaaatcctagccacagatttccatccgtaatttctaaccgcattggcttatactcggtgttttcatcaatgtcctttgggtcaattggaagccaaggcattgctaagaattcattaatttctttaagatgattaggaattttggaaagaacagagaatacatactcttcatcaatttcacgttggatagcacggtccaacaaatgatcagagtacttagtgaagaaaggctctttaccctcagccttagctcgggcacgaactgataaattcaaagagcgaaaagcttcctcaaacttacgacgcagtttagttctgcgaatgaatacttctgggttagttgacatagttcattctcctttatttgtagggccatagtatcatggcccgtaaggaaagtaaactactttttaatatttttcttctggacagaacacggcacggcaagcccacatagaagcttccttcagtttctgttttgctgtacgaatctgggcaatacgctcgtatgcttcatcgagtacctgctcaggttcattgactgacacttggtaattaattaatgcctcttcttcaagagcagtaaagataagaccaagacgtacttctgcgtctttgatagcatttactttaccaatcttttcatcggtatgtggcttatatcctttaatatcttcaattgacattatagtgcctctgtgaaagtacgggcgatgacgtcgcgttgctgttccggagtcagagagttgaagcgtaccgcgtagccggaaacacgaatggtcagctgcggatatttttccggatgctcaaccgcgtccagcagagtttcacgacgcagcacgttaacgttcaggtgctgaccgccttcaatttttaccgctggctggtattcaatttctacttcacgagccttgtagccataaaaagtttcagcatccgtaatagtatcttctttaagaacttttgaaacgattactcgtgcgtcatcgccatcttcgatgtaaatggtgcctttaagttcaccttcaagaatttgatatgctttcatatttcctcttaattagattctttattccaaccacgcatgtatgcggtaattacactcattttattccactcaagtagaattactgaaccaatcgcagaagctttcaactaaatgtggaggacactttataacaatttcagccattgcattgttttctcttgaatgcgttggtcatatgtgattaagcttgaactaatcacgcctttgagcttgccggatataaactcaattctaaaattaggatagcgattcatccacttcgtgttaggagcattagaaatgaattctgcgcctttgaacggaccagacagaaacttgtagcgcttgtactcaagcaggttgccagccgtaaccattgttattaattgcttcatatcggcaaatcctgtattttccattactgtaatcatatcaacaatttctgtctgtgtcatcattgcattcctatcacgaaaaataaaggtaaggtatcattaggcatagaccatctgatagcttcctggtacatatcatagaacttcatcatatcgggaactttcattggttcttcaatgataattaatgctcttccaaactttcttcctctaaacttataagaggaatcattggataaaaattccctgattgtcatcggaacaattgatttagctatctcgttagccggtaatttattaattaaatgcgatgaattatattctcgtagaataccttccatcagttcagatgattgtgtgtatcgagtagataagattataaccgaaccatcttcaagcaaccaatcggtagcgaattggcataaggctgtggtctttccggtttgtcttccaccgtctagacgaagggtaccgtactctcgcataaggcaagacggttcataaaaactgtagttgggattattcaatcgtctgtctgcagcgtctctgaaagcatgcatcagggtcaaataaatgggagttaagtgtttcattttagattccagttaaaggggccattccttggcacatgtttaatccatcgacacactatgtaaaccccttaccgcacttgcgctcgaccttattacaggtagggaaagctacttcactcagaggactcgacgttcatgaggagaggtcgtgttcagctttattaggaattagttttaattacgggctgcattagcaacggcgtaagcgtattgaacattagcgtctttaaacgtacctttagaggtatctaaatctgccttaaatccgcctttagtcataatctcggcgaattctttacggaaggccatggcgtcaagatttttccaggctgccttatgcttggcaaattcacgaccagcgaagttgacagccttagccaatttattatcaataacccatttaccagctttaggcacaaacaccgggcctttctgcttagagaatagttttaaattccagcggcgaaggtctccatcggctttaacaaaatctgcgtccaagttactagcaacaacatcttgaatatggccaaatttaagtccatcagcttcaatatttaggtcgttacgccagcgaagtccttcccaggcgaaggctttaaagtcagaagcctttgtagctaaataccgctcaataggagctgttttagggtcaaagccgtttcctcggtaggtccactcatctttattaatgccttggacctttcctacagaagcttcggtgataaattctttataggttttcattttatatcctttaagttaatgcgtgtcattttagtgttctctatgtttgtatgagaacactatatcacaactatcgtaaaagtaaactacttaattgatttagcgtaacgaatagcgccgcgatcgtttacgaacgcaatcttgccattacgcatgtacatggtaacagtacgttggtaaccgttagaagttttgccagactgataacctactaatgcaaagttatcttcgccaggtttgttctgcttagacttaatacgctcatgaccaagtgccattaaggagcgtgcatcgccagatgctactgctttgcgagaagattcatcttcaaccgaagagacaaaatcatcgaatgaatcaaacttagcatggctcttattatataacttgccgtctactacgtagttatatccaacaacgtccatttcaatttctgtgccatcttctaacgtggcggtcatcttctggccttttttaaatttcagaagattacttccaacagattcagtcattacgccaactgttgctaaacgggattcatttaaaaattctttataagttttcatttattttccttgataagcggcccaagttccggtccgcatagtttcaattacacgacgagcacgattaggtgtctgacgataccaacgtgaatttgccagttctttggcagcagcatcccattttttagcagctaaaagcttcatggaagcagggaatccagcaacaccacctacacccatttggaataccatgttaattagagctgctctacgaacatcatctaatatattatataccgggtttaatgtagcattagcaacaatgcctttaattgccttctcaacatcctttgcaaaaattacttctgcctcagcctgagtaatttggccaccggtagaacgacctactagcttgtccaggttagaaatagctaaagattttgacgggtctttagtcagtaagtggccaataccaatggtccaatacccttcggtatctttataaattttgctgtcatatccttcatcgatacgcaacatgccaaaaatatccataaggacctcctattaaattataggagtatttatttggccctacacttggctatgaataactcaaggctacacttctcgtatggtgtccatttacctttccaccacacataatctcttctatcgtcctctggaatttcattaaatcctggacataacttttctgccatgtaatacgacgattttgcatactcgctatcactgaagacataccgtgacttcattagtgtacgtgacaacttatctcgaggatgaaatatgctaatccatcttccgtcgcgaacaaatcgtagttcatgcttataaatgtgtggaatgcctaattcaatagcttcttccataataacctcaccgagatgtgctatacatttgtgtcatgattttgtataaacttggacccattacatatttccattgagaaggtttaattaaagcaaatgcatcgatttcaggaaaattaattccattttcatctttatggtaagctgtacaacggcaatttctgaacatttctgggctcacagggagcatatatccaaacagatggatatccttattgctggcataatcatgtcgtccaaggtcatataagaggtcctggtcaaacccagtaaaccctgtttcttcctggcattcgcgaatagcagcttcttttggtgtttcaccaggctcaacatgtccttttggaatatcccatctagagcctctaccctggacataggtatttgtcatacgacccatgaaaagccgtttgtcattggtaaagaataaaattcctgcacttagctctttcattggcattcgttccaactttcttcaagaatatcttccatggcagtatagaccatagactctagtacaccatcacagttatatgaaccttctaccgagaaatcacagataggtccattaataccaagcagttcttctttgagtgaaatctcgataccgctcagtgattcattatcactgtaacacagaaggcgagtatcaccattttcaaattttacatgcactgcaacagccattatttcatctccttaatccaggataaagtttcattgcgagagtcatctttagatttttctttctttactttgggcttatcgaatacaccccgctggcgctgggaaacgaattgcaaccaccgggcaagtattgcaaaccaagttccaacacctgacatccagcctatgtaatataacgcatcgccaaatactggagaaaagaagtagaacccccagaatgttccgaatccaacaaaggctgataatgaaaaccagataagcagaaataggaagaaatacccaggctcatcgcatttaatcattccacggtaacaagtcttaatcatttgcggcagctcctaatccaggcgttaaactcttccttttctttccacttcttgtatttcattcggtaaactaaaaatgtgcagcaattaatcaacgcgataatcagcatccacatgaggctgaatgcgaaaacacctaaaaataaaagcataatcataaattctgagacgttcaacccaaataatgtccctccaataattacgaaagcacaatataaaatccatgtcacgattccaaaagctggcgccaggccgtcttggttccaaaatccatcaggtttacattcattcattttcttctcacctctttaacaaactcaagcgactttttgcgattccattcaagggttaaatttttgcattgctctttccattcagcctttctttcacagttatgcttaacatactttacccaacgaaatagctcaattaatcccatgatgagcaaactagttccccaccatgcaagcagaattccgaataacactgccggtgtaatatcagttaactgcatgataccaatcgcggtaaaggtacacattgcgccgacagttgcaccaataccaggaattagaacatagtcagtttggtcaaatttatagacataattataaacgggaggttcgcttggcagatataagttactcatttctgcaccctctcacggcagtatttgataaattcatcaatgattaattgtttgcctaccatgttgttagagtcaaacatactcataacctttggtggcaattcattaatgcagtaatttaagtaattgatgtaatcatctttagatgtcacatatttaactaggttaatgccaagacgatagctatttttattatgaataatctcaataactatggtgtacgttgttgaaccagagatagaatatccatcggcattagcacgggctgatgttagatttgatggagaatcgttaaaagaataaattccgtaccgaagtgcaaagatatctacaagcttaactccatcggaaatagacgaaatgctagaaattaagtttttcagcttagaatagtctttaagaacgatagctcgcggcaaaactgtagtgttatacccgttatagcgagttttccaattctcaggccgagtatcaagacaagcaaatttctcgagaatatcagtgatttcttttgggaatcctgctgcaattaattctttaatttgaggtgttgccattggaatatctccagcacattcatataacattttattatccaaataggggcccgaaggccccggtagattatttcagagagttcagatattcctgaacatcggcagaggtggtttcgataccaggctgactgccgttgaaggtttcaactttcatcatgatatcttgtacatcaaccttagcgagttcagcgatttcaatcacatcatcggcagaggtaatacccagagcgtttgcattgcgagtttcacggatgtattccagtttaactgcaaggtccagacgctgttcgtcgagcttaactacagtttgctcaatttgtgcacgcatttctttatattcagcggctttggcgcggagagcagttgcggtacggcgatacagaagaccaagcttagctaaagtttcaaccggagcaccttctgcaagaagacgacgaatttcacgctctttagaagcaccagcctggtctttttcgtcggcaagtttcagcagacgtttttcttcatttactgatttaacatgcgtggtacgcagtttagtaatttcatcaataatacggtttgctgccatcgtatactggtcttcaatagaggtattctgtgcaacaaaggtaccaaatttagaacggatgaattcaacaagttttttcagaatagacattttatttcctcagtaggtagggagttcattataactccccaaaattattagcagttaattactgcttcaattcgtttggttaaagcactagcagtttttgcgaatttaatttgaacagtttcggtaggagcttcttcatggtaaactcgaacgtagtactcttcaacagcaggccaatctttacgaacatgcttaatcaaatctttaagttcacgagtttctgctacattgaacactgcgtgttcatgttcacctttaatccaaatcgcgcgataacgatcaggagtaccgtaattgttataaccacgttcaatttggataaagttgaatttagacattttattctccgttactctgttttgttttgatgtagctatagtaaccgagttgactagcgttgtaaacaactttatgcacaaattttcaaataattttagggaatctggaaggactttctggagggtagaatggatttatacagcttggtatatagaaatgcccagacgacctctagaaggtatctgggctataattgcggtattatcatatactaaaaagccccgtccgaagacagggctctgagaatcgacagcatcacctactggcagatgacctgctaaattcattcctttgaactcggaggcatcagtctcatccaaaggagtatagcgtcaggaggttatgcttgcgacagggaacaaccgactagcggcaatggacgaaccattctcttctatctgacgactcaacgagggcatacgcaagtttcccttcgaatttggtgccgattgcaggagtcgaacccgcgacatcttcattacaagtgaagcgctctaccagctgagctaaatcggcataagacggaaataaggattcgaaccttatgtagttgcacagacgtatctgccgttgaattcctcactaagtttaagcaactattccggggtcttaatttggtgcaccgagagggattcgaaccctcaatccttgcggcgtagcattttaagtgctatgtgtataccagttccaccatcgatgcgaaatggtcgaggcagaaggattcgaaccttcgacctgcagattagaagtccgctgctctatccagctgagctatgccccgagattgttcaggcaggactcgaacctgcacgcttaggtctgttgcaccggtttccgccttactgactcgggtaccaaccgagggttcaaacaagctattccggtcgtgtctaccgatttcaacactgaacaagataattatattactgattatttatagcatttctcaaacgataaagttgattacagaattcgcgttcagtcaaaatcgtttcagaaattttgtttttgcccatactgtgagtgagcgtagcattccgggtagcagccaaagcttttctgaatccttcatttttactaagtgcatcgtatgctcctgttagtaaattctgatacgcttctgaggcacggtgaataggaacacctttccaataaagcgtttgtgttggccaccaacgtttcttcttacctttgaacttagcggattttccgactagtgtacatacatgtgcttgcatttcaggcgaagaaaatttgagggattgcaagaatccctccattgaggcacattctacgccatcatagataaatttatgaggagcaaaattactcaaagcacatgatggatatgaactacctgaaccaatatccattacttttccttcacgtatttcaaccaatcaacttttaatgggctttctttctgcttatacgtaattccaacatggaatgcaaccggagcatcaggaatacgaatttcttctttaatgtcaaagatttctactttctcaaatactcgcatgaaatcatagtcatattcaattggattacccaaccaagcctgaatagcatacataacttcatttgaacaagaatagtggttatctaaataagcatcaaactcttcgtctgagcaatcatatgcaggaacatcaacactaaagaatttcttggaaaattcaggagttacatacttctgttcagtatgaagcttttcaagaattgcttcatggttgtaatcattatttccaagacattcaccgcggcggccacgagaagagaaccattcaagaacatgaattacttgattaatctcttctttttctaagccataaaccatttgggtagaatatcggtcggcatcattttcccaagtggtaattgccattgctaagcctttaggaataacttgtccaaatttaatatgcatttcaatttcctcagttgataatttggtgaccctggcaaagactcgaacatgcaaccaatcccttatgaggggaacgctctaccaattgagctacagggcctttatagaaatcttatgacttttataaaagccctccgaagagggcgccttgtcgggcttatccacctgctaggcagaattactcacacataaaatcagctacttcccagaagtcatttttaactgctactttaaccaccggagaaatttcagatgttttaatagaaacaattacatcacctgcgacagtttctaccagaccaacgattttctcgctgcgagcaacaaatttactcaccggatgaaatttaccggtagcagcgaacatagcttcttggtcaacaatcagtgcgatacgtttcattctttttccttgtttgttttgatgtagtaataataacaggttattcttgtagcattaaatctcgaaaatcgttccgttttcccacattgttgcgaacataggagaaaccttaacgaatgatttgcttcgcattgcaacgtagtcgttatctactttagccaatcctgaagaaatatcagtaatacggccacacttcatagaaccgcgaccacctttattgtatgtgcgttctccgtagaaaacgatatcaccaacttgtacttctcggcctttagaatctttcatcatattttgcctgctgaatttgtttaaaatcgttaacaagttcttttgggtccgacgcattgttaaatggaagaacttgacgtagtttacttactttacaaccagagtgataagcaataatctcttgaatatcacgctcactgaagtattcatatttaatcagtgaatcatatcggcatttaatccagacccacatacctttgcgttcatcaaatgcatatgcaaagtcagcgttaatcattaaatcccgtttagcacaagatgaaagccctaatgctaaattaaccggtccatccaaagacagcttcaccgtaatagcatttacgtcatttgatacaccaataaaaatattcattctatttccttcgcttgtttttggccttcttgtcgtgcacgagaacgtcctgctttatgcagtgattcgtaatatgctcgacgtctatcaatgttttctgtacgatatgctttcccgaaatgggatgttttgaagccgtaatatttcataatataattctcaatggcaagtgattggacggtatgcccggcctcgaaccgagtcacattgactttgcagaatccatgtgtttaatatatcacccatactcgatagcatatctgaacgagactgcaatcccgctactcagcttacaccatcttgtattgtgtcataccgttaatttggtctccatagaatgactcgaacattcgacctctccatcccaaatggagcgctctaccagactgagctatacggagtaattttgatttaaaattcttcttgcttgagtgtgacttacaccaatatgtttagcatatttagataattcgcctcgtttagaaaaatcatataatttagaaatttccattctgtaagctctttcatctgtactaactctagctaagtttaattcggatatctttttcttgaattcagccgaattgtgttttcctgcaaatccgcttggcttaccagccatattatctttccatgtaggtaaatccaaggatttcactgattttgaaatctttttcttatgctcatctgataaaggtttattagcacaggattttccaacttttgacatattagttcttcgttgttcggacaagatttcattattacatatgtggtcccatccgccttcaccaccaagctttaagttatacgtatcaggccttttaataaattcttcatttactaggtgtctttccgcatcatacatatctttagcattatcaaaagtttcgagaatttctttttcaaaattttctttgccgtactttttaatagcacgctttaaattcttaccagaacccatgtatccatcttccaacttagaagtagaatgaactccaatataaaacttttgatttattttatttgtaattttataaagatagtaatgcatatcagttcctattaaaagaaccgagcgtctctcgacgagtcacaatttggagcatccaaagggaatcgaacccttatcaagtgagtggaagtcacctataatagccattatacgatggatgcaaatttggcaggccctgaaggaatcgaaccctcatcactgggtttggagcccagcataatagccgttatactaagaacctgttatttggtgggagtaactggactcgaaccagtcaccgctcgattatcggtcgagagctctaccaaatgagctatactcccatggaaagctaatcatctaattgttgatgtaccactgctatgggcagcgtttaactttcataaatttggcggagagtaaaggagttgaaccctcaccgtttccgatggcccggatttcaagtccggtttgctaccactagcgctactctccagtatttggtgaaggaagtgtcatatagacacaattcgcttagcgacagccacagcgttttgcgggccgtgtatttttccaccattccttcattgttggggtgaccggacggatttgaaccgtcgacgacagcaatcacaatgctgagttctaccaactgaactacggccacatcaatattcactccatccatcatgaggacttcatacgaaattaagagaagaatgatcagttcaacccctgtagacgcgttgaatgaatattaatttggctggactatctggattcgaaccagagataccggagtcaaaggcctgtgacttaaccgcttgtctatagtccaattatttggaggcggaggcaggactcgaacctgcgcgtgtcgggatatgagcccaacattctaccaactgaagttaccccgcatttatccgggttcttgaagtactaacaagtagcttgatgtagaacacgctaaagatataatcttacgaatatagagcttattccgtgggaacaaacagcttcgtcctcggcattatcttataggactcaaactcatcttcaagaactgccacgttcttatttggcggacctaacggaattcgaatccgtgactctcgcgtgacaggcgagtattttaaccgctgaaactataggtccataattcgctttcagagatactctggcacgatgccgaagcaaaggggaacaggactctcatcaccttggtaccagatgaatcttgtttagcactctgttctaagatgtatccctgaaagcgaactttcaacgccgtaagaaattataacatgaacaagcattaagcaggatgaaatcatactccttaatacaaacgccatgccagggatttctgtgccgacgattttatcagaacgtcttctgacttcttcatttggcgggccgtgcaggtatcgaacctgcctagtcatttctgacacggattaacagtccgtcgcttaccctctcagccaacgacccgaatttggtgggacaccgaagactcgaacttcggacacccggattaaaagtccggtgctctaaccaactgagctagtatccctaaatttggtggggagtaatggagtcgaaccactcgagccttttgagcaacagatttacagtctgtcccgctacccctacggtctaactccccagtgggtaattttatttatactgccctaaaattaatcagagcagttgatagattaataataacaaagaaaacctaaagcatattacacaatcggtgagctctttgatttaaccaggaataccctatgtggtgaatccatatgagagagcaatacccggtgctcaggaattggacttgtatggaaaggaaccacacgataacctttaggagtaaatcctagcaaaataccaacgcttgctgcagaaagtgacccgccgcaatagtatgataccaaatcaccaggctggatttcattgtcaagagaatcggttttgacatgcttaggcgtaactaaatcactaggaattggaacgccttgtgcatcatggtattcatgggcaagaagcttataattctcttgatagaaagtattaaacgcagctctgatattcatcacaatttcctcacagttaatctttgtatgcttcagttgaacctttagcaacggtctcaaatcgggaattcagtatctcaaaatagtcttgatacgttccctggagggcttcatagcattcttctactgtagagtaaacacctctgatttggtcagagccaggagcaggataataattagaccaagttaaaagtgcatacattacttacgtttccagctgtagtgagccaaaataagaagcactgcaatggcaagtagtgatgaatgcagtgctgccagcagtgcacctagtcctacacccaaagtaacataatcatacttagttacttcttcacggtttaaatcatagtttttgatgaaccactgcttaatctttttcatgtgctattttatccattatgaaagaaatgatacccattagaaatgcaacacttaacactgatactgtttcaggaagagacataaaggctacacctataatgccaaaacctaacgctcccatgcagatagttgatgcaacatttctaattaattcacaacgtttcattttattctcctcaagttgatagggttatagtatcactactacaacccgttgtaaacaactttgtgaaataaatttctatttcaaatcttctgaccagtcaagttttagcggctcttggtactctctatcaagcactactggtacttgaacttcaccctcgaagtgagctggacctacattgtagctgagagtaatgtgcggtgagtaatctgggaaatcatgagttgctcccaaagctcttgcatattggtgacggaattttaagtattctgaatctagcttaagaactagcgtacgtccgtcttgtgtgtcccatacttcaagtttacctgatgtagcaacttcaaaacttcctgaagcacaaacgtatggaacatgaactcttgaatagcatatcgtcgtatgaatcttatgacgaggcacaggattagggaccttcaactcacgctgaaggtcctcaatagcatcaagagttttctcagagaatttagcagctacatatagaccagtgctaaaatcactgaagttcattaggcatcagcttcttcagtagtttcttctgcgaactgtgcttcgatttttgcaacgaggtcatcaagtttaacctgaccgtcttcgctgatttcaacgccggatacggcaatcagcttctgcagtacttcttcatactgtgcacgcagagcagaaaggccttggatagtttcagacaggtcaaatacacgaactttcagagtatcgacttgggcttgcagttgttcagtagtcatttttgaattcctaatatagtgttgatttttgaataaagttcttctagagaaccgtcgttagttattacgatatcgccttcgcgaatcggaagtccacgctctgtgacgtgagtatcttttttagaaccttcttgctcaggacgaactacatgaataactgtagcacccatcgccctggctacatcaagttcatggtcttgacgagtatctgggacaatgaaataatcataatcaccaaaagtatcagccataaccaaagtgaatcgttttacccaatacatgcgatcgagcttatcacagacaatgtcagtcccaagggtctgcatgagacgacgaattgaccatggctcaacaggtttatttattacaactttacggatgacttccatcgtatcaccgtcaagtattttacgtttgttatcataaaccacgccaggtaaaggcaaatcatgatggacatattcaatggcattcgccataatacgaatcacgtctttagtagacagatttaaatcttgttcgcgatcgtaatcaatgccctcaatcatagaccgagtgatgcgaggaaactcacgagacgtatcacgataccactcaataagcatagcatcagctagtgcatctttaattggacccgctaactgatgctttgttgcattgtagttatccataatgtaatcagcagtagtgtctttgccactgcgttttttaccaatcaaaaataaaagcttcaaattattacctcatagaaggatgcattcccatgaccttttgctgatactgagattcacgagtatcattgacagaaggtctaccagtaattattataccatctttttcaacttcaatgtatttgtactgcaaagttgctacacataccatggcagggtcagattcttcagttaaagaatactcaatttctgacaaatcactcacccacccaccgatgtagcggacagttaatactatatcatgtttatcgttatcaagaacatgcattaaaactgcaccaggaaatccttcaccgtcgttattccatccagacttgtctcggtcaatgtagttttgacaacttaacatccatttgtacatttgtacccatgaatcaagattttcatctactaaaaatctaacaggaacagcgtcaaactcaaaagtagacccaggcaatttagcacgatgcatgccttgaggcgaacctacagtatcagtagcaggaatatgaattccaggaactacagctgtttgaagattagctttaaacgcttgggtgaggcccccgtcagggacctctaatataaagttagttgtgttagtttgattaaacagtccagtagacattatgatttccatacagaagtagcagagtagcgtttgcctttcgacatgaactgctgcagtggtaacatgactacattcgcccaatcagccggttttatctcaattaaagcaccctttatattaccaggaatatatgctttaatcattttgtcagcgccagcaaatcctttaacttggctccagtttatctttaatctagtcttattagatatcactggcgtattagcatactgtttcagaagttcttctaaaaactgctgacgagcctttggcggaatgtagtgaaggtttaacccatacatcaatgtggttgtaccttgctttccaagaccaagataaactatcaaaggaaatttatcccagaatggaagagtgtctttatgtttagcatcatacatgtaagcatatagctttccaggttgaggcttggttacagaatgaccacgtatatttttctttatagtttctgcaaaccatttagcagatttattgtttactgctgcgccttcattacgaattttatctttgatagagcttcgaaatgaatttaccatcacaagagcacgctcctgtttggtcattttgttagcaggttttttctcaatttctgctactttaattgccgttttaattcttgatgcatgacgagccattgctttactgaacgtagcaggatttattcctttgctttcagcgaatgatttagacgtcatgccttttttacgagcagcagagtattcaactcctaatgctacccattgattttcactacgggatttagctttaggcgattctgcagcttcagtgataaattcaaatatagccatcagcctttccatcctaattttttaagtgaatcttcggtaattaacctaaattctatacccattttactggcagtagcttgagctgctttccacttatcaacgtttacagaccatgtgtaaatttcatcaatgtaccgtttcttcgctgatgtcgtcaactttgtgggtttgaccggaggtctagtttctttcttcggtttaacttcaaaaaagaactgctgaccattagaaaacttagcccagaaatccatgaaataccggcgtttctttccatctgcattactaaagtacggaatgactacctcttcgctgttccattgaactacatctggatgattgtcaagccatctcatcatgtactgttcccacgtagaacgataagtaatctttctgaagtcgcctttatatttgtggagattctgcggcatgaatttgccggaatatgccatagtggcctccttataaatactgttattaatatttataagaggataaactatgctcttctcattttttagtccgatagattattctgcaaagaccgtaaaaggtgctaaggcaaaagctatcccaaccgctgacatatttcgtaattatcgcaaatatttcgacactgtagcagaaaactatcttttacaaacatattacataagtggagctcctagaccagaagaattagcacatattctttatggaaatagccagctgtactggattcttttaatgtgtaataatgtatatgacccattcagagattggattaaaacacaagacgcatgctatcaatttgcacagcaaaaatatgcagatgtaggtggagaccaaatactctatcacgtggatgcgtatggcaatcgctattacaatctcgagcaatatcctgaaaattcaggtgtttggtatgataaaggggactttaatcatcagtatcctcaatatactggtgctttggctggtgttgacatttacgaagattctattatagaaaatgaaaaactgcgccaaataaacattatcaatcctagtgatattgaggcatttctttctgatattatacgagaaatggaaaaagcacctgacagcgaatacgaatcaggccggtacaaatcccagactaccatcggagaagttttatgattgaaatgaacgattcattaaaatggtttactggtgttgttgaagacagacaagacccattaaagcaaggaagagtgcgagtacgcgtttacgggcttcatccgtttgaaaaggtgcaaggagctataaccggtcttcctactgaagaccttccctggatgtcagtgattcagcctacaaactcagctggaatttccggagttggctcgtctataactggaatggtggaaggaacatcggtatttggcttatggcttgatgaattcaaaacagcaggattagtaataggaacatattctgcgcacagaaaaactaagccaaactacacggaaggtttttctgatcccacaggtcaatatcctagacaggttgggtcagatactaacccgctagttcaaggcgatgaaaccgggtatagtgctataccaaatatcattcaagatagaaacttggatattggtattaatcctgacgatgctgacctaagtgacattcctgaagacccaaatcctgcaattacaataacagatatgcttaatagggacgaaggtcttagattaaaggtttactgggacacggaaggatatcctactgtaggtattggacaccttatcatggcacaaaaagtacgtgatatgtctgtcatcaataaaacattatcaaatcaggttggtcgtaccgttacaggaaatcctggtatcattacaatggacgaagcagtcgcgttatttaaacaagaccgcgataaaatgctttctgacattaaaacaaattcacgggtaggacctgtatatgctaaagtcaacaagtcaaggcagatggctttagaaaatatgagctttcaaatgggtgtaggcggtttagcaaaatttggtaaaatgcttgatgccatgctcattggtgattggaaaaccgcttatacagaagcaagaaactctgtttggtttaatcagacaaaaggtcgtgcttctcgtgtttccatgattattctaacgggtaatatggaatcatatggagttcctgctccaaagccagaaggaaaaaacctgtctgctgcttacgtagaaccaaagtctggaggtaatcctgaagacccatggactccggaagattcaagaattctttttaaagagcccgaatcttcatataatggtcagtatccatatgttcacacaatggaaacagaatcaggccatatccaagagtttgatgatacacctggctatgaacgctatcgtattgttcacccaacaggttcatacgaagaagtagctcccgatggacgccgtaccagaaaaactgtagctgatttatatgacatgactcagggtgatggaaatattttaatctctggggataagaaggttaacgttggagggaacgagacctattataacatgtataatcgtcgacagcaaattgatggcgataacacgctttacgtacgtggaaatgaaactaaaacgattgaaggcaatggtactatttttgtcaagggtaacattaagatagtcgttgaaggaaatgctgatatccaagtcaacggtgatgccactactaaagtagatggcaaccacgacgtaaccgtcggtggtaacttaacttggcaagtagcaggtactgtaaattggaatgttggtggggcttggactgaaacaatggcttctatgagctcaatcgcccaaggtcaatacactgttgatggttcacgaattgatgtaggttaatcatggctgatatacttcctattaataccacgttacgcgaagtaatagaaggtgaatacgttgagcagtactttactgctcaattatctgccaacgaaacattaaaatcaataaatattatcgactatcaaccagtatctgatatctctgtgtctgaaacctattataaaggtaattataactcagtttttacttttggaaacgatgtgcttaaataccgtgaaggcgatgagctaaagtccgcttcagcgtgggaggatttacctaatcccaaaaccgctgatttatatctgtggaaagcccccagaacactagagaagacatttacctatacagttgagataatatatacagtgacagaagaatcgtctggaggttcatccggaggttctagcgctccaatcgtaacagaatataaaaagcaaaaggtttactctcaaaccgttaaaggtaactggagcagatggggcgaccaacttcgtgcttacgtatatgcggggaattaaatggctggtctttcatatgataaatgcgtaactgccgggcatagtgcgtatcctccgacagaagtaaatgctacacaaagtaaagtattcactggtggaatagcggtattagttgatggcgactcaattaccccacacaccaagacggttgaccctcatgatacgcatggaggagttgttcaacctcgcacatccaaggtatttgtaacaggcaaaaaagctgttcaaatggccgatccaatttcttgtggcgacactgtcgcgcaatcaagctcaaaggtattcatacactaatggctattaaagaacctttaaattatcagttaacgcgtactgcaaacgctatcccagacgcatttactggagcaacattcgacgaaattaaaaatcagcttattaactggcttagtggtcaaaaagagtttcaagactttgattttgctggttcgcgtttaaacgtgctattagacttattagcatataacacgctttacatacagcaatttagtaatactgctttatacgaaagctttattggaacagctaacttgagaagttccgttgttcaagcagctcagcaaaacgggtatttgccaagttccaaatcagcggctactgcatctattatgcttgaggtaactcatccaaatccagagccagcaataaaaatacctcgtggaaccaagtttttagcatatgcacgagattcatcagtagacccatacaactttgttgttactgaaaatgttattgcgctaagagatacttcagcaccagaaggggttaatagatatcttcctattgtcaatttggcgcagggacgtattattcgtactcagttgtcatatgacccgaagaaacctattgttattcgcgaccaatcaattgaccgcaagcaggttaagctgtgggtggatggcgctgaatggactaactggacagaccgttcgatggttcatgcttcgtctatttcaacgatttattatatgcgtgaaaccgtcgatggaaatacagaattcttctttggtgaaggtgtggcagaagcatctgtggcaggaggagttcttgaaagcaacttcatcggcggattgaagcctactaagggtgcgcaagtcgttattgaatatattcgtactgatggtgaagctgcgaatggtgcgactgatttcagctatgctgataccctgcaatatatcgtagtaaacaaaatcattgaaaactggtcagattctcctgattatgttggtgctgatggtggtggggaacctgaagacatcgagcgtattcgtgagctcgcccagattaagcgcgaatctcaaatgcgttgcgtgtctaaaactgactatgaatcattcgttagttcacgctttggttctatcgtgcaggcagtgcagtgttttactgatcaggacaaacccggatatgcatttatcgcaattaaaccaaaatctgggttgcagttaactgcggttcaacgagaagacattcaggattatctaaaacctttctgtcttgctccgattactccttcggtaatgagtccagactacttgttcatccgtcacaatattaaagcttcttatgcattgaataagttgcaagaatcagagcagtggttacagtcaaaaattatagactcgattaatagatattatgttgatgaagttgaaatgtttaacaaaaatttcagtaaatctaaattattgacctatattgatgatactgaccattcaatcatcggttcttctgttgatattcagatggttcgtgaaattgtcaactatttcactcttcctagcgcaggtattaaatactataatactattactccgcggacgttacgttctggtgatttggtctttactgtcactccaaccgcagattcatatccagttaatatcgttggaactgacccagataaaaatggtaaaggaaatatggtcattggaccatttaaaccaggtgatattaaagagaatactcatattcagccatatactgaaaacgattttgatagaactaccgtcggcgaaagaactcgttggtacaaaatcggtgaagtagattattatggtgataatatttactggagccttggagctattggagccgatcctcttcagtttgaagaccaaagtattgagctttattctactcctacccaggatatcgtcttcgcccgcgatggaacacttatcgtatttgagaatgaccttcgtcctcaatacacaactattaaattggagcctattactcaatgacaattgcaccgttcgtcaccagcttacgaattcataagctatctgcgaatcaggtcaatattcgttgggatgacgttggtgcaaacttctactattttgtagaactggccgaaactcgaaacagagcgggggaagttatccccgctgataacttgagttggtcttcactgggttataccgcggataatgattggttcgagcaaaatcgtattaaaccgcttacttattataaaatgcgtgttcaaactacgtcagcaggatttgaaccgtctgaatgggttgaaacagaagagttccaaacttttgaagaaaacgcatacacatttgagcatatgcaagaattcagtttagtgaaagaattcattaaacagaagttttctttaaacaacatgtcgtatgttaacttcaacacatctgccatgatggcatctttgatgactgagtcttttcagtttagtcctgaatattctcatttatcagctattgaaaacttcgttgtaggtgaatctggatatcatgaaattcagggacctattgaagcagtgtgtgttgataaaaatagaactatgctgggagaaatagacggaattttgtatctgtttgaaagattccaacatatggttaaagtatcaaatgataaaggacagaattggcaatacgttcagttatttaatgaccgcgtcggaaatccggtttctagagtggtaatttatcaatctaaaactacttcttatgttttaggatatgataaaatcttttacggaaggaaatcatctgacgtacgttggtcatcgaatgaagttaagtttagcgataacgaagttacatttgctaaattgggagaccagttaaagcttggctttgaagtagagttattcggaacgtatgcatcattgcctgctgacgttaccaaatatgcggaagcatttacttgtaatgacgactatttgtatgttgttgcaaaagacactgtccgtaaagttaaattaaaagatgctccaatagatactgaccctttaagtcctacatttggtgaaaaggtgtttgaaaaggaagtatctcatataacaggcaatcctaaatcagtatgctttaaaatggattccgttggaggcaaaatctttgcccttattaccggggaagttaaaaccttaggattagacccaacagacccaagtaacgttgtggattctgcaactaaaggcgtctatgtttaccaggaaggtacaaatacttggaagcgtgtatttggtaataccgatgaagaaaaacgtcgtatagagcatttatggacttctatgtcaactgacggaaaggaaatattcttttcatcagctaattttaagacaacagagtacacccaggatattgaacttgagacgaaatatccagaactaatttctaccgcagtaaaaaatgttagcccaattcaatatcactctgataagcattaccacatgatgagtttcagagcagatgaattttcaagatgggaaacatttgttcctggacctatgaggttttatgctgaaccgtggtttgtctggatggctcgtgaaggcaacagatgctggataagtacagctgaccatgcagttgtcatttataatgatattctttatcaaaaaagagtagatgcagcggcgcagggaactaccgagcgtattctatcggaagtgtgggataaaggtgacgcaacgttttattgccctccagtttcatttaatggatttttgcagtatgcttctggcatcatgtttcacgaaccagacggaaaactgataggctattacgcatttgactaccgtgttcgtgaccaggtaacgcttaactggaaaccaactgatgtaatgtttaaggcgtttctgcagaaccaaacacgggaagaagactggacacctgaacatactccaggcttacgtgacccagatttgcgtccgtatcttactaaaatgatgccggatagttacttgctacaagatagtaattttgagcacttttgtaagtactatctccaattcctttcggatggaaatggaacacattacaacagtctcgttaatcttgttaagaacaaatatcctcgcgaagaaaatgcatgggaatatctgtggtcagaagtttataaacgcaacatttatctgagtaaagacgctcgtgacgctgtcgtccgtttctttgaagcacgcaagaatgatttctatgctaccaaaggaattgaggactcatataagttcctgtttaaacttctttataacgaagatgtcgaaatcgatattgagtcaaagaacactaccgaatatgacattattgttgaaagcacaaatatttctgatgatttagttggtcgtacgatttatactgcttccggtcgtagtaatgtgacttatattgagagagaataccgggatggtcgtctgttatggcgtattactattcataacttatcaggacggttcattgaaggccaggaaattaaatcagagcgtacggactttgagggtattatagttcaaggtgtccgtggaaaggatatgctgagtaataacattgattatataaaccgcagccgttcttactatgttatgaaaattaagtctcagcttcctacttctcgtttccgcgacgatgtattaaggtttgttcatccggtaggtttcggtttcattggtataacattgctgacgatgtttatcaatagtggcttaaatatgaagcatgttgagactatcataaataaactcaagaactataaatgggatgcaggactgccatcagtttatcctgatagagttgctattatcgcttcagatgatacaatagaaagagacccaataactaatgagcctaggtattcttcacgtgctcaagctggtgaacctttcccgttacctgctaactataatcaagaaaataataacagcattattgctggacaaaacccaggacaacgacgtaagccgttgagccctacatttgaccaatcagcagtaacgtttgctaattatcgcgatttagttaaccaacgtcttaaagacgatgcaggtaatcctcgcgatcctgaaaatccgacacaggtaaaaattgatgagtaattcaacaagagcaagttcaacgcgtagcacgatttatcgtgctatcattacatctaagtttagaactgaaaagatgtacacattttataaatcaattggtccgggaacggaccaaaacacattgtatgtttcatttggaaaaagcactccgtggtcagataatgaatctgaacctggatttgcacctccatatcccgctgataatggagatggggtagttgatgtttggacaaatatgatgggggcagtcaaaattgaatcatctatgcttgactgtgttgttccaagaagagactggggcgatacaagatatcctaacccgcgtacatttttaattggcgatatcgttgttgctaactctgcgccatataacagaactgatgctggatttggatggatggtatatagatgtattgatgttccaaaagatggaatgtgttcaattggtaatcttacaagcaaagacgaatgtattaagcttgggggtaaatggacaccatccactatttccggttcagcgcctcgtgggcgtggtgatgcaaatggtaccgtcgatttgggcgatggatatctttgggaatatctatatgaaattccagccgacgtatcaattaacagatgtacaaatgaatatatcgtagttccttggccagaagagattgaagaatctccagctcgttggggatttcaaaacaacttaacttggcaacaaaacgactttaacctaatctatcgtatgaagtgtaatacaattagatttaaagcataccttgatgcaatttattttccggagtttagtcttccaggaaatactgggtttagacagttgtcaattataactaatccgcttgaagttaagccaatgccaaattctcctaacgttaaggctgaaaaaggttggtatagcgcttctggtcttgaaagacagtcaggtgaaatgatttacatggaaaatcggcaacctattatacgttcaatggaccaaacagaagagttaaatttaattttcgagttttaattatggggagcctttggctccccatttttatataaataagactatactttgatatgaggttaacctatgtatacagataagggtaaaaaaataattgacgtcggtgagattggtaatgcttctaccggcgacattctgtatgatggcggtgtgaaaattaatgataacttcgacgccatttacaacgccttcgccgaccaacgattatttgcagctggcggcggagcattgaaccaaaaaattcatgcaacaagctattaccaaaagataaaatttggagatgctaactctgccgggacagttccaatggggtcatgcatagatgctgattgttcagaaggtgcagttcaaatacgtctttcaaaaggtaaagcgggagaagctgtattcgttgtaaatagtaatggctcagcatcaaaatctaaatccataaaaataacaacaaatggcgaaggtgtagctgatgcatttaaagacggatcgcgagaattgattatcaacacaccaagatgtagaattgagctatggtgtattgaagtcaaagctaacggtgctgcagtttgggattattcaatttcaagtatgtttggcagcacatattcgccgttagaagctacatataatttaacgagttctcctattaatattcgacttggatataatgatgattactctactgttaaattgctattaagcttcagcgcaaatccaggtggtcaaaccatcaaaaggcaatcatctgaagtcatgcttatgattgacccgactattacttcatcagcgccaaacggaagagtatttgacactgaatatgcagtgttaagaagtggtgaatcatctgaaaatgaaaagatgtattctatttcatactctattaacgcgcagaaagatttaatatgcacagcttcaacatcttatggaaacgcacgtttggcagttaaagttattgctacacagaccgtaggggtatctcaataatgaaacaaaatttgatagtaggccaatcagtagatgatgggtctggtgattacctccgtaaaggtggtcttaaaattaataacaactttgatgatttatattcagagttaggtgatggttcagttccattcgcagcaggtgcatggaaaacttttaaagctagccctactggaactactttaaatgctaagtttggtcaggcctttgctattaatacccaggcagcaagagttaacgttcagcttccaaagggtacagccaacgactataacaaagttattaaacttcgtgatgtttggtcaacctggcgattaagcccaatcacagttattcctgctcaaggcgatacattaaaaggttcagcttctcctaaaattttcaatactaacttccaagatttggaattggtttattgcgcccctggccgctgggaatatattgaaaataaaactgtagataagctaactaatggcaacttaagtactgtagcgaaaaaatcaattattgctactgcgggtcagactgactttcttaacatttttgatggcgtagattataacgaagactcgcttaatgtatatcgtcgtggtaatattttatattacggtgaaaccagcgttatggataaagccaatgctgattacggttctcctggaacggtagcgggtaaattggtagaattaaacggtaaagacattcgtttaaaagttccatgcgttgaaggggaagtaataacatttgaaaccttcctagatggaattggtgtttatcggtcttcatacaacaagttggctatccagatacgagattcagcccagactacatccaagacgattcctgggtcaatgatagtagataaccttgctactctccgcagaatcactctggatgacatgggtgtacttccaggcgtaggggtaaatcctaactcgcttgaaatttcattgaacggaaaggaattactcgaagctggaactgctggtcttcctttattttattgtgaaggtgcggaaggtggatacgcagaagactgtataaacaatggtggtcaatgggtaaattctaaccaagattatagactggaatttgactcaactggtactaatgtcgaagctattatttttggtgaggcgtttgaagataaagaccttcttaccgttcgttggttcaataataacatcggtactactatggatattgacgatatcatggcagaaaccgaccaagtgtatatgaatgctgagcaattagtaactctaaaaaatcgcattgaatacactaactatgatgaaccaaatcagaaaaatatgcgtcctgtcgctgatgatgttatgattaaagtcaataacattgcagcattctttgacgtaatttatccgattggcactatctacgaaaacgcccataaccacgcaaaccctgctgactatatgggatttggggtgtggaagctttactctcagggtcgtgttactgcgggttggaataatgattcatctgatccttattttgcgcggaacaataataacctaaatgaaaatggtcagccatcattaacagcaggtggaacggttggtgatttgacatttacattaggaaaagaacacattcctgaactaatgtcaagagacaaagttctaatttcagaccctgaacatggcagcgtagttatcggtggatgtcaattagacccagacgcacaaggtccaggttattctaaataccgtgaagacactgttgcagtaaacaatggtgtagttccaaatgacatcactaaaattcagccaacaatcaccgtttatcgttggattagggtaggttaaaatgactattgaaactaaaactcgtgaaggagctaaagttaattcaagattaactgctttttcagaatatcgtgtagacccgcagaatatcgcggttggaaataaggctcctatagggagcctaacctttgagcaaatggatttaggtgtttggtacccaaatgcagaagctgctattaatgatttaatgtcattacagtcagcagaaattggaactattgtttgtaatgacaccggaatatctccacaaccagcacagcaaattacacgcgctactttttcaggtgtagtttcgttagaacctaaagaagacggttctgttggtgacccagtaataattcatattctcggattgccgattagaattgcgaacggtgatgacttcgcagctgtagcaacacgttggtatgataaagtaaaagaattagaagctgttggaaaggtggttcaacaggttactcaatcgccggcaactcctcagtatgttgatattattcatctagattatcagaaccataattttgaaacatataaaaagtatggtttaactgttgaatttactattacttcacctgctaaagcgggttatgggcaatgggatgctatcggcaacgaatctaaaaccttcggcgcgaacacatttactttccactattttagaaggatgggataatggcccagaataactataatcactacagtgatttggccaaatatacgatatttgacccaacaaatacacaatggcctgttgctataaaagacgtccaatcagcgttagagctgattggtagctgggcaagaactgataccggattacctgtagcatctcctacagtagccggtgtaattcgcacagcaacacaggctgaagttgatgctggaactattggtaatgctgcggtaactcctgctacattaaaatccacaattactcggcctgaagcaactaccgcaattcttggcttaacccgatacgcaactaatactgaagccgcagcattaaccgcaggaaatagaactattaccgcggcggctctcggtcatgtgtttaaaactgtgaaagcccaagaaaacgtagatggaactgttaggttaactactgcggctcaagcacaagcaggaactgatgaaaccactgcagtaactcctaagcgtgttgtagaaatgattggaaagttcagcgttaatcctcctacttatacttctgcaacagaaagcaacttaggactagttcgtgtcgcaacccaagcccaggtagcagcaggtgctgttcacgatggatacgcagtaactccaaaaaccttcatggcatcaaaagcgtctgacagtgtatttggtatagtaaaatttgctaaagactcagatgtggcttcagctacttctaacaatttggctgttactccaaaaagtcttcaagcgctaaaatccaccaaggataaatatggattaaccagattatcaggttctccaactactgatgcttcattggcagctgctgcaacagatgctgtttttaaaactcgtagaataaacggaaaaactcttgataatgacataacaattactaataatgatattaattgttatacaagacaagaatccgacgggcgctacatgccagctggaactagagtaggtaatgttacctgggttgaaggacaatcttggattagccgaggtgcaacgtttacatgtaatgcaccatgggaagcttctagtaaattagctctaaatgttaacgtaaaatttgagcgtaacaacgacggatatgacaatcgtattttcagatttgttttaatagttaatggttcccaatggggtggtgaacttactcttaacattgaaaatactaaaggcggaaaaaatggtcattcatggagatttgaagcttacgcatctagcaactttttcttcaataacattcctccaaatgccactgttcaaataagaccaacagaagacagtcgtattatattttatgactgcatgcttacattctgtacaaatagaccgtaaggaataatatgaccaaactagtagattcgcttccgttcgtagacggaattccagacgattttcaacagagaattaactggataaaaaatacagagcctcttaatggggcttcaacccgctatggaaatgatggagaactgaatagagcttctgtgcagattcagaaaaacgttgttcaggtacatagtgacttgaatcgtgttggagctgtagtagaaaatgttcaagtagatgtagaccaaatcaaaaaatcgttagaaatcacaggttcttctgatgccattgagcaggtttatatcaataaaaagaatattgaaaagcatgatggacaaattcttaaattagaagaagacaccacaaagattagaactgacctcgattttctcgaagaggatgtgggtgtttatgattctagtaaagatgactattacagaacagttcgtgataatatagtttgggttaaacgagaaattggtgcgtatcctgggcaagatgttaacggacaacctaagcaagacgctccaggctctggtatgaaataccgaatcattaataatgcgtcagctatagtaaaacatgacgagcgtattcaggcgctagaggatgcatacaatgattcagacgtaggttctctgactattgaagtaaacgacctgcgtaaagaagttggtcctaaatccggagctacgtcagcttcaatttatgcaaggcttgtgaataacgctgatgctatttccgcagctaataatgaaatctttgctattaaccaagccattgattttaccaatccagtaaaaattggagctcgtactactagattagaaaacgattatcgtatagttgacgcaacacttaactctgcacaaaccgggttagttcctcgtgtcaataatattgatgctcgtttggggtcttctgataagcctgatactattgaaggaaaaattagttctctttcaactgaccaagggtacatttctgatgttgtaggacgtgatacttcatcaggacttcagggtcaagtagcatggataaatcagcaagttggtattgttcctggcggacagccgattcctccggggtcaattttagcgagaatgaccaatgttgaagggatgcaaaactctcaacagtctgctatccaggacattcaagtagaacttggcaataacagcgaagggttaaaaggttctgtatttacgttacagactcaaatgaatggtgacttttcgtcagaaaatccggttcagcgggatggcgtgtatgccactgtagtagaattgcaagataaattcgtgactgcagttactgacgtagaacagactggagcatacctccgtaaacggggcgaatggtttaagaagccttcatcaataggtgaattcagtaaagaagatttcactgttgatttaagttctgatgcattggtaaatcctaactcattggtcgctgcttcattcaatgctggcattcgtattgtcgatgatattattgtcgatgacgatggcgtattttgtgtagaaactgatacagttatcgaagcttctgattcagataaagccgtccaaattgttattctcgtcaataacattgaggtgtttacttatagcctaggtgttaaagcagtaaccggcgagcaactgttgaaaaccaagaaacttattaagttttcgtctggcgatgcaatcaaaattgtgtatagagctgcttcagaagaatcaaaagttcctgttagtattaaatcattggatattactattcatccagcagtataatgaaagggaccttcgggtccctttttcgtataaatagaatataaagaggagcttatatgtcatacaacacatacaacccaaaaacgcttaaagacgctatacttcgacgtctaggagcgccggtaattaatgtcgaagtaactgaagaccaaatttatgattgtattcaacgagcattagagttgtatggtgaataccactttaacggattgaataaaggctatcaagttttttatattggaaaagatgaagctgataatgaaagattcttgaatggcgtatttgatttacgtggtcgtaatgtatttgctgtcactcaaatcgttagaacaaatgtaggttcattaacttcaatggatggtaatgctacctatccgtggtttactgactttttaatgggaatggccggaattaatggcggaatggggtcaagctgtaataagagttatggaccaaacgctttcggtgctgaccttggctattttactcaattgatgacttactggtcgatgatgcaagatttacttgctcctctcccggattattggtataactctgataatgaaatgcttaaaataatgggcaacttcatgaagggtgatatcattgtttgtgagtgctggactaaatcatttatgaataccgacatgatggtaggtaatactgcaggttacggcttcgctggtgaacaaacttccgaccattggggcttaggagataggtatcagaatcctaaccttcgcaataacggccaatatgcaggagaaggtaatacaaacagagaaggcgcgtataataatcgttgggtaaaagattatgctacagcattaactaaaaagctgtggggcgaaattctgtttaaacaccaagggctgcaattagccggtggagttactgttgatggccaaacacttaaagtagaggcccaagaagaaatcgagaagctccgagaggaacttgatttacttgacccgggttgtcctattctgttggggtaaaagatgactacatttgattctaggctcttcgctaaactcgaagattatcgaggatataataaaactaatgagactgaaattctcaatccttatgtgaatttttacaatcatagaaatagtcaaacgttagcagatgctttatcggctgaggctattcaaatgagaggaattgagttttatttccttcctcgcgaatataacaatccggatttgcttttcggagaagacccatcaagtaaattcaccaaggcttggaaatttgctgcttacttagactcttttgacggttattctggtgataacacgttcttcagtaaatttggtatgatggttaatgatgaagtcaatttgactattaatcccaacctattcaagcaccaaactaataattcagaaccaaaagcaggtgacctgatttatttcccgatggataattcgctgtttgaaattaattgggttcagccgtatgacccattttatcagttaggtcaaaatgttcagcgcaagattactgcgcagaaatacatttattccggtgagcagcttcaaccagagttgcagcgcaacgaaggaattatcattcctgagttctctgaacttgatttagaaccaatcaaaaacattgattctcttgctgatatttctgacgtacaatacgcagaaagcaatgaaatcaataaagaagctgctgaatatgttcatccgtattatgttaataacggaagaggacttgagtcccctcctaaagcagattcgtttgatgacgggttcttcgaataaataaaataaagatgggacctttgggtcccttaggagaaatcatgtttggacattggtataattcgtccttacgccgatacattgtattacttggagatttattttctcatgtacaaattgctcgttggcgtgaagacactggactaaaatatattaaagtacctatcacttacgcttcaaaggaaaagttccgttctcaactcggaaaatggactgctatccagtctaccgagaataaagcaaagatagaaactgttttgccaagaatgaatttgcacttggttgatatgcaatacaacgcgatgtataaaacatcacagttgaatagaaccaaatcatataaaaccccttcaaaaattacatctcagtataatcctactccgattaagatgatttttgaattgggaatttatacgcgcaaccaagatgatatgtatcaaatcatcgagcaaatcgttccttattttcagccacattttaacacgactataactgagctttacgacaaagacacaagctttaatcgtgatgttagaattgtattacaatcattttctcaggatgaagctgttgacggagataatattactcgtcgtagattagaatggtcattgatgtttgaagtcaacggatggctatatcctcctgttgccgaagttgacggcgaaattagaaccatttatttagatttcttcgctaacagcaaagagctaactccagaaggaaactttgaatcagtagatagcgaagtcactccacgagatgttcaacacgaaaattgggatggttctagtaaacaaacttattctcacgatattcctattccggtaaatccggaggctcctggaccaagaggtgaaaaatgagtgaattgcaattagatatggctaaattattagacatcgaaggaattcctggaatagaaggacaagaaattccagtttatgaaaaacttgaattagttgaagttaaatctaatccaaatgaccgtaaacctgacctcgaagatgactattcggttgttcgcaagaacatgcacttccagcaacaaatgttaatggacgcagctaaaatatttttggaaactgctaagaatgctgactctcctagacatatggaagtatttgcaactcttatgggtcagatgactacaactaacaaagaaattcttaagcttcataaagaaatgaaagacattacttctgagcaggttagtactggaaaaggagctaatcctcaacaaggaatgaatattcaaaacgcaacagtctttgtaggttctactgccgatatgatggatgagtttggagacgcctatgaagcacaagaagctcgagagaaaatagtaaatggaacagactcaaccgtttaacgttctgagtgatgcccatcctttaaatgacgggaaacaggtggttattcgccacccgtctgaaatggaaacgaaaattgaaaacggagttcgtttctttaaatcgcaatgggatgataagtggtatcctgagaaatttgaagactatcttaagctgcatgggatagttaaaattcgcctgcaaggtgaagacccagcgcattttcaaacgtttaaggataaaaataataagcgcactcgttatatgggattgcctaaccttaaacgagcaaacattaaaatgcaactaacccgtgaaatagttgcagaatggaagaaatgccgagacgatattgtgtacttcgcagagacctactgtgcaattactcacattgactatggtaccattaaagtccagcttcgtgattaccagagggacatgctggaaatcatggcagccaaacgtatgacttgttgtaaccttagtcgtcagctcggtaaaactactgtagtagcaatctttcttgcgcacttcgtgtgttttaataaggataaagcagtaggtattcttgcgcataaaggctcaatgtctgcggaagttctcgaccgtactaagcaagcaattgaattacttcctgactttcttcagcctggtattgttgaatggaacaaaggctcaatcgaattagataatggctcatctattggggcatacgcttcgagtcctgacgccgttcgtggtaactcatttgcaatgatttacattgacgaatgtgcgtttattccaaacttcatcgatgcatggcttgctattcaacccgttatttcatcaggtcgtcgttctaaaattattatcacgactacaccgagtggattaaaccacttttatgatatttggactgcggcggttgaaggtaaatccggctttactccttatactgcaatttggaactcagtaaaagaacgcctatataacgacgaagatatgtttgatgatgggtggcaatggtcacttcaaactatcagtgcttcttctcttgaacagttcaagcaagagcactgcgctgaattccatggcacatccggtactcttatttccggtatgaaacttgctaatatggattggattgaagttactcctgactcacacggattttataaattcaaagaagctgaagcagaccacaagtatattgcaacccttgactctgctgaaggacgagggcaggattaccatgcactaaatattattgacgtaaccacatctgagtgggaacaagttggagtattgcattctaatacaatttctcacttaatcctcccagatatagttattaaatatctaatggagtacaacgaagctccgatctatatagaacttaactctacaggtgtttctgtagcgaagagtctttatatggatttagaatatgagaatgtcatttgcgattcaatagttgatttaggaatgaaacagacgaaaaggtcaaaagccgtcggatgttctgcactaaaagaccttatcgaaaaagataaactcattattcaccatcgtgctactgttcaagaatttcgtactttctctgagaaaggagtatcctgggcggcagaagatggatatcatgacgatttaattatgtcactcgtaattttcgcatggttaacaacacagcaaaaatttgctgatttcgtggataaagatgaaatgcgtttagcatctgaagtttttaaacgcgaattagaagatatgaacgacgattacgctcctgtagtgttcgttgacgccgtgaatagcgcagaatatgcgcctcaagaacatggtctttcatttgtataaataataaaaagcaaacaacattgaggatatatcatgcctttagtctctcctggaattgagctcaaagaaacgagcgtacagagcacggtagtacttaacgctacaggtcgtgccgcaattgtcgggaagttccaatggggtcctgcatatcaagttactcaaatcactaatgaagttgaactggttgatatgtttggcggccctaataaccaaactgctgattactttatgtcagcaatgaactttctgcaatatggtaatgatctacgcaccgtccgtgtagttaaccgtgaagctgctaaaaacgcatctccattggttgataatattgaatggactatcactactgctggtagtaactatgaagttggtgataaaattacggttaaatatgcagaccaaactgtagatgacaccggttcagttactgaagtagatagtgacggaaaaattaagtcggtgttcattccgacatcgaagattattgcatatgcaaaaagcattaatcaatatcctgatttagggtcttcgtggacaactaccattacttcacagagttctggtgtttccgctgtcattactttaggtaaaattatttctgagtctacagttttactgactgagcatgaaactgcccatgaagaaatgacaaaaaccgaattccagactgcgcttgcgcaatataaaatgcctggaattgtagctgcgtatccgggcgagctcggaaaccaactggaaattgaaattgtatcaaaagccgcttttgataaaggcgaacaactgacgatttatccgagtggtggacagcgtgcatcaaccgcaaaagccgtatttggatatggtcctcagaccgatactcagtacgctatcattgttcgtagagatggcgcggtagtcgaatcaacggtgttatcaacaaaccgtcaagataaagacatctacggaaacaacatctttatggacgattatttctccaaaggttcttcacgttatatatttgctactgcgcaaggatggcctgaaggattttccggtgttattcgtctgggtggtggggtttcagctaatgaatcagttactgctggcgatttaattcaaggttgggatttatttggtgaccgtgaagcattgcgtgtaaaccttctgattgctggtgcttgtgccggtgaaacagatgaaatcgcaagcacagtacaaaaacacgtttcgtctattgcagatgagcgtcaagactgtttagcactcatttcgcctccaaggtcaacgattgtaaatattcctctgactcgtgctgttgataatttaatcgactggcgccaaggtgatggaacttatgattctgctaacatgaacattaataccacatatgcagcaattgacggcaactataaatatcagtatgataaatataacgacgtaaaccgctgggttccactggctgccgatattgcaggtctgtgtgctcgtactgatgatattgctcagccttggatgtcaccagctggatatcgtcgtggtcagattctgaactgcattaaacttgcgattgaacctcgtcaagcacatcgtgaccgtatgtatcaagcaggtattaacccggtaacgggtcaaggtaccggtgatggtttcattctgtttggtgataagactgcaaccactgttccaactccgtttgaccgaattaacgttcgccgcttgtttaacatgctgaagaacaacatcggtgattcttctaagtggcagctgtttgaattaaacgataactttacccgtagttctttccgtatggaaaccagccaatacctcgcaggtattaaagctctgggtggtgtatatgacttccgagttgtatgtgataccacgaacaacacccctgctgttatcgaccgcaacgagtttgtagcgagcttctacatcaagccggcacgttcaattaactatatcactctgaacttcgttgctacggcaactggtgcagatttcgatgagttaatcggaccacagtaatatgaaccccaggacattctggggtcatctaatctttagatgataaattatattaccgcacactttaatagcctctatgatgatgtagtcaatcgagaggctatataaatatctataggaaacaacgatggaattaacagacatcactcgtgcgtttgaatctggtgactttgcgcgtcctaacctgtttgaggtagaaattccttatctgggtcgtaacttcagtttcaaatgtaaagcagcaccgatgccggcaggtatcgtagaaaaagttccagtcgggtacatgaaccgtaagattaacgtcgctggtgaccgtacttatgacgactggactgttaccatctataacgatgataaacatgaagtacgtaaggcaattattgcttggcaagctcaggcccacgctcaaggcaatgatatctctggtatgactccagctgattacaaaaaagttgctacggtacgccagtttagtcgtgatggcaaaactatcacaaatgaacacaccattactggtctgtggccaactaacgttggtgaagtacagatggactgggattcgaataatgaggtagaaacgttcgaaactacctttgctattgactggtgggaataatgttatggggcttcggccccgtatcgaagttctgtgagttatttgcttaaatatctgacaaaacttcgatataaatatacttatagataatttcggagactccaatggcctttcatattttggacttattcgctccgtgggaaaaacgtgacgaagctgaatataagcaacaaatcaacaatgacctagagtcaatcactgctccaaaatttgatgatggagctcgtgaagttgaatcaaacgaaaacgaaatccagtataattcattcaaccaaatgatgtttggttccaatgaacctggaatgaaaacaactgctgatttaatcaacacttatcgcagtttaatgaataactacgaagttgacaatgctgttgaagaaatagtttctgacgcagttgtatacgaagacggtcatccagtagtttctcttgatttagattctaccgatttcagtcaagcaattaaagaccgcattcttgaagaatttaatacagttttaacatgccttaatttcgagagaaagggcgctgaccatttccgccgttggtatgttgactcaagaatattcttccataaaatcgtcaacaccaagaaaatgaaagacggaattcaggaactgagacgtcttgacccgcgcaacttacaattcattcgcgaaatcgttactgctgatgacgctggtactaaaatcgttaaggggtacaaagagtatttcatttacgatactggcaaagaaagttattacgcagatggtagattatattccgccggaacaaaaattaaaattccacgcgatgctatagtatatgcacattctggactagttgattgttcaggtcaaaacatcatcggttatttacaccgagccgttaaacccgccaaccagttaaagctattagaagatgcgttggtaatttatcgtattactcgtgctcctgaccgtcgtgtgttttacattgacactggtaatatgccttctcgtaaagcggcagcccatatgcaacatattatgaacacgatgaaaaatcgcgttgtatatgatgcatcaaccggtaagattaaaaatcagcaacataatatgtcaatgacagaagactattggttgcagcgtagagatggtaaagcagttactgaagtagatactcttcctggtatgtccggtatgagtgatatggatgacgtccgttactttagaacagcgttatacatggcattgcgagttcctctttcgcgcatgccagatgcaaataatcaaggtggtgtgcagtttgatgctggcacaacaattactcgtgatgagcttgattttgctaaatttattcgtagattacagcataaattcgaagagattatgcttgatccgcttcgcactaatctaattcttaaaaaagttttgtctaaagatgagtgggaagacgaaataaataatattaagattgtgttccataaagattcatatttcaccgagttgaaagatgctgaagttatggagcgtagaatcaatatgctcacaatggctgaaccgtttatcggcaagtatatttctcataagacagcaatgaaagatttccttcagatgtcagatgaagaaattgaacaagaagccaagcaaattgaattagagtctaaagaggctcgcttccaagaccaagaaaatgaagaggatttctaatggaaaattatatttccgcaattgaatccagagacctcgtagcagccaaaaaagcttttggtgcaattatggctgaacggacatctggtttaattgaagagcgcaaaaaatttatcgcagcgtctgtcatgattgagggtgaagagcccgatgaggacgaagatgaagacgacgaagacgaagataagtctgatgaagacgacgaagaggacgagtaatgcttatactgcctgaaaatcatgaattagttatcgacgctgtcgaagcttttcttcctgaagcacaggcacgttttgataagttgtccgccgcgctctctaaagatgatataaataaaattgtagagaatcttgttgtctctgagcctgatttagcaattgctttaggtgcaatcaatgaatctctacaactaaatgaatttatcgttaaacacgttgattctaaaggtactattacacgtactaaggatcgtaaaacacgtgagcgtaacgcgttccaaacaactggactttctaaagctaaacgccgtcaaatcgcgcgtaaagcagtaaaatcaaaacgtgctaatccatcggctcaaactcgtggattacgtaaacgtaagaaagcacttaaacgccgtcaggctctggggctaagttaatggaaaacctcaatgaacaacttttaattgagcattggggtcaaccgggcgatgtaattgatggtaaacccatgctagaatctattatcgttgaaggcgaaaatgaatctggcttaaaacctggtctgtatatcgaaggtgtttttatgcaggcagaagtagtaaaccgtaataaacgtctttatccaaaacgcattcttgagactgcggtaagtcgttatattaaggaacaggttgctactcgtcaggctctaggagaattaaaccatccacctcgcgcaaatgttgacccgatgcaagccgcaatcattatcgaagatatgtggtggaaaggcaacgatgtttatgggcgtgcaagaatcatcgaaggagaccacggtccaggtgataaattagccgctaacatccgtgctggttggattcctggtgtatcaagccgtgggcttggttctttaaaagactcaggaaaaggatataacatcgtacaagaaggctttcgcctgactgttggtgtagacgcagtttggggtcctagtgctccggatgcatgggtacaaccgaaacaaatttcggaaaatacctcggcacaagttgccaatagtgctgatgatgcttttatggctctcgcagagaagttaaaagcgttataaataattatgtaacttaacacaggacatcaaaaatgcttaaagaacttttaatgaccgaagctaaaactatcgatgcttccgtcgctcttgacagtattttcgaatcagttcagctttctccggaagctaaagctaacttcagcactgtattcgaagcaacagtcaaaaaacacgccgtagctctggcagaatctcacattgaaaagattgctgagaaagcagaagaaaaagttgaagaagaaaaagaaaaagctaaagaagaagctcgcgaagagctgaaagaagctgcttctaaatactttgaccatatcgctgccgaatggatggcggaaaatcagctggcggttgaccgcggtattaaggctgaactgtttgaatccatgtttagcggtatgaaagaactgtttgttgagcacaatgttgtaattcctgaagaatcagtagacgtagtcgctgaaatggaagaagaacttgctgagcaaaaagaagaaactgctcgtttatttgaagaagtttctaagcgtgatgcttatatcaattacgcccaacgcgagtatgctattcaagaagcaacccgtgaattgactgatactcaaaaagagaaagtagtttctctgacagagggtatggattattctgactcgttttcaactaagctgaaagctattgttgaaatggtgcagggttctgtagagcagtctgtaacggaatctgccgatataaatactatcgacaaagaagcagacggtttaaacttcacaactgaagcagtcgaagaaactcctgcgactaaaaccccatccgttatggatgcttatgtagcccaagcggctcgtctttcttaatttaaaaggttatacaacacatgaaaaagaataaacttatcgaaaaatggcagccgctgcttgagaacgaagctctgccggaaattgttggcgctagcaaaaaagctctgatcgctaagatttttgaaaaccaggaagctgatattaatcaggctccggaataccgcgatgaaaaaatcgctgaagcatttggttctttcctgtctgaagcagaaattggcggtgaccatggttatgatgcacagaacatcgcagctggtcagacctctggtgctgtaacccagattggaccggcagttatgggtatggttcgtcgtgctatccctaacctgattgctttcgatatctgtggtgtacagccgatgtctaacccaaccggtcaggtattcgctctccgcgctgtttacggtaaagaccctctggctgctggtgctaaagaagctttccatccgatgtacgctccggatgcaatgttctctggtcagggtgcaaccgagaaatttgaagcagttaaagctggtgctgctctgactgttggtgatatcgttgttcacgatttcgcacagaccggtcgtgctcatctgcaggttgttgaagatttcactgtagacgctggtgctaccgatgctgctaaactggacgctgcagttactgccgctctggaagctggtaaagttgtagaaatcgccgaaggtatggctacctctgttgctgaactgcaagaagcctttaacggttcgaaagataacccgtggaatgaaatgggcttccgtatcgataaacaaactatcgaagcgaaatctcgtcagctgaaagcacagtattccatcgaactggctcaggacctccgtgctgttcatggcatggacgctgatgctgaactgagttcaatcctggctaccgaaattatgctggaaatcaaccgtgaagttgttgattggattaactactccgctcaggttggtaaatctggtatgaccaagactgttggttctaaagccggtgtattcgacttccaagacccgattgatatccgcggtgctcgttgggcaggtgaaagctttaaagctctgctgttccagattgacaaagaatccgctgaaatcgctcgtcagaccggtcgcggtgaaggtaacttcattatcgcttcccgtaacgtagttaacgtactggcagctgttgataccaacgtatctccggcagctcatggtctgggtcgtggttataataccgacaccactaaagcagtatttgctggtgttctgggtggtcgctaccgtgtatacatcgaccagtatgctcgtcaggattacttcaccatcggttataaaggtgctaacgaaatggatgctggtatctactatgctccgtatgttgcactgaccccgctgcgtggttccgatccgaagaacttccaaccggtcatggggttcaaaacccgttacggtatcggtattaacccgttcgccgattctgctgctcaacagccgaaaggtcgtattacctctggtatgccttctatcgtcaactctgttggtaagaatgcttacttccgtcgtgtatgggttaaaggtatctaataccaataagggagccttcgggctccctttagttgttttaatggatataaataaacttataaatccacagaggaaagcgcaatggctaaaatcaacgaacttctgcgcgagtcaactacaacgagtagcaacttaattggtcgccctaatctcgttgcattaacgcgcgcaaccactaaattaatctataccgatcttgttgctatacagcgtactaaacagcctgtagcagcactgtatggtattaaatatcttaaccctaatggtgacctgacgtttaatacgggtgcaacttatgcaggtcaaatcggggcgacggaacgtgagtcaattgaagaactcactatgtcaaataaagactcattcaataaagacgatatgttcaaatatcagaatgtggtctttaaagtacttaaagatgccccgtttaccgatacagcagaaaccgacgaatttggaattgtatctgaagcagtagcagctaataatattcgtatgctgtcagatgctgcagtcactgaaaaatttgaaggacccgattcagacccaatcaccgaagccagttttaaaattgataaatggcagacccaggttaaatcacgtaagcttaaaacggatttaacggtagaattagctcaagacttagaagctaacgggttcgatgctccagagcttattgatgatttacttgctactgaaatggcagaagacattaataaagacatcctgcaatcattgattacggtttcttctcggtttaaagtagctggtgtatccgataaaggtgtattagatttaactaagcaggattctgctccggaacaaggtcgtactctgtatcgtttcatttgtgaaatgaattcagcagttcaacgtaatacttcttattctggtacttatgcagtagcatctactcgttgtgctgcggtgctggcagcttccggttggttaatgcagaagaatgatggcactattccggacaacgcgtacggtatgctgaataacggcttacctctttattgtgatactaccagcccagttgattacgttattgttggtgttaaagcagaatttggtgggaaggaaactgtaggttcattattctatgcgccatataccgaaggcttggatttagacgaccctgagcatgttggtgcatttaaagttattgttgacccagctagcttgcagccttctgttgctttactggtacgatatgcgctgtcagttaacccatatactgtaggattggacgaggacgaagctcgtgtgattaatgctgcggatatggataagatggcaggaagaagtaagatgtctgttatgcttggtgttaagttacctaagcttattacggactaatttatgggagccttcgggctccctttttgctataaactaaatatgtcaaacctcggggagtattcctcctcgagggatttaaacactttcttatcatatagattaacacattctatcccgtgcctgcgagctatatcaacagctactctcgtccctccagatacactcccgcatcttttctcaggcgcccaatataataccttatctacaggctcagtgcattctaggcccaatacctgcatagaattccgtgcgaataaagtctgcactatcttcgagcattcatcccagtacgacgtaacttctctcgccttaatgatgcttttgattttggcttcgtttgataattcagaccatacaacaacacctgtaccaggaacatggccacaaaagccagaataaggaataatcctacaagaatttgacctatcgtatttcgccaaccacgcttcatctgaacccggagctccacctgaatatgaaaaatgcccctcttccgagaggcgttgacctattgtagtcattagactcagaactctgcgtggcgcttctcgtgaaccaataagcgccaatctcattattctaaaacctcatgccatttgctacgaatagtgttttgaattaaagtagtcagttctttcttaactacagaaggattatcagcgaataacatatcgtgaccttcacgagctgcttcgttaatgatatctttcatagtcagtcccataacacgaccaaaatctttggcagttacagtaccaatatgagacagaacgttacttacacggttccaggttacatattcagaaaagatttccagaacacgcttatcagtatcagtgagttcaaccttagctttaataggcttatcagatttagctttctcgctgaacttagaattcttgcacttaatagctacgcgggtgccgttattaaagaatttaggattaaccggtttaagaacataaccttcagctacaccggtttcagaagaagcctgtggaccgaacacatgtttatttgcatgttcaaggtcagtcgtgtcaacaagttcattgtagtaattgacaatagatttaaagtcatttacatactgagatagctcggcaaatgaacctcgaccaagaagtggagccaatttaagaccaagaccagtagcaaacgattctactacataatcgtcccaataaactttttcgttaccggaatccgacaggatatcaaatacgtagaaatctttctcaccataatctacgcccttctgaataccaccgccagcaaattcaccgaagatttgaacagacactaaatccatggcgttcagcatattctgcatcttaacgaaagaatccttatacttcttcatgataatatcatgaccaaagaaactttcactttctaaaataggcccagtacgcttagccggaacgatttcggtaggagtaataatcacactaaagttagtgccatgaatcttctcacgagctacccactcaacggtatgcatatcaaaaccagcaccacgaattttctcgatgaacttaccgttgtaatggttctcgagactagaatattttgcaaacattataatttccttagaatgtgattttcataaagtcagtatcaccattacgctgggcactggtataatttgtaacaaatccttcatcatgcaaataattaagaacgtttgtgatatgtttcttaactaaactgctaggatacataattaactcacgttgacccgctaaagcggttttctcaatctgagttaatacttcttcttttgctgcactcaattcttctgtggctacgttaatagcagtattagccattctatctgcaaggttcataatttttctctcaataaataaaataaaaccaggagtctatcttggtcaaaatggtatcagaggatttcccctgagcccattataccacatcgatttttaaagcaattaatatccgcttggaacaaagcgatacatgatatatccgcttttagttagcatgatttcaaattgacttttgcttccaacctcaagtactaatggaatatctttatccatcagcatccaatcaatttttccataccgttcattaatcaaatccgttattttacgtgcaccacttttatagtagtaagaactctgaacagccatcattttactaacaaatttagatgcaaacaaccagacatttaccccattagcagctggcgtaaatttcttagaaagcatttcttcaaatcgttctactacaattgggtctactttaggcattttcataatgacctcatgtgtttaacaagtttcttatgacgagattttataccaacgtttgttaagcgtttccgatatacgactttttctttttgcttaaaccgttcgtgtgctttctcaactgagacccacaatttagcagcttccgctggagtgatatctaacgcccttgcaatttcttgaaaatcttttccgctttcatgcatcaagtgagcttgtaatgctttcataataacctcatctatgtgacgaggacataataaaccaatccgtgaatagcaaaaagggagcccgaaggctcccaaatattacggatagataatacctgcttcaagcgcagtacgatgaacaatgtatccatttctagattcttgtacatcgacttctggataatcatctagcattttagctagagtataccgatgcaggtaataatcactgtcagggtcgtcgagtttccaatctttgccctcaacagtcattcgctggatttcatccattacccaccatccacaccagatataggctgttccacggaacggtagaggatgaatatacggaagttctccgtctggctcaggggctacctttttagtaaaaacaacctcgacacctttagtagcagtagccgggttgtaatctgctgcagaaaccgtgacttcgcaatttaaagtataattagcctctgccgattcagttacggtaattgttttagcagtctgaccatcaataacgtcagcaccacgtttccaaacataagcaatgcttgctcctgacggggcaccagtaacatcagctgtgactacttgggattgaccaatttctttagaaacagaagttgggctcaaagttaaagtaatcgcaggcatagttttgttattaacggtcagagtagtttctgcttcagccgtttcaggatcgccttcagccggagtaacagtagcaactactttaacggtcttactacctgcaggtcctgccgcaacataattcatagctgcggtaacagaagattgttttacaccatttactgtccatacaaacgcttctgtgccttcagctgtggctccagaagttgttgcagtaaaattggttgttgctccaatgactgccgaagcagccaaaggagcaatagatacgctataagccatagatgttccttattttaaagttacaaatgaagaattacgtgtttcacgaatcataacagacccgtttcttttgatgtaatagattaaactaaacagtgtctggtgtgctgatgggtgttcaaacgacgttggccgagatttccagtccgggttatctttaatccattggtaaatccaccatggaagagtaatatatcctgggttcttacctagcaattgcatgtttggactaaagtttttaggaagctcaatggtttcatcagttttaacaattttaactactttgtccattgctttggagaattcttcagggtccgtagtactaattggaatgtttgtaagttttccttcatcatcgatatggataatgctatctccaataggagcttcagcataaaatcctttatcattgatagaaggagtttttacttcaaatccagggtcatttactttaggtgtttctttataaaaatctgggtcaatatcatgaattttaataccagcattaactggagcatcaaacagtagttttgcttcatcagacgcttcatcattgaaaagtgcttttccttcaatttcatcatctgcttggattaaatcagcaattgatagaccatcgttgtcttctggcataggctcatcggccaatttagccagttctttttccaaatcagcaaccatattgtcaaatgagcgggtcttcttcagtttaataccgaaggttttggcatattcgtcgagcttgtctttagcttcttttttatcgagtgcctgaatttctttaatatagtctttatctagcattgggtgtgcctcatgtaatgtataaatatgattgtatttataaactgaggatagtacagtgcacgacatccaagtcaaatttaaagattttagtcatgttcatattgagtgtgatgactcaattttctatgaactcagagactattttagcttcgaagccgatggatacagattcaacccgaaataccgctatggacattgggatggacgaattcgtctgctagattataatcgtctcttaccgtttggtcttgttggccaaatcagaaaattcgctgaccaattcggatataaggcttatttcgatccagctatattcgagcaagaaactctttcgcgggaggattttgataattggttatcaactaaagaaatttattcaggattaactaagattgaacctcactggtatcagaaagatgctgtatatgaaggtctagttaatcgacgtagaattcttaatcttccaacgtctgctggtaagtctcttatccaggcattacttgctcgatattatgtagaaaattacgaaggcaaggttcttatcatcgttcctaccacagcgttagttgaccagatgattgatgatttttgtgattatcgtttatttcctcgcaatgctatgctgggtattcgaggtggtactgctcgtgattcgaatgcattagtttatgtatctacctggcagaccgctgttaagcagcctaaagaatggttttctcaattcggcatgatgatgaatgatgaatgccatcttgcaacgggtaagtcaatttcaacaatcattgcgggtctcaccaattgcatgtttaagtacggactgtctggttctcttaaagacggcaaagctaatatcatgcaatatgttggtatgtttggtgaaatcttccgtccagtgtcaacttctaagttaatggaagacggacaagtaactgagcttaaaattaatacaatcttcttaagatatccagatgcagccgcaaatgctttaaaaggaaaaacgtatcaagaagaaattaaattcatcaccaatgttaagaaaagaaatcgttggattgctaatcttgctactaaacttgcagcgcgtgacgaaaatgcctttgtgatgtttaaacatgtagctcatggtaaagagctattcgagatgattaaagctgctggtcatgagcatgtctattatgtgtcaggcgaagttaataccgaaacacgtaatgctttaaaggctatggcagaaaacggaaagggaattattatcgtcgcaagttacggtgtattttctaccggtatttctgttaaaaacctgcatcatgtaattttagctcatcccgttaaatcgaagattatcgttctccaaacaattggtcgtgttcttcgtaaacacaaagataaatctttagctaccgtctgggatatttgcgacgacctgggtgtaaagccgaaatctgctaatgctaaaaagaaatatgttcatttgaattatgcactgaagcatgctctcgaacgcatccaaagatatgctgatgagaagtttaactatgttatgaagactgtaaatttatgaattacgaaaaacattattatactttgatcgagaggcgtaaagcctctccagctttaggatacactgaaacccaccatatcattccaaaatgtattggaggtactgatactcctgacaataaagtttctctattaccagaagaacatttcattgcgcataaattattagcaaaaatgtatccaaatagttatggattaattaaagcagtaatttgtatgggaatgtcttcaagaacacacaaaagaaactataataaaagctatgcctgggaacgcagacgtatggctgaattacaaagcggagaaggtaatccgttttatggaaaacatcataccgaagagcataaacttcatatatctaatattatgaaaggacgtaaaataacatggggagataaaattagcgatactaaacgtcgcaatccaactaagtggagcgacgaagctaaagcagctcactctataaatcagtccggtaaaaacaatggaatgtttggaagaaaccatagtgaagaaaccaaagcaaaaattcggttaaatagaaaagatacccagggtaaaaacaatccatcggctaagaaaatagtagtcgcaggtatagaatatgggtgcatgaaagatgcctctattgcaaccgggttatcaatgtataaattaagacaattgaggaacctatgattaaatttgaagatatttatgaagccacaattcgtgaggctactatcgataacttcatgagtaaaattaatgcttgccagaccttagatggtctggaagaactcgagaagtattacgataagcgctctaaagaaactactcttgctgattctgatgacatcattgtgcgggatgctttggcggggcgtagacaggctcttgaagccgattctgaagatgaagatgacgaagacttctaatacaaaaaagccccaaccgaaaggaaggggcaaagccaattggctacatcaacactagactaaattaaaagctgcgtttcttgcaattgctcttctgtgtcttcagtgacaggcaattcaatcgcataattatagcaagctccgggatgaaccgggcctttgtctgtttggacaaccaatgcttcatcgattggtcctttacagacgacacataccgtattcgacatgattgtctccttagtttacaagtttatttattacgcgccagcttcaaactgacgaaggtcaataatgtgcttaatgctaaaacctcgtgacttgatagcatccattgcatcgctacagaactccaaaagaattccccaatattgcaatttagtatctacacccaagatttctttatcagcgcttaaaacagttttcatttctgatttttcatatacatccatgcatacttcaccaccaacctctccacggccagtgtaataatccaatcgtgctttaagattttgctttttgagggcatctaatcttaacatctcttttcgacaagtcgagtgcttacgcacccatttaccatacagaacggggttattagccgcttcatactgtagtttagtctggtcgataatcaaatcattatccaattcatcctgtaattcttctaatctcattctatctccactctactgtttcttgggaaggactagtcccattatactctactgctagagttagcattactacgcatctgtatgcgtatacgttctagcgtatcagggtcgtctactatagaaaactgcacggtgacaattatagcgttatcgtcatataacggaagcacatcaactgatagacgattaatcctaggctcataattacgcacggcagagactatattacgctttatcgtatcaccagttaatggagtcatgttttcaaataattcgtttgtgatatcacagccaaacgctgggtcaaatggccgagacccctttctggtggttattattccaagaaggctatttttaaccgatcgtgctcctaccgtttttgacacatcagtatcccaagcaagtcgcatctctgggtcaaggtcagaatatagtttatcaatattgctcatgacataatcttaaagaattctttaagccccttaattacatgaatgtgagaaattccgcattcacaagtaatgggaactgctaattgaacctgcggcttcaatagcatatttttgatgttaactacatcttcggttgtaatagcagaatataaatcatcgatttctgcatcgtttaaatcattaaagtaaatctgctcatttccaaccacgatataatctatgcattttgatatcatcattggaatgtctgaatcgtcaaaaagattcggatacttaaactttatcttgaatccctttaagtcataccagaggtcttctggaggatcgatttgtgcatgtgtataatttaatggcacaggaattttacgcccacaggtgcaattccaggtcacctcatgattaacctcgcctatactatgagcccaaagtataactataagtaattccgattcttgtttgtttaacccagtagcattagtacattctctgagcaatgctttaacacattcatcgattgtaccgtttttcttcgctgcaattaaattagcgtattcttctagtgtaaaagctcggcactggatattcttgccatttattcttgtttcaaatttatatgtgatgttcatatccactcctcttattcaattatttataaatagtataaagaggattaccttatggccaacatagttagatgcgaattaccagatggtgtccaacgttttaaaccatttaccgtagaagattatagagaccttttattggttagaaacgacatgaacaccaagtctgaagaagaacaaaaacagcttatagcagaattaatggatgattattttcatgaccatcctgtcgagtatcgtccttatatatttcttaaagtatttttgtcaagtattggtaaaactaaaataccagtcagaatgaagtgcccaaaatgcggaaaatataagcagtatctttttaatcttaatcagcctccgttgacaaatccgaaagtagaggttgcaggattaacgcttaagttcaaaaaacctatagaaataattgatgatacaggtaaaatgattttagacaacattatatctgtgaaggattcatctggggaataccaatggaatgaattaagcgatagtaataaattgacagttatcgatgctatagatgttgaaaccttggaaaagattttatcgcagatgaagccgtttaattttgagctaaagacgtcatgctgtgataccacgacagtattaaaatatgataacattgttgatatctttaagctattgctacatcctgacgagattttcacattttaccaaattaaccatagattggtttctcaaggtaaatatgacttgaattctataatgaagatgctgcctattgagcgtggcataaccttatcgcttattgaaaaggaccttaaatcatgacaacacaaagattaggatatcctaatataagcataaaattatattctggatatgatgcatggctagctaatagatttgttgaattagctgctacatttattacattaacaatgagagattcattacgcgggactaatgagggtctgctccagttttatgactcaaaaaatatgcatacgcgtatgaatggcgatgaactagttcaaatatctgttgcaaacagtaacacatcgagaacacaaactcgaatttacggaattaaacactttacagtcggtgttgatgataaaggtgatagcattatcacccttcagcttggaacgctgcatgacataatgaatctcaagttcagcagagcgttttttagttctgcatatgaaactataaaagaaatgataggtgcaatgtatgttgaccaaccgttgattgctcctcctatcaacggaattaacgcttacgtcccacgagttccatggactagtactctcaaagattacttacgatacgttagaaacgtaggcatttctactgataacgaccaatttatttttgcctgggaagatatcactgggattaacatgatggattatgaatcaatgatatcccaggacccaaatgtattcatgtttggagctcctcaaacaataggtcagtttgctgcaggattaaaatatccattagcatgggattttgaatggcttgttaaatcaaatagatataatagaaatcccatgaaaaacgcaacattttatgcacactcgtttgtggacaaagatgttacccgaattattaatggagaaggccaaaacagcgtattcattaatagatcaggcggatattctgacatgatttttaggaatggctatgaagaagccttacgcatttctacgatggctcaatatgacgggtatgctcaaactaagtgttacggtaattttgaactaactccaggaatgaaaatcaactttgttgatttaaaggaccagttcagaactgacttttatatagatgaagttatccatgaaatatcaaataacacatctataactaacttatatatgttcacaaacggctctgcccttgaacctgtagatttgattaaggtgaaaaatgaacttaaacgtgattcttcctattaagaaaatagtaataaatgaaaagacgatatcaattccaaaacttggattaaagcaccataatctgatgaaagatgttaagggtccagatgaaaacatgaatcttcttttggattcaatttgtccaggattaacagcagccgaatccgatatcgttgtactacatttattagcatttaacaaccgaataaaagaaacagttgttaaagatgattttacctacgatttgaataaagtttacatttgccaacgattaactcaacggctagatggtaaagaattcaaattcagagctcctcctcgttattccaaactaggttcagtagattcaattttgagcgaatttcttgaatcagtagatggaaaaccaatggatataaactttatgaagcttccagcttttgtaacaaagtgggctgatgacttagtaaacactatagccattgatggacctgaaggaccaatcaaaggcatgcttaacgtaatggaaatatttgaatgactaagaaatcagaaatgaattcaatgcgtagaagagttattgctgactcggctccacagaaaaaggctgagtctcaagctgatgctcagattaatacgctagaagatattggtcgtcgcttagacgaccaacaagcatctactgatttaatttcggatgtaatagaaactaaatcaaacgaaattatcaaatcagtagaagatgtttcagctggtgttgaattaactgccgaagcttcagaacgcacaacagatgctgtctcgaaattaaatgatactgcatcattaattaatgataaactcacgaagcttgctgacttgttatctaaaaagcatgatgttcaacaagatgtccaaaaaactggtactggaacatcgttagaaacaataacggaacaagtacctgatgctccggttcagcagccgctagaggaattactcgaaaggcttattcctccacaggatgatagacgtcctgacgcggatttctttcctagcacagaagagcaagaggaaagaaaagaacctaacaaagaaactgaggataagaataaaaagtttcttggcctaaaatttggagaattaattaaaagcgttaaatctggttttggaaaaactatttcattaacagataagattagcagcatgctatttagctatactgttagcgctttggctcaaatggcgaaaactgccgcgatggttttgggcgtgataatgcttatagatttaattaaagttcattttaattattggactaaactgttcgaaaagaactttgttgaatttaacaagcaagccaaagaatggggtccgctattaacagcaataagcgagatgtcgaatgaaatagtaaaatcattcgtcaaaggagattggggtggattagctaaagccataggttctggattggttgatgtaattgacaagctcggagaaactattatgctcggaatgagtaagcttcttgctggaatgttacgcgcattaggattcaatgattcggccgataacattgaaggcgctgctttagacagatttcaaactgttactggagcagaactcgatgaagaagatgctaaaatgagagcaaaatatgttgaccgccaggaaagagaatacgacgaacaacctgaatggaaaagaaagctttctgctaagttccaaaaattcaccggtcagattgatgacgatgaatataacaaactgctaagcggagagaaaaagcagtcagcgtatgcagacttgccagaagacgaacgcctcaaaatcatcacagctcgtaataatgctgaagcagaactcaagcgaacaaaagcgtacgttgaaaaaactgacgcatctgattccactcgattagactctgctaaggatgcagtacaaagcacaaccaccagatataaagaattggagaaattatctccagaggttgcaaaagacttaaaggttgaattagaccaattgcaaaaactccttgattctaaaatatcagaacccgctccaactgccgaagctatacctgcaacagaacaacttgaggttaaacagtctgcttctattaaagccgctgcggatagtcgtgaagctgctcgtacacgtgaatctaatacacagtcgcaacctattcaggttaataccgctgtaaataagaatagcacatacgtttatagaacgcctccacagacttcaacagctgctcctggaatgcaaggcgctatgaaaacctcttaaggaaaaacaatgatttttgaagaactggccgatggccttgaaaacatcaaaaaatcaggaactcgaatttcccaaggtaaatctaaactgacgaatgcgccaaccactaaggtggcgcagttcccagctgaacgttcagctgggaatgattccgcccaagatatgagagtacatgacttatatcgcaacgggttattattcacagcatatgattttaaaggaagaaccactcctgatttgcgttcatttagacgagatgtaatgttatcgtctgtattcgattcaccaatgtcagcaatggctaattcatcaagttctactacaagtactgcgccggtagctaatattctattaccacggtctaagtcagacgttgactcggttagccataaatttaatgatgttggggattctcttgttacgcgcggcagcggtactgctaccggtgtattaagcaacgtggcttctactgcggtgtttgggtcgatagaatctttaacacagggattaatggccgataatggtgagcaaatttataacactgcccgtagtatgtatgccgggcctgataatagaacgaaagtgtttacttgggatttaactcctaggtctgcagatgaccttatacaaattattcgcatctatgaaatttttaactactattcttacggtgtgactggaaattcatcatacgcaaaagaagttaaagctgctattgatgaatggtataaaggaactcttaaatccgcagctccagatggggctaaagtagaaaacacagtgtttgagcaaataacatcgtttttaagtaatgttattgtagtttctaacccaactatttggactgttcgcaattttggatattctacatcaatggatggtagagaggatatatttggtccatgtcaaattcagagtatccgttttgataaaacgccgaacggacatttcaatggtttagcaattgctcctaaccttccaagcacatttacgcttgaaattactatgcgtgaaatacttactcttaatagaggaaacgtttatatcggaggtattgaataatgtttactctcgaagaatttaagagtcaagctgctgatatcgatttccagagaactaacatgttctctgttgtattcgctactgtaccctctagtaaaacccaggctcttctaaacgactttggtggagagctgtataataatatgggtttagatggaaattggcttggattgacaccaggtgaattcaatcagggtataacaactatagtgacacaaggaactcggcaagttgttcgtaaatcaggtgtgaatacatttatgattggcgcaatgactcaacgtgtggtgcagtcattattaggagaatttacggtaggtacttatctgctcgatttctttaatatggcatttccaacagcaggattgatggtttattctgctaaaataccagagaatagattatcatatgaaatggataagttccataacgctcctaatataaaaatcacaggaagagatatggaaccgctggttctttcatttaggatggacccagaagcaagcaactaccgggcaatgcaagattgggtaaatgctgttgaagacccagtgactggtctgcgaggattgccacaagacgtagaatgtgatatccaagttaaccttcatgctagaaatggattacctcatactgtatgcttgttctcaggggctatgcctgtagcgtgtggagctcccgaatttacatatgatggagaaaacacgatagcagtgtttgatgtcacgtttgcttaccgtagcatgcaaaccggttcggttggaaaacaagccgctatggattggttggaagataaggctattcagaaaattgagacgattaatccaaatcagggcttgagtgcgtctgcttcaagattgtctcgtttaggtggggctggtggtggaatttctaatatcactactacgacaagtagaataatttaggggccttacggcccctttgttttatgcaatgcagccaataaaccctggctcagtacgaagaagtttcatttcgtttgtggtccaaactactttgaccggaataataccttctgctttaccgtttagaaccgcttcaacaaacgatggttcagttggcttacggaagatatcttgaataagaaccgtcggagtaccttcgttaaacccttcaagcatgataagaacttcttcattgaacttctctgcatctttaacatcagcagaccattcaataccgttaaagcggaatacatgtttcatatcaatttcctcattggtttgtgtaagtctatagtatcacgtccttgtgataagtaaacaactttatgcaagtttttctgggataccatccaggttgatagcaccagccagtagctccatggtacgtgtgtagctaaccttatctgtagaacggtctggagagaaataaatctcgtttaaaaagcctttgaacttgctttcttcaagaggttccactttgccttgttccatcaagatgtcaccatcatagagatgaaccgattcatcgatttgctctggcggaactaccgtcatttctaccatgaatgtcttgttattcgctacaccaattccatttctaaaaggagttccccatactttgttgactttcattgccaacccgcgaggaagaataacttcagcctcatcgctaaagctcgacaagacacctgggataactaccttaactttatcagccccatgaataatgaacccaaacttaaactcatcaccataggcaacttcctcgcctctatcaactctttccaagttgtctgttccaataacagaagataccgcatcgatagttgtttctttgttttctaaatcagagctaggagcatctggcattaatgaatcaccagcatttgaataagcaccaaagataattggacttaacgaagtagaaacatagttctggaaataaaacattttagactcaatgttatctttaaactcttcgtattttccgcgctgaccacgatacaaaagagtgcccggttcaagacgcaaacctttttcaaaggcagaatcaagcggacgaattttcttgtcaataatcggatcgcctaagctttccataccaataagataattattaacaaatgaataaccagaaccgcagtaatggtgtattgcatctctttcttcttcgcttaaacgagattgcatttcacggttatattcaattgctttggatatagaatcgccaacaattgacacataagcggatatcatataattgacaagattttggtattgacgtaaagctccgaaatcgtcagctggaggcatatcaaatccacgagtagctacttcaacgattttacgcattgtttccatagatgcaggatttttagcttgagcaataacgtcagcaacgtctgaaattcgttgctcagcgattttcattttgtctgaacctgaaggaatgaaaaccttccagtcgtcatgcattctcgacatttggcctacaaataatctctcaactgcatcgccaaaattacttccatatccgccacgaacacgatagtgcttgatatcatcaacataaaaaggaattgatttttctaacccggatttaatatccttttggaggtctactgtatcgccttctgcgttcagtactggagtgttagtagttaattcgtaccagcgttcacgcttattttctggccaatcttcatcaacatatgaaacaaatttgccgtactgtgctcggattaaatcttttcgagacactttcattttactcattacagcgagttcagatttcttgtcttctttttcgccaatggaattagccaatgcttcggctttggtaacgttttcgccggtttctttagacacataaacttcgcctactttgcaatctactttggtgtaaagttcttctgaaatttcaggaattccttcaatctcttcaagtttcttacctttacgaaccataatagaataagcatacttacctttgtagtaagccatatctttcattagattgaaacgaccgccggtgcgagtagtaatcaaccgagcaagaatacgctggatagctttatcttgtccttgcattttctttggattaaagcggaacattactgcatcggctttaatttgtttaactactttgttaaccgtttcaaagatggtattgatagcaccaatcgggtcttggcctaaaccgcctttaagcgcaccgatgttacctttttcggatacagagaaaacatagacctggatgaatttatcacccatcttgatgttcttaactgcatcaccttgacctgacccttgtactaaccgaatcattaaattgttattacccggcaccttaatcaaaaagacctgtggtaccttaagttttggcttaacgttctcgacaggatagattttactattctcttcatcgaaaacttcatttaaaagttccatgacatatcctcgtttgtttattctatttatacgaaaaaaggcccgaaggccttaattaattattgttactgtacgccaaacctgtagtccatttactgattcatactcttcaatgttttctttgaagtttcttaatgtgttaatgttattaaactcaagaacttctgtgtgaacagaaataccaccacgtccgtcagaagatttagcaatcacttcgtataaaactttcattttattcctgttgcctcagtaaagttaacaccaaacgcggcttcgaatgtattagccacttctttatcatatctacgctgtttaatgataggtaagaataaccctactgtaccatcatcacggccttcagcagttacccaaccattgcattcaagttcccagatagttcctggaagagaatctctgtttttccatagatgagtacgatcaagttcatgtaattcttcaggtttatctttaagaccagagcctgcattaactcgaatacgaccacattctgatactaacattaacccacccattttaccgggttgtttcctatgctcatatgaaccaacacacttcaaatcgacagtgataacctctttaaatttaacgaggttcttagaacgcttatcttcccaataagcaccgatatttttaaggatgataccttcgagaccttggtctacgtatgtcttatagatagcacgagcttcatggatgttgtgtacgacgtgattttcaattagaataatcttgtcatagcctttgctcatcatttccaacgcacggaaacgtacatcataagcaaatccaggaactttaccttcagaatatactacatcaagcggaacataatcccaaacttggaatctcataccttccgcttcttcagcagagattgttcctttgattgccttattagccaatccgtttgattccgtgcgagccgtctgttggaattccttagctttacttagctcaggaagctcaggctctttaaacatatcaaacaggtcgttttcttcttctttcacttcgacatgatataccaactcgccatcaatcatcacaccattaggatggcgttcgcgggcttctttggtcatctcgataagttggcgcttgagtttatctagacctaggtattcattaccagaacgagtaagaagagttacatcatctaattcatctccgcggatttcagcgaagcatcgggctccatcagctttaagttgtgcgaatgcagggaacttaatatatgacagtgctttctcagaataggctgacgccaacatctgtggcatctcaggaattaatttcttccataccttattagcaatagaacctgaagcgccgcaacgcatatccttaagaagtacacggaccagtacactagcatcaccctcgttcatcttagagagcaaatctactagcccctggattgccatattacccgtaagtactcgtgctgccagaatgtcttggaggtaatctagaccatcagaaaacgtctttgaaggaacatttggatatttaacgggagtatattctggaactttcttaataaagaatttaaaccgcccggaatacgccagcagataagctcgttttaaatcaacgttatctttattgtcaacgagaatttgggttttggctttagaacccttagcatcttcaattgctttgatgatatcaaaaatcattattcacctaattcttttgaaagttcgcttacgctacgatgataagttaatccatcgatataaacaaacccgttattgatgcattcattccaaatcgggcacgactttgcttcacgccaaattggattccaacgataaaactgattaacatgaccataatcacatgataaccagcgtttacccaccttagtatgaactacaaacatatttcctcctagggtatggctattataccatacccatattgttagcaattaatttggttgttatcacatgtaatacgaccgttattccaccagtcgtttccaggaggaacatgcgaaccaggtctaaacggaatgataggttgtttccaccaatctcctggaacttgtcgtggaggccaattaaaaggatgttgctctttacgaatttggtctttgatagcttcttcccacaatccagaaagagacttctgaggtttcttaacagattccaaagattccaggcaagttacaatttgatgccaatcttcaaccataattccaggagcagtcactgaaccttctcgctcgccgcgaggcatatagaacacacgagtttcagtgtcttcaaatactttgctggccgcagcaatatgtttaggcaaatcatctacataacatacgatgcgatcgccgtattttactttagccttttccagtaaagcatctttagattcatcataatcacagaccatgatttctgtaaatgcatcagggaacaaagcattcagattgaaacggcgattaaggttagcatctactgagttgccaagagccgtgatagcgacaaaatcgtatttttctttgagcttattaactgtagctaaagcatcagcatacggtgcaaggtagcgaataaaatcactattgttatacttcagaagcagcttaacagccaattcttcttcacagtcaaacagctcagcgggtttaatgaatttttcagtagtcatcatatcaaggatatgctctacaggaaggttatatttttgggcaaagtaaggcagaccactttgccacttaacgatgattccatcaacatcggttgcgattacaggttttgacattcggggaaattcctcaatgcttgtttaaatttggcgacgctatttgcggcaccggtgaaattgaaccagattaaccctggagcgtccgagggttctatatcaattaattctatattataatactcagcagtctttagcatttccctggtgatacgtcgggcaaccatatgaccgaagtgaggattaatagacatcgtcgttagcagcccttaactgagtaattggataaagctcagattctgcatggattgaacgattgccatcaacccaattaacttcataccaaggttcaaccaagtaggctttaattgctggagccgtatcacatacaactccaggaattccatttgctaatcttactgtactgaagatatgatatttcatgcatcaagcctcactgcccattcaggcaattcaaagaaatccggagcatcaatttcatactcaacggtgtgttgtttaacatcagctgacatgatatcaaccattgggtggtttttcaaactgcaagaaaaaataccagctttaggtttaggcacggatacaatcatgttgatttcctcaaaatttagttatgaatttttctttcggcattttagcatttgagccatcaccgtcagaatacccaattggcatagttgcattaatgaattcaattttagcatttataacattaatgctcagagaatctacgccatcaaccatgcgaaattcaggagggcaatacttatcaatgtatgctttcacgccatttttattagcaggtgtaccatcgcgagtatcgctgataatggtttcaacttttttctttcgtgaatcatagaaagctgatacaatcatttcaatttcctcttaaaatggacgaatattaacgtgaaccacagggacagcaaaaggttgcatgattacaacttttgtgtctttagttgcattcaggcgttgtacttttgcaagattaacagcttcttcctttgttaatccgccattgtaggtatcatttcctttatttgatgtccaaacgccccaatcattgcttctatcatcggtcttcggttcaggttcaggttctttgtagacggtttcttcaaaataatgctgaaactcttgattagtaagaatacaccacatgtgagaaaagcgaacttcatctacactaacgcgtttgtattctccatctggcttaatgatttcaaattcaactaatccggtattttccgcatatttaaaggttctggtaattttaatcggattattaccgatttgctcaaaaacacccttgataagagcgcctggagacaagattggagtctttttaagcttatagaatttacctttttccattatcatttcctcaatagtggggccgaagccccgagttagttaaaacttgatttcgtttgaaacgatatcccagattgcttcacgttgttcttcggttgttttacgaccgaggatgtggcgcagataaattttaacaagcagctgacgatttgtgttccaagacggatgtgaagataaatcacgtttacgaacttcatcatggaatccaactttgatttcagaaccgttgaactgaatatccagagtaggaccattttcaaagctgaagaatacgtagttatcttcccagtacatatcgatttgagctactgtaccgttgttgtgttcccaaagcaaagtagtagaaacatcccaagcattgttctgtacgtatttgcggttgaagttagtgaagttcatttttattctccgttgtatctgtttgggtggtacaggtctatagtaaccttgttgaacctagaagtaaacaacttttttcattctgcggaaaataaaaaagggactcccgaaggagtccctgaacttatgctttcggcttaccaaaacgagaagcatcatcgcgaagaaccgcacgagctcgacgcatgattttctcaaccgtctgattgatacgcttgttcgacccacgcttgtagccagcgcgtttagaggtaccaacaacttcttttactgcagtttttgctttagcttgtttagccattttatcatcttccattttggagaaatacatgggagcacgttcttccgaggttcaacttctttcgacagttctttcggttgtagctcccgcaagcccctaagggtacgattaaactcttatctgttgcacaccgttagcttaaaggttccgggtctgatttctcagggataagatatacaccgatggatgtataggccttgaggcgtactcccgattggccatcgcctcggggtagcatgcacttgccgtttatttctagctgcactttggtagcaaatcaccgttggtttcggatgttttacgtggggataaccaacaacgtccacatcatacgttacccatgcgtacacatggtgggcgtacaaattacttcagcgttaccacaaagtggcgaacagctttgcgagcagcagaaccaagatgcttagcatacttcagttcgtccatcgcttctaaagtatcacgaaattcagcttgagctgggttcagatgtttaaaacctttcagaacttccagtgcttctgcatagatatcgattgaagcaccgtagttttcgtgaccggaattccatgcattacgttggagttccagggctttagtaagttgtttgttcattgaaacattcctcaaatgaggttaaaatttggtggacggtaaccgaggtttagctcgggcatccaccgcgtagaattgctcgggtaactaattgtccgacgcccaattcatattattatttatatacgcacgccagggacttataatgacaagtcacaaacttctgccggatttctttaggtttcttcacacctgctgctactaacggatgaggtacatttctgatattaccaacaggcagtggagtcaaatcgcctacctcaacaaatcctttcggtacatcatcaccgatagaatagatttcacacatatccggcagttgtccttgttcttcttttccaagaataataccggaaggagaaacaatttcatcaccttgctgtgcaggttcagatacgagaattacatactcgcctagagctttaattggaagttccatgtgttacctttattgtttgaccatgtagttatattaacatggtcagtttaaagcaaattacttaccgatcatctgcagcagatgctcaactttcataccatttaccgagatcagtttatcaaaggcaaatgagcgccaaccttctttctcggtatcatatactggaagtgaagtagtgctttctgctcgagcagatttagtagtgctttctaccaaatcagatggaataacatctttatcacgagtacagcgcagagtacgaatagtgccatcagctttttcaaacacaatctgggattcgcccatgctcagcacagccttcagagtttcacgaatatggatgttttgttcagtagtcagtttcattttgatgtctctttaatagttttgataattacagatttgcgcttggataattcttttaataatcgaactgcttgatcttcaaatttaaatgttgctaatggtttccatttaaaccaataccggcgttctactgagtatgatataacaacatcaccgcttaggttaagtttattaatttcaacaattctaagtttcattattcaattccacagaattctttaatgttataccaattcaacttatccaaattacgttttggaacattgaacacctcgattccagcagaacgaagaatatcgtcccaaccgggttcgttcttgtcgtatgtttcgcagtatactaattttttaataccagactgagcgatggcttttgcacaatctggacatggagacagtgtgacatacattgttgctccatcaatactactgccgttccgggcagcaaaaagaatagcattaagctcagcatggatttcattgactttagaccatgcagagtgggctgctcgatgttctttgagcaatccgacttttttgacttggaatccgtcttgacgcaatcctgtagatttgtaaggaatttcaccaatccaaccttgttctgctgcatggtcacaacagttcacaccaccagaaggtgaaccgttatagccagtagaaataattcgtccgttcttttcaattactgcgccgactttccacgagcagcattttgactcttgagatacgagatacgcaatttgtagtaccgtcgacgctttcatttaaatcaccagataagttgtgttatttgttttaaccaattttaactcgtcggtaggagaagcaaaactctctactcgagaagtacgaatgcctgtaccatctggaaacggatgatttcctcgttcaataacatcggaaaagacatagccataaagaggctggccttccttaacatcaacgttactgtacaaaatagcatcatattcttcgcgcggaattgaccaaacgccttggtcagaaccaataacagcattaattagacgaataccattttgactaatttctgctttaatgccacgagcatgttcaactaaaagagcttctacagcctcacgtaaagtcattagatatgtcctaaaatgttagtcatttcaacttggcctgttccggttaaagccaattgagtgtgttgattgctctttccattattaactgtaatgatataagcatcaacacagttaaaggatgactctcgtcggagagtcactttacttccaggaacccggtttgctacttcctgtgcgaagattttaaccttcgaaataaattcatcgtgtgaaaatttagcatcagacaacataagtcatgacctgttgggtttcaaaattagcaataattccaacgataaaccaatcgtgttcaccttcgccacaagaaattttaacttcagatgaaccgcctgacctgtcaatagaaaatttaataacttcgccgtttggaataagtgcattcatggcagataaaaactctgcgtgcattttggctacttcagccggagtaaactcatctgttaaatgattagcaacaacttgcgtaaatgatacttttactacttcggaatactttggaaacattatactttcctctaaaaatcaccgtgggctacttgccagcattcaacaccaatacgacgccacatttcaactacctgcgccctgtcatctactgcaagttttacattataacgatcagcaattcggtcccagaagatttcttcttttaccacatcgtctttgcgtgaatcgccttgcttacgttggaagtgttcgcctgtttcgccaacatggtccaacaaccatttcttcgtaatgcgttgataaacagtagggtcttctttagtaccagactctctgccggaaacagtaagaattttatatcctttgttacgaagcattttaagaaattcaattaccatttcctttggatggtctttaccacatttggccaagtcataaggagaacgatgattgttatctgctaacgtgccgtcaaggtcaaagataactgcttttggcaatgattcgtctggaatgtacaaatcatatgggtgcatcttagaataaaagctacgaagcacttcaataggaactgcattcgcgccacgatagaggttacgattaagcaattcagtccaaggaacgtcaaagcgtttaatttcccacttgacaccatcaatttcatatgccaactcttgccacttcttgatagtcgttggattaaggttagtatcagcaatgatgacacctttagtggtttccatctcgagtagagtcttcgccatagaaaactgacatacagatactgacttttcacgaagcttagaatatttgtaatcattacgtttatcaaggccaaagatgccttcacgcaaatcatcacgagacaaaacataccaacctggattagatgctacatattcattagcccaggttgttttgccagagcctggagctccttgtgtcaaaaccaattttttcattatacatccttaagattgtcaataaaatcatgaagagccttagacttttcaccccaattagcacgatatttttctttaattgctcgcaatggcttattcattgacagtatatcatttttgtcataattttcagctgcgcgtccaaacacgatgcacgccaattcattttcagcaattaaccctttaagtgtttcatactgttctcggttcattataataccattttagaaagattgcgatgcgccaatgagcgacgctttccatgtttcttcaaaaaattgttaacttcatcttgctctacaccgccactttctacaaattggagtgccttaccaaattcaattgaggcatcttccaattcagaaattgcttccttcagtgcctctttacgctgaacaaactccaaaaaatcgggatacataaattctgccatgaatagtttaaaccacacatcaaacgaaattcgtgtttggtcattaagctcaaacactctttcttttaaagcgccaggtacactaacacggactgtataaacatatccattagaaatattttctggtacagcaatagctttcttaacaagaggagttaactgacacgacccaacagctagcatattcctaagttgtgtctttttaatcgataaaagatgtgatgcgtcttttacgaagtaagaatgaaggtgtgaaggttccataatattttcctcttatttagtttacttaacgcaacgaggttctttaaggtcagaacgataataacatatcattccattagcatctttagtataacgtaaaatgtcattcatccagatgcgatactcttgagactcttcaaacggcataccaacccaggctttaccgtcaattacttttacttcccaatgtccttcccatttttgaattgggtctggccaatcaggatgcaaaaccgggacatccggtgtactagaagaacatccaacaagtaggctgataatacccatggctaatagacttcgtttcatctggtagcctcctggatatcttctgcaaacttattgaagcttgcattaatctgtttttcaactaacccaggtttagctgcaactacatttccacgcttagaatctttattcattttagcgttggaagtatcacgcgccgctcgattttcctgatagcctttatatgttgtctgcagattttttatagaaacaccgatattttctatttcttttgcttggcgatcagattcgtcttggacgactttgaggtcagctttaagattttctacccgccacgaaagatatttcaatccggcggcggataatgctaacactccaatcatcaaccaagttgtgtttattttgagcatagtttaaggataacctctacgatatcatcacgggataatcccgaaatgaggatgtgacgatcagaactttccgaaggagaacacttgaagcaagcttctacatattctgccatctcagaataattcagctcgcgatgcataatgccaagacgatgcttgccataaatcgggtcaacgattacatagcatttgcatccgttagcatgaacgtttggctgggtgatgttcttgaacacctctgcaccatacttcgcgagatgattatctaggaaatcaatcatttcatctacggcttcaggaagttcttcggcacgctgctcgttcacacgattagtgtactctttttgcttcttacgagcagcttccttgcgcgccatgtgcgtccgtaggtcagtgacaaatcccactttcttggtaccattccacacaaaaattccatcagaatgagtaccatatttgttaacaaccatatctaaagtaattgcttgcatatccatttcaatatcctcatcagtttgtgtaagtttatagtatcacactctgacgaggatgtaaacaactattcttcagaaatttcaatttctttttcgtactcttttggaacatatcctgcccagtacttcaagaacaccctttcgaggtctttaagcagtttatctacatctacagttccttcgtacatgttcatgataacaccaaacaaatggcgctgattaaccgtggctttctgcgcagcaatagcataatctttacgagcacgacctctgtattcatcgtagaacgactgacatagctcaagtgactttccgaggtaatctagataagcttgttcaaacgcagaaattttcttaattgcgtattcatctccagcaaaaagagaacgcaagtcatcagagtttgcagatacaacagacgcaaacaatctttcatttgacgttattgagtctttagtgtgatgaagagcagagtaccattcggttttaaccttaaatctctgcccagtgtttagaactgcaatgtacccttctacgccttcaagttcacgaacaccttcaacccaagtggtggggtcagaaattccgtaagcactgattaaataaggacgaattttagcattagcgtacaaatcatcatacttaacatactcgccggttgcgttatcacggacgtttaacacaaacaactgtggctcctgatatgctaaaacaacacgattattaggtgaaacaaattccatgtttaccgtataaccatctagcgctagctcaagaataacctgatgaagcgaagaatattcttcgctgttaagcaaagctgaagcctgtcttgcctggtcactgtagagagatgtttttgacttaaggtatagatacccatcatcgacataagatgatactagagagccatcagccttatccataatgtattctacatcgctaatatcaattcccatcgttagtgggttttcattcaaattgaagaatttttccatcggacgcgaagcaattcgaattggggtatcgccatccatctcaaacatgataccgcggcactcaagagcatcgggttttaaccactcactgtagcttgcgtagtgatatgaaaacactctgaacttgccatccataggaccagtaaaatctttataaaagaattttgcaacttctgagctttcacacagattcattaaatttttatatagctctaacatttctttaccttatgttgtgtgttccatggaggattgaacttcttaatcagaagtggttcttccaagtccatagtggatattgacatctcgccaagttcattattaatcgaaagattaaaacactgacgagcatagaactctacttttttgccagccattagtgcttcaaaaatcttggcagatttagctgaatcagaggtttggtctttccgattaatagcagttctataataatttatacgtttacgaagatttttagtcttaccaatgtaaactagttcatcatcaactgcgatggcataaactacattcaacttgtttgctatcagaattggtttgatggtaaaatctggttctaactcaagttgaacatattttataaaagaaaactcgttagcaatatcattcataataaagaggggccgaagcccctttccttataagtactttttaaatccaattagaacatcatcagtgacatcattgtcaatctgagctaccagataagaacttatctcaacttcctgaggagcagattggactgcgtcagagttaagatattcgcgaatccaaggaataggatgtcgagttggtgcatcagtaatcggacaaggaagaccacaactacgcatacgagatacagtcagatagtcaatgaagtcatgaagaattttaacgttcagacccggaagaccaccattacggaaaagatgaatagcccagtctttttcttggcggttaacttccatgaagatttcaattgcttcttgttcacactctttagcaatctcaacccattcttcgccatcagtgccagtttgaagttgacgcagaatgtactgtgtgcccttcaaatgaagttgttcatcacgagcaatgaacttcatgattttagcattaccttccatgatttccatatttttatggaagttgaaggtacatgcaaatgatacataaaagcgaatagcttctaatgcgttaataacatgtaagcaaagataaagagatttcattaaatcacgtttagcttctttaatttcgatattatcttgattaaagcagcgatttttggcattttcccatgcgcgagtcttcgctataacatcatcatagtaaacaccaattgactcagcgcgtttcatgattgcttcgtcaagaacgatttcatcaaaaattttagctgggtctacatacaggttacgcatgatatgcgtgtacgaacggctgtgaatagtttcactgaacgtccaagtctggttccaagtatctaggcttgggtcagaaataagtgcagataaaactgctgctggagctcgtccttgaattgaatcaagaagagattggtacttcaagttatcagtaaagatattacgctgatgttctgggagtttttcaaactgaccacggtccatcataacgttaacttcttcaggacgccaaaagaaactcaactgtttttcaatgagttcctcgaatactttatgacgctgaatatcatagcgtgcaattcctagaccagaaccaaagaacatcggctcggtcatgatatctacttgcttggtattaaaaactgtactcattctatttcctattctgtggtgttaaccatccgtggtctaattataattcccttttattaaagcttacaggccgcgcagtcagcagagtcttgaatcatatcatcgttaccggaaccatcacgggtgttatgatagtaaagagtcttaccaccaaagtaccagaaataaagcaagtcgtccatcattaccgacatttcaactttgcctttcgggaaattcgccgggtcgtaataagtattagcagagatgctttggtcaacaaatttctgcataatcagaacttggttcagataaggcttattaccctgtttagcgagctgccaggcgtaatcataaagggaagcattgtgttcaacgtttggaacgacttggttgaagcttccttcttttgattctttaactgacactggtccacgtggtggttcaataccgttggtagagtttgatacctggctagacgattcgcatggcataagcgcagataacgttgaatttcggataccgtatcgcttgaggtcttctcgcaggagttcccagtcacagacatagtttggagctgcgagttggtcaattctttcattgtaccaatcaataggcagttcaccacgtccgtatcgtgtttctttgtaaagcgtgcatggacctttttcgctagcaagtttaacagaggctttgatgagtgcatattgaatacgttccatcatttcatgggtaatatcattagcatctgcgtatgaagcaaagttgcttgctaaccaagctgcatagttagtaatgccaacacctaatgctcggcggtctttagcttttaacgctttgtctactggatagtcttggtaatccaaaaggttatccaaagctcttaccattacttctgcgatttcgttaacttcttcttggtcttgccagttgaagttgtcgagtacgaatgctgcgagtgtacacagcgcgatttcgccatcttcttggccaacatccgaagttggtaacgcaatttcgaggcagaggtttgattgcttaaccgtagccacatcacgaataaaaggaccatattcaccaacgttatctaccatgtacgggtaaattcgagcagtaccagcacgttcagtaaggaacaactcaaacagttcacgagctttaatacgtttctttcttatatctgggttcttttccagttcttcatataatgtacggaacgcttgagcgtcacggaagtattctgtgtacaaagtaccaagacacacatcgggactaaacagagtgatgtaatcattcttaatcaaacgttcaatcatcaggttattaatctgaacaccataatctaaatgacgaatacggttttcatctacacctttgttgttcttaagtacgaggaggttttcaacttccaagtgccagattggatagtacagtgtcgccgcgccaccacggactccaccttgggagcaagatttaactgctgtttggaagtgtttccagaaaggaataactccagtatgtttgacttcaccgaatccaatttttgaaccctctgcgcgaatcattccagcattaataccaatacctgcacgcttactgatgtattttgtaattgatgcagcagcttcgttaattgaattaagactatcaccgccttcaataaccacgcatgaactaaactgacgggtaggagtacgaacaccagacataataggagttggcaacgaaattttcttagtagaaactgcgtcatagaaacgaataacgtttgctaaacgattttcgccatcatcttgatgcaggcacataccgatcagcataaaggcaaactgtggagtttcatacaattcaccagtgtgacggtcttttacgagatatttctcgattaactgcatcgttcccgcataagtcatagtgaaatcacgctcgtgcttaatgtaagaatcaagcaaagtaatttcttccgcagaccacttactcagaatttctttatcatacttatttgcattaacacaccgggaaatgtggtcaataaaggcaggtggttcaaactgtccataaacacgtttacggatttcaaacatcgctgcattggatgctacatattgataatccggttcatcaatagaaatgctattcgccgctaccttaacgatagtcttttggatatctgcagtgctcataccatcacgcagatgggatttaataatttcatacagctcgtatgggtctactttagttccttcgcatgcccattcgaggactttaatgattttctgcatgtcaaattcttgactaacacctgagctcttaattacttgcataagtcctctaattcaaatgtatctttaaaaagtttattcactacaagagctattatatcaccatggcaaggaagcggtttgcaggtgcatcctaatctcattcctcttaaagtttctaagtgctctcgctttatttctccgttccgaatcttagcaataaaatcgtccttaaatgccgcaatagcatcaggacgattatcgcaatctttgccgacgtaatttccccacattgttccgcgttggatatttacatcgaagtcggaatggtatttattaaccacccgacatatcttcatgttatatcaacttcaaaccaacagattaattgtgttttgcctatagaccattcatatgatttaacaatagacagaaccctttgttcgatcccgtcaaaaactatcttgtcattaacttcaggcaaatcgctagagaatgcatcacacatctcgcctaatattgtttgtcctttacgaataaatcgaatattcatacagccattttccccttaattgttgggtgagattcatatccaactaattcaaagtggtgtggacgtgcaaactgctctaaccaacgaacctgagaaccagtctgccatgtttcatacgtatccggaaatgctattttaagttcgcataactctttaggttctcggcggagaatttctttgcattgctcaatgtgattcatgtaaatgtgagtattaccaccagtgaataccaaatgaccaggtttaagattggtcattttagcaataacatgaatcaatgcagcatacgaagcaatgttaaatggaagacccaagaacacatcaacagaacgctgataccactgaaggtctaaatatccattgcgaacgttgaactgatacatcatatgacacggtggcaatgccatccggtttaaatcaactgggttccaagcagtcacaatctgacggcgatcagttggcaattgcttaatacggtcaataaccaatttcaattggtcaacacccatgaaatcacgccactgtttgccgtacaccggacctagttcaccaccagaatatcccatgtcttttgcctggttttcatagttgtcgtcccagacagttttaccttctagtaatgaaccatgctgaataagacgcaattcatggacattagtagacccacgcaagaaccaaatcagctctgcaatgcatgctttccatgcaagacgcttagtagttacagcaggaaatcctttttgtaaatcaaaccgaagctgggtaccaaactttgcgatagtaccggtaccagtacggtcatcagtctcgtatccattttcaaaaatatctttaattaattcttggtattcacgcattaaatttttcctgaagaggtgtaaagaaaagctggtctccacgcttttcaaatcgtccaataatagacactacatcatctttgaccatcacatttccatgtgacattccgatgaacatcttcttataatcacgttcaatttcaataggtatatttccatttcggttatatactgtagttgaaccgttataagtgctaagaccattataactaaaaactagaagatgaataccatgcttaaatggaaatcctttccatttcttttggactttgtcttctgatagctgagtgatatcatagtttgcgctcatagaccacctctgaaatgttagtcacttcatcaatatgataccaacgattttcaataactttaaacccagagttttcataggtcggagctaccacaaattcaataggtagagtgacatcagaattcactctatgactttttctgatgattgtttgtataacattatctgcatatggatatgccttctggatgattccggcaccgcctatgatagaataattaaggtctctattaaaagtgatagtactgttgtaagaagtatgagcggccataatgtcaccacccaagaaaccgataaattcttcttcactaacatacgcgtcagcaaaaaatccgtttttagcagttgccaacgcacgactcatgtcttggacaacgattgtcttacgaccaggaagaggtttaggaaaactcatgaaagtctttgctccgcaaatcaagatagtatctcgagtacgattagcaaagtttttcatatcctgggaaatatgtttccaaggaagaccatcgcctaaaccaaaagcattttcgtttttgccatctacagtttttgtaggagcaaaggcataaactatttgaatcatttaaacctcagcaaaattcaactcattccacacttaaaacaccggccacctaattgccatatgctaccaccacagtacttacaatcccagtcagttaaaatccacatgacttgtacccactagctttaatcatactctgaagagttttaaatccttcttttatggcttctgaaatttcctcaaatacttcctttttcagaatgtacaacgaacccgcttgattgccagaaagagctgaaataatcacctggtcattaattaaaaactcgccatatgctgaatcaattttacctgaaacttgattgcctcgggaatgagggtcaaatacgagctcaatatgagttactccaggaatttcatcaaactggcagcgaatattaacgcgaggatatcccattacactaaatttagacatataaaaataatcctaatataacgccgctaataaaagcggcagtaacagaaattaacaaaactactaattcagcctcaatcatttcttggccttagcaagtttaaatgcttttttgaattcttcaacatcttcaacaggaatccagaagcctgagccatacccatcttcatagcatgggcagttatcacagtaatcattccaatagacagtttcaccacccatagtgaatggagcttccatttggcacagtacttcttcaacacgctctaattcttctgggtttttatcacaaatgcagaaattccatttaccatgatattcagaaccaagtttgatgctttgacgttgaagtttcatttttattctccagtagattatggagctatactatcacaagcatagctccttgtaaactactttttgaaaacttttttgatcaagtcaatcatttcttctgcattttctggggtaacgatcaagtccaagcgagtaggaccaggtttgattgcactaccaatttcatatactggttcgaagtatttgaattcataatcagcgatttcaaagtatgcgtctccaaatccttcggcatcagcagttgttccatctttaaattttacttctgtgatgaaactattatcttcgtcgagcattttagtaggaaagaacgaaccaccgtgttcttcaatcatcaagcgcatacgacgatttccgctagatgaaaggtcccactcggcagcaagacttgggataatgcgatattctgtgttcagtttcataatttacccgctaaaagtcgttaatgtatcttcacggcattcatcatccatgccaggaaaatattcttgttcaagccataaccatagagtaggagtatcaccttctacagtgatttcgtttcctccccatggggcagacttgttactaacttcaatcaaaccgtatttttcaatggtttcaatgaagtgttcataatcatatatttctacagtaacctgtgccattatcatttcctcaaagtggggaccgaagtccccaaaggtaattactctttccagtcttccatcatcaaatcaatatcttcccacccgtttgcttctaaccaagcacgaactgcttctttagaaccacggaggtcaatatttggccaaccgccaccagggccttctttaataactaaatcaaaatcaataccatggtcagtgtcataaaaacgtgaaccatcttcaaaaatcaaatcagtacaaaatcctgatttattgatgtaaggttctgccacgatatcaatgtttaatttacccatgatgttttcctctactcgttttgtttcgatgtagatatagtatcactcatcaactggcttgtaaacaattttgtgaaaatatttttggagggataaagaaaaagggacccgaaggtccctttatattagaggtcgttcagaatatcattcagatcgtcatcgccaacactgtcaccagcatcgcccatgatatcgtctgcggaacgagaagaggtcggtttggattcaaaatcagacaggtctttgtcaaaggaatccaggtcatcaccaattttatcggcttgagctgctgcttttgccgcggcaccaccaagagctgctgtacccataatctgtttaaatttggcttcgttaacttcaaacgatttaaactgagatggagccacaatttcgctgaggtcagccatattttcggtcaggaatttctgagtttcttcatcattgatgtttgcaatctcggactgaccaaggaatttacattcatcatagttctggaaaccaccgactttcttaactttcatgacgaagtttgcaccttcatacacacaagttacatcaaccggagtttcacccatatcaacatcgacttcaaccatcgcgttgattttgtccataattttctgaccgaaacggaatttgaatactttaccttcgttttctgggttagccgggtctttaataaccaggatgttagaccagaaagaggttttacgtttcagaagcttatattcagccgggttgttgttataagaatcgtttttgctcagatgagcacaaaccgggcaagaatcaaaatcaccgtgggtagaagtacaattttcgatgtaccatttaccgccgtgtttgaaaccgtgattgattagttttacaaacggcagagagttttcatctttaccaggcaggaagcgaattactgcttgaccattaccagcattatcggtcttcagtttccattcgtttttgtcttcgttagagaaagaagaaccacctttcagaccagccagttgttgttgaagttgagcaggattttttcttttaaacatgagttatttcgccttaatttatttaaacagttgttgttgcaacatgggtccttgcaactggacgatagattaattatatactaatttctttacaagatttgattatgctaataaagagtttcttagcttcagcaccgtcaacgtttaaaagttttttataagcttttaatttagtagagtaattactccaaactaagttatccgttgcagtatcatgtgtatttattatatctaaaaacgagtcaagcatgatgaatgtctcgaaagatataacgtttgactgcagaagtttgaacacataagatgttccgactttctcattatattcaaaaatatcatgaagcttatctacattaactttcttggcaaaatagtaaatgttctttacatcttccgagaacgttgttttaatctgcttcaatttacctatatattcacgataaaacacgagggcatcagcatcactgatatcgccaatccatgcatcttggttagctacgaggttactcatgaatatcagtgttaactcttttaatgtatatttctcagcgagtttctcaaagaaatatttgtctctacgcttttgataagctttatcagagacccgcataacccagttatacttaacaacgtcatatcgaccggcaaagtgttgtttgagcattaaatataaaagataaacgctcttaccgttaacgtatctgttattatttccaggcatgcggagacgaatcataataaaaagtccagactattcgttttgtgtgtttgactaaatgatggacgaagcatattttcttccaatgcttctgacataattttttctatgattgctggaggaatatatctattgaagtttccctcaggaatagaattttcttctaaccactgagttgttgcttcaagataccccattccaagttctgttaccatagattcgatagcaaatccattagcttgcttatctagcagctggttaatggattcggagggggacacatccccctcatctttaagcgaaaatagagtcataagcttctaccacttcgtccttttcagtttcataacgatcgcgtgtacctttatggaacagggcaagcagctgattaaataatttgccttctacaccaagctctttcttggcgcggtctttaatgtctttgttaagctcaagatagctttctgctttcaacttattacctgaggcttctttaatcatatctcgcagagcctgtccgtgtactgcttcatcaaatactacttgctctttttctttcttagccattatattcaccttaaaagttattaatttctttcattaatttagacagaccggatttaacaaagtagctataaattttaccacgacccggtagttgatagttattataacaatctaaaatgttagcaacaatgtcttcacggatgtaatcaaaatcgattaacacacgattttctaagaaacgcttatactgttcttcggtaagcaaatctttgatgttttcgccagcatcaagacattcttcaacaaacgtcattttcgttgaaggagtacgctcaccatcaacatgagtgtaccaaaaatctgaacgaactttaatagaagcgacgttatctttcttgtcacctttaataattttaaccatacaatctaaagcaggagaacccgttttagatttcaccaatttcttctgcattggtgaccattgcttaacattaggatacttatgcaattgagtaaagtcaccatcagaagaaacaatcataacaggatgaccttcgagactgaactttttggttaataccgcaatactatcatcggcttcagctttatcaatgtcaatgacataataaggcatatactgcttaaattcatcaattacagtacgaagaccttcaaagtaaccttcccaatcccaatttgattcttcgcgggctttagcacggttctttttatagtaatatgctacatcccggcgccagtatccattgattgcattatcaacacaaatgacaatttttatgtatccgtccttcttccacttaaaagcattaaattttaaagtagaaagaataagatgacgaaccataggagtggttagtttatcgccttctttatacgtatgaagaattgtcgccattgcgatttgcgacaagtcaatcagaatgacaccttcttttacttggtcttcttcggcgaataagcaatttaaatcagacatttgaacctcgttcaattagttagtacagccattataaatacttctataatgaagcataacccccataggagactctatgagcgatttactgaaacaacatttccgtgcaacgaacggcttggacgcaggcggaaataaagttataaatgtggcactagctgaccgcaacgttaaaaccgacggcgtctccgtcgagtacgttattcaagaaaacactatccaaaaatatgacccgacgcgtgggtatctcactgattttgctgtgacttatggacgtcgtatctggattgcaaataaagatattccaaagcctgctggaaattttaaccaggcgaattggacttctttacgtgttgacccgaactggatttataccgtccgtaaaggagagtttgaaattcaatctggtcagttcatcaacgttgactctaacgctgcaggtaatgctacattactgcttccgttagcaccagatgaaggcgataccatcgtagttcgtgatattggcgggcgtcctggctataacggaatcttaattaaagcgcaaaatactggcgcgtctatcgtatttggtgaatcgcgtctacgtgaggtaagacttacacgtccgtattcacaaattatgcttacgtttagtaatggtgcatggcgtgcaagtttaaccgattttggcgatactgctaaaatggtagttccgaacgggattgttccaactcaggtacagtcaggtgataacgtagttcgtcgttatacttccaactcagagatttttattactctgccgttgttcgctaattcaaacgatatcatcaattttactgaccttgacggtacatcgccaattaaccatatgactgtgcgtacgtttgacccaactatctcaattgggactcctggacaaacagaggttcaagtacgtacttcaggtaatgggtttttggtatatgattcgattgacaaaatctggcgtatctttgaaaatgatttacgcacccgagtaagaataattacttctgacgttactttaatgcctaatgagcatatttctgtatttggcgcagataacaataccgttaaaacaattaacattactttacctactgacgtagctgttggggatactgtcaaaatcgcaatgaattatatgcgtaaaggacagactgtagtaattaaagcatctggtggtgatactatcgctagcaatttgaatttactgcaatttccaaaacgctcagagtatccacctgatgcagcatgggtgcaatcaagctcgattacctttaacggaactacgtcgtatgttcctgttcttggacttgcgtatattgaagaaaaagcaaccggaaaaagctattggattgtaactgaatctgatcctaccgtagaacgtgttgatgctaaagacaacacaactagagctcgattaggtgttattgctcttgctacacaggctcaagctaacgcggagtcaagtccagaaaaagaattagcaattactccagaaaccttaaacggacgtcgttctactgaaactcagactggtatagcaagaattgcaacttccagcgaagttaatcaatcaacaactgcttcttacttggataacgtaatagttactcctaaaaagcttaacgaaaggtctgctactgaaacccgtagaggtttagctgaaattgcgtctaacgctaaaatggatgaaggaacagacgattttacaattgttactcctaagaagttgctttatcgtactacatcggattcgcggttaggtgttattcaattagtaaaaactggcggtgctcctaatacagctgctgatcgttcttctgccggcaccggtatattcgatcattctgattacaaaaatgcagttactccaaaaactcttcgcgagtataaagctactgtaaatcagtcaggaatagtttggttagcaagtgatagtgaagttagaaacggaactccttctgcttcaaatattcctacggttgttacaccggaagctttgcataaaaaagttgctactgatggagaaattggattaatccaaatagctacacaaactgaagttaatgctggcggcgtgactaataaagcagttacacctaaaacattaaatgaccgtacagcaactaacgatcgtactggtattgctcgcttcgcgacacctggtgcccagggtgaatttgaagctggtacttcaagtacagtaatggtaaaccctaaattattatttgataaatttgctaatactgatcgtatccaagttaatactagttctggcttaactattactgggaacctctgggaccattataccatcaacatacaggaagcaagtacttctcaaagaggtacaaccactcttgcaactgctgctgaggttataaccggcaccgacgccaagaaaatagttacttctgccacgttgcacgcgaaaacagcaaccgaaggagctatcggtcttgctcagtatgctacacaggcacaagttgatgcaggcacattaagtgatagaattgtttctcctgcttacttgaaacagactattcaggtaacagagtcgtggcaagctacagacagcgttagagggaccgtgaggctatctacaggcgatggaacgtggaaaggtaatgataccgatggctcaactcttccggataacgggtatgcctctaagggcgtcgcagtgtctccatatgaattgaacctcacgttgaaacattacttacctcgtcttggtaaagcctatgacaccggaatgctaggtggtcaaaccccagacaaatatgctcgtcgcgatatagcgcagactatttctggagcttggtcatttagtcaggacacttcatttagcaataatatttctgttcagaatattatatatgctaatggtggtgaagttaaaatttcaccaactgctgacactggcatcgtgcatgttcgttttcagaatagagatggaagcgagcgtggtataatttatgctgagcctcaaacagcttcagccggaaacttaaaagttcgcgtaaaaaacggaacaggaactactgctgcaagccagacctacacatttggtggaaacggtacactagatgttcctaatgaagtatcaactaaaactctgaggtcttctggaaatgcaatagttggcggaactgtaatggttaaggacgtccagatgcttgctgtcgagggattgaattcaatattcggtgaccaatcacagtccgcatttattcgttcccgtgacgctgatacacaaatttttgcacaggattcaactggatcgtatccaattttaactaccaaaaactacgcaagattagctgatggccgttatgtcaagaaagctggtgatacaatgaccggcaatcttaacataaatggttcggctatcgtcattacgggttctgaatcctggtatgtgccaacgaatgaaactgtaataagacaaggttcttggactgctgaaattaaagacgctactaaattacaaggtcttcgtggttatatggttccgatcagaacaccgattgaccctgctaacccaagcactttagtagtgaccggatatgaagaaaaaactgcagctggtggtgttttaactcaggttggtgtaactacaaacaatacttatcaactttggacgccttatcctccgacaaccgaaactgctgataagcgtttcgcgcatactgtgtggatgaggatttataatccaaaccttaataagtttgatgattggatgcgagtgttcacgtctgctactcctccgactgcagctgatattggtgctccgagctcagtatcaactcaggttaaaacccttgaagtcctggaatggattaagcttggcccagttaaaatctggccagaccgtccaaaccaaactctcaaatttgaatgggtaggtgattaatggctgaaccaattttaatggcagcctttggtgaggatttcgtggaaacacgaatcctctctgaggcaaactctgtgaagtattggctaaaagcttatgctacacattctaatgctgttccgaataagccagaactgaatattaacggtgcctttgatatgacctcctccttacggagggggattaacgttgttcaagttaatggtgacagttttattaactttaaaacatttgacgttaccactgatgacaacaacgctaataacaaagcgtttgtagaatatgcaaatggattaacttcaggattgtatattataatgacacatgaacgatttcaatccagtccgttgatagatagatggtttaaaaacaagtggtctgcttcttggccaggttctgacttttccaaatcatttccaaactctgcctatgttggagtgctcggatcagcaaaaggacgtatattaattgagtcattttacggaaatgatggtgtagttaaagaagattccagagctaaagtcgatacagtgtatgataacgttggcgatgtaggatatacaggctgcccttatcgttccattgaagacactaatgagtactcggattctactggatatgaatataagcgatatccagttcaaaatgaatctataagcaaaatcgctgattatggattatctcccggggattcggtgtttttagtgtgtgatatgtatgcatctaaaagccttcttgatgcaggttctactactagggctaacttgagatggttcaaaggtacatctttattatcttcaagcgtatcattagaaattccaaaaaatggagctgatagatggctaagatttgaaagatttaccgctgttcctacagacgctgatggatttactattgtggtatcacgatatccaaaaacgtccgtagttggtgattctaaaatcaaaaaccttgtatttgttcaaaccgcacacagcgaaaaacttaacagtgttgttcaagaatttggcgtgaatggcgtaagaatgaataaaggcgttgaaggaggaaccactatgattatggaacttccaaattcaaaagtcgatccgagcggtgttattccagttcaatcgttcagagaaacatcagactaaggaagccttcgggcttccttttttcgtataaatagaaaatatataagaggataaactatggccgatttaaaagcaggttcaacagttggcggaaatcctatttggcacgcaggtacttttcctcttgtgccggcaggaaactccctaacttatagaggtaaaaaggtttatactgagatagataaacctaaagcagatgataacgactttgtgtcaaaagctcgtggtggcgagtatgctaaaaatgttcattttgtagaaggcttaagccttaatgctcgcggcgggtcagctgagtttataccaggtccaggagatggggctgattataccacagttaacgcaaaaatacaaacatggtatggattaggatttggggcttcatatggtactgaaggtgtaactatcgtctttaatttacgcaatggcgatattaaaactaaaggtaacattactgtagattctggcaggttcgttatagcaggtcaagcacctaccgataatgctcacttaacaaataagaaatatgttgacgatagaataaatactgttagcaacgtagctaacgcagcagttagaaaagccggcgataccatgacaggtgtacttagagccgaagctggcgtagttatagtaaatgcagcaacatccggtgaatatgctcctagactagatcaggttatttcacgcggggtaacaatagattttggcacatactaagaggtagccatggccgatcaaaacttaaaacaaatacaatttaaaagaactagcacagagaataaagcaccaggtgcagatatcgtagcccgtggcgaaatcgcgttgaatacacatgggcgtactctcgctatctataccaaagatgaagctgataatgttgttcagcttgctggtaaaggggttcctttcttagatacatctggaactcttagcgttgatggaactactacattaaaagacaacgtaactatttctccgaataaagcaattagttttgaaactactgatttgagcggtgaaataactcgtcatatcgttggcaaatgcgctactaatgatggttggtacattggtgccggtggtacaagcaataatggtattcttgaaatcggtactattgacgatggtactgaaacaatccagtttgtacaacgcggagccggcaacgtcgaagcccgaaaacttgtcttacttgatggttctggtaatactactcttcctggcgatttgagattaactactaataagaccgtaaaaattaacaatggaagcacgcttgtccttgaaatgggtgtaggctctaacgacgtctatattaaaaaccaacgaggtgtaggtgttcttcaattaactaatgacagtaatctgacattcagaaattcacaggtttattacgccatgaacggaagaggtcctggtaaatccggtactcttctgacgaatgtagaaaacaaccgtcaggcatggcaatacgtaatttctgctgcaaccgctggaactccacgttgggttaaagtagctacaattaaacacccaggagatgcatcttcacagttagatttaatgattactggtggtattgattctgggcacggtagacattacgttgattttatcacgttatctggtcgcaatttaacatcttggagcactaacaatttagataactgggttgaatggcgcaggattggttctccttctaaaggaaacgttccagaatattacgttgttaaaaatgatgccgctactgatgcggatgcttcatttgatttttacgctaaagttcctcgatacagcaatgggctttatgttacagtgctaaacacagctggatacaacggccaagattcaggtacagtaattatctatgaaaccaatcaggacactggtgatactggaccgtccggaagtattcttgtttcaatgaaacagatttttgatagtttagcaaaaccagatttcggcgatactacgggtactcttccagttaaccgtggcggtacaggtgctactagcgtaggagcagctcgaaataacttaggtttaggtactgctgctgttcgggatgttggtgaatctgctggtaaccttttagaaaatggcgcttatggattaggtggtaacggtggtaaatccatcaacgatattatctctaacgcggatatgctgacacggttaaaagcatatggtggtactttctggcgaggtgttactaaatctggtgttagcgttcaaaacggtctttatagccacggctccggtatttttatgaatgctggtgataccatgtcagctattaatatcgactacgctagtgctaaagttcgtgtatatgcagctaacaacagtgatcttgccgcaggaaatgttaactacaatgagctttatggtacagcaaacaaaccatctaaggctgatgtcggacttggcaatctgacaaacgatacccaagtcaagaaagctggcgacaccatgactggtgatttaactgttcctaatttacacgcttccggtccgggtactgcatcagtatatgttaatgcaggaagcggaaatgctcatgtatggtttagaacaggaggtaatgagcgtggtgtaatttgggcaactccgaatacagcggacttgggtcagattaatattcgtgcaaaaactactggtgatgtttctgccggtgattttagcttccgttctgacggccgacttgatgttcctgtagcagttaaagttggtggagcagcaattctaaccaaagacgggaatattacctctggttcgatgtttggtggtaaccttaacaactatttgacctctattaaaaatgatatcaccactggtgatagtaagcaagtaagcaagaccggtgatactatgaccggtaacttgactattaacgctaacttaaaagtcgaaaaccctaatggatcaatggttgatttaggttcagagaactcagataagtatagcagattgacccttgcacgtaaagttggctctggcgcttccgtagcaatgcttaaaattactcctgaaggatacgtgcaatttggttatcaaactgcggtttctaatccagctcctagtaaatatattctagttaaatctagcggccttgaggtagaaggggacttggtttttaatcagacatatagcggtactgaagatgcaattaatattactgataagactaatgaccttaacaacatggttattaaaggcagtgatttaggtactcgtctattatacaagtgtacttctattggtggttgttctaatatatcgaacaaacctacctctgacggcaactttgttcttgaagttctatctttgcgtaaaatttctgataccgattggacatgtaagcagacctttactacaaagaacggtaatgttgaaggtacatatgttcgatactgtcaaaacggtacatggtctgcatggaaagaggttgttgctggtgttcaaccgattaatttaggtggtactggagcaacttctgtagctgctgctcgtaataatcttggtgttggtgaatggcaatctgtggcatttggtgtattgaatgtcaacggcgttagtaatgcagacccggccatcacatttaaaaatggggctgtggttcgtgaagcacaaggtggtagtctcggcgcgttaatcctgtcggcttctactacatctccagacggcgcgaaatatattgcttttcgacccttcggtgattcgtctggtactgagattagagtaaaagccaatgagtcaagtgatccattacttgagtggtcttatggcccgggtattcgttcaaattcatctggcgcttttgttatctacgcaaaaacaggtcaggcactccatttaagaccaaacggtgataattctaaccaagccacagttattgaccaaaacggtaaaatgacagtcggcggtgagttcgaggcccagaactcaaaaatcacaggcaacttgaacgtctctgaagataacagaatgatcgttcttggcagaaataccgatattggtttagtcaagaaaagtaatatgccaggaaaaatggctatcagtaaatctaactcgtttactgttatggtgtcaaccaataccaataatcagattaatcctgctgatacgtttaatgatatattcaaagtagatgctgatggaaaccagactgtttacggaaatgcccaagtcaacagacagttaactgtttctaattcagctactgttgcaggtgttattaatgctaacggcggtattattgttcctactaccaagtatgtgcaaattgccgatgctcctacgcagaataaccaagccaccaacaagaaatatgttgatgataaggttgcttctgctattagtaatgctggcgacacgtatcttccgttagcgggtggtactgtaactggtaaattaatagttacgggtgatcaactgaaaactacttctttgtgggctactggagacgctgctgttaatggtgctttaactgttgacggtaatgttgttagtaattacggtattggtagctttgttggtgctgtcgatgttaaggcccctgccgcagataatggtacaacccacctttggttccgacattctaacggtggtgagcgtggtgtgatttatatgccgcgtgacaataataccatgatgggattaagagccggtggaagtgaatggcaattacatggctctgcaggccaaatggtagggccaggcgcacgctggagaattcatcctgatggcaacatacagggtgatgtttatggtggttatatcactaactatatcaacgataggtttaaccaatgtgctcaatgggttcgtactggtgctcaacaagactttggcccaattggtcgaccggcacctggtaaaactgttcctgctggttgggtacttgttggtcttaacggtaacagcaacgaagctaaccagaacatgcaacttatcggcggacggttacaagtatggaaaccgggcgttcaatgggttgattctgctacttgataataagggggcttcgacccctttaaacttaaaggtaaaataatgattgttaaacaaatgaaaggtattaaatggcatcacaattttgaaggtggtgcttactatcgagattgtaatgataagtgttggtattcttttagaaactctcttgataaaaattcccatattattatcgttgatgctaaaacaaataagataattaattactacaacggtgaagatcctactatgataggtttgtttgctgataaagaaatgattttggatgtatatcagctcgacgattttcctgttgattcgtgggatgaattcacacaaagagaatttgaatttgtagacgaacaagttgtgatgaccaaagatgtacaagttcctaaagaaagaactaaagatgatatcatgaaagatttaatgaagcttaaagctgaattggaatcattgcaataaatagctctgtaaggagagcaatatggcaagcaaacaatcaataccgttttttgatatgtttcttgggttgctcgagctattattcaaagatggagccacgggaagagttctcttttcccgtgttttcgttgtcgtacttttagcattgttggcgtttgctggatataagtctgatagtcttattacagcttacgtcgacagtacttatgacaagtatgataaactggttcaaaaggatagagattcccgatttgataatacagcactcgaacaactccagatagtacatatctcaagcggtgcagacttttctgcggtctttacgttcagacctaaaaacttgaactacttcgtagacttaattgcttatgaggggactttacctagcacggtagattctaaaaacttgggaggatatccaatcgacaaaacaactgctgaatatagcacgcatttatcgggtagatatttttggacggataaggaatttgttttcttaccaacaaaaagaaaaccgcctgaaatatcgtatatgtttagctgtccgtatttcaatttagacaatgtttatgctgggactgttgaaatgtactggtacaattccaaacctgcattatctaacgaaagactaacatcgatatgtggtcaggcggttagagctcttggaagagctaagtgattacttattactatgcatagccattgttcgatagatagactcaaatccctcgttgtattcttcaacgagaattctcttctcttcgtcagttaactcagaaaccattttacgaaagttgctctgatttaactgacgcccctgctcattcttgattccaatttcattcaagaacgcaataaattcatctcgcttctccatgatatgttcagcattgaacttagtcagaatagaagcaacagtaacgatttcttggacaatttcaaacttagtcattatttttcctacaacttaacggattatgtggattatagtatcatcttgataccgcgttgtaaaccggtttatgccaattcccaacgagaattcaaatcttccttggtagtgatatactcagcaccagaggacatccagagcccgtagcgaccatcttttactctagccgttaaataccattcctttccaattggacgaaccctacgattcaaccggtgacatacgtcaattgcctcctgaaaagacaagtcaatcagacttccaagcgcgattttattcattaacgcttcaagatatctttgtgattcaacgacagattctaagttatgactcatgctaaaactacctctccacgattacctaaaatgctttcgatatactcaactccacttataatgtcacctctatcctttgctttaatagtaataattccatacgtgtaaaagtcggctgacaaactgaatggcttagaagtgtcctggttaaacgtagacattactgcttgctctaaatgttttacttctaagtcattagcccaagagttaagaactttaagcctaacttgtaaagtatattctactttaattgctgaaagtaattcaacacgtttatgatatgccctggcttcatcttctctgggtaaagtttcagtattcatagataatctccaatatcataagcatcaacgcatttctgaaattgttcaagaacttcttcaggttcaacgttagcgataatagctacagtaaaggtaccattattccaatcatgtaccatccagtccccatatcctgcactctggaggtcttccattagttcagaatggatatctgctactaatccagaatggtcccctaatttcttatggagagcttctaggtcatcacaaataatagttaaagtagtacatttggaattattcagaatgcgcattgtctttacctttatgtttttgcttacgttttgattctttggcagcccgctttttatctttgtgtgctccgcctttattaaaatcatgtttagctactagattttgcaccttcaagttccttgatgtaatagtcaatatctttaatcatttcttctgtcattactttgtacatttcagcaagaaatggtttagcgccgccattaaatggatgactaaacggacagatgtattccttatccatgagagttttcatgaatttgctatctgccattttaaacccggcttcattggtatatgtaccccaattatcgtccatcatttctaatgagcgctgaagcgatttacgttgaatttttaaaagtataatgttattctttaatgtactaatcattagtataaatcctctgagaataattcgttggcgggtcctgatttaggacgaactgtattaacttgacctgcatgtgtagcgatgattaatgcttcttcacgtgtaaagtactcaccccactggtcaacaaatccttgattgtctccatgaacatggtcagaaaccaatttgttgcggaacatatctagaacgttcgccatatcaacagaataatggcgagtgcctggaaccacaattgttccaccagttttcaattcaaaacgatttgctgcacaaacgatacgacgttgaagtaatcgtccatccaaccaatcagctactttaaagcagatttctggaatttcgctatttacattacacatttgaccaacttctcgttgaaagttttaataacttcacggccatggtctgcacctttcttacagtctgcaattgtccatgcttcaccgttttggtatttgtgaagagcccgggtattaatatctttcacaagattcataatcaaatcattaatttcttgttcagtcatttaaagaatcctttaattttctgccacaaacttttcttttcacgaataccaatctgacgaataacaggttcaccctgcattttctctaaccattccattgagttaacagcttccgctaatggaacaaatttagcaagggccttttggtaattatctacatccatgatatgtttaccatctgcattgtagatagcatagcattttgtgaatttcttatcaatgtatccgataaagtgtccacggaaccatacatcccaacaatcagttggcatattcagattaaggtcaaccttttctacacaacgctgaagttcattcaatactttaaacttgttcattacagttccttaatagagcggatgatggtttcaatgttttcagcagtacgggcgatatctaagtaagtattgcctgttgcagctacacggcaagacattccgaggtcagtgaagtgtttctgatgctcttcagaaatcttgtaaccgaagatgcggaaagtacctttgttgttaacttcaagactacgaataccgaaggtacgtttttccagaactgcgatatagttactgcggtaaacagtcagttctttcaaaggcaagatatcttccatctcaccgagaagtttcatcatcaggtctttgtgctcattcatatcttcagttagaggacgagctttacgagtattgcgtttcttcagaagttcaggcttgttctcttctgcatagataactgccgctttagagatgatgtcttgtgcttcaccagtgatgattaaaccgtcaccagatttctcgatgagacctttcttaatcagaacaccgatgtttgagttaacagaacttgcgttcatggtttcttcaaggatttcacgcagttcagaagaagtgatgaaatcctttttagctacctgaaccaggatagcagcagttttttcgttcagagcatcttcggaagctttgatgatgtaagttactttagacattgtgattctccattctattttgttcaatttgtttggtatgagactataatatcatctgctaaccagcttgtaaacaactttgtgaaaataatttggggcattctaaggagggattttggagggatatagatttatatggaaggacctggagatgacctccaggttcactagattaactgaggagcaataaaactagaccaaatacagcaattacagaacctataattaaataaaattctatcataattcttccaggtctttcagatactcagcttcaggagttgtcttttcccagtacttaacctcttgtgctagacgttttgcttcctgagcaagtttcttcgcttcatcatcagtgatgtgatagatgttcattgaaacaagtttttcagaatggtctttgaatagttcattctgttcaatttctttagtcagttgcttgcgagttttaccttggataacgatgttacctgcgataacctctttgataaattgagcttttgcctgagcaagattaaacgcctgcttagtttcagcgattttatgctcgattcgtttggcagtgaatgtcttacggacttctacgaaatgacgaattaactcacctgaagttttgaacttatcgtttagtttaccgttctcgtcgatgactactatgtactggctcattttctcaatgagtttaaaatccttcatgattttagcatgacgctgctcagggtcatcgcttaaagcatagtctttacggaatttaaccttaaagccaaagccagtcttagaacagtcatcatcatatgtgatgtatcctgcatcttccagaggatcgagtactttctctacataagaagcacgttcaaacttgtatggaatttcgctgatatagatcgagttccgtgaagtttctttatacacaccgtgtagttcaacagaaccgtcttcagtttgaacgatttttccgttaaatttagggaactgaacttcaggttccatcatttcgccacgaagtgctgctttagtgcattccaaaacagattcaaaactatgcggaagaatagaagttgaataacctgttgcaataccgcgaacaccatttagaagaacagtcggaattaccggcagataatacgcgggcggaacatgttctttatctttatgtgctggagcgatttccgtatctttgtagattttacggaagttgtcagaaatccgacagaaaatataacgacttgccgcagcagattgaaccagacgcgaaccgaagttgccttgcccatctaacagaggatagttgttattccatgtgtttgccatcaatgcaccagcatcttgagcagaggtttcaccatgatgataacctaaatcagctacaccgccagcaacagacgcaagtttgtggaatttttctttattaccacgagccaaatcaagggcacgagcaataacaaaacgctgtacaggtttaaacccatcaatcaagtttggaatagcgcgattttctacagtataaatcgcgtattcttttgcttcattatcaatgatagatttcaaatcgcgatgacgaagatttgatgccttagccaaatcatcaatagaacctgcttgctttaatagagtgtcaaaaatatccattgtacctaccagattagtgagccgatttgtactataacatcggaaatgaaaagcacaatataaatcattccgtaaatcattccatagtacataactaatagaaaggcggcagcaatagctgccacaattaggagtttcttaatcatttgtaaactcctacaattttacaaatgcgctcaaacataataaatgctgcggtgaacgcaatacttccgattactttagtggtaggcacgaggccataccacatgaatgttcctgagcaaatcattagggccatcagaaacacatagcccatcacgaagaaggttctcattagtatttctgcaaagtaaagatgaagttatcattcagaatacgattcagctcagagtaggtctgcgcgtcacttgaatgctgacgagtaaacgccaatgcaagctgacctttgccataaccggtggtcagcggtttcattttattggcaggaatccagaacacaccgtaggtcatgcaattcgagcgcagagtacgacccaactgagaacgtccagaacggatatgagaaagaacactttcaaatcctgcctttgaacgctgtttagctacaaagaaacgagcagatgcaccaatataacctgctttgccatcattgaacatcaaaaaataaaatccttcgcgctcagtaatttcacgagatggagcacctgctgcccaatcaccgttacgaatagaaccaatcagttctgcaccagcgttatcgagatcagcaaaagtcataatattacgcatgttaatttcctcagttaattaaagtttattctccgatgaggggccgaagccccttctactaccaaaaatatactactgccgttacaccaccaacccaaaacacaagaagacctaaagcaagcagacgatacacgatgtgtcgtttcatttttgaccttcccatacggtttctactaatgatttaaggccatcagtttgaataatatcaatcgcattaatggcaaaataaattccgaatccgaacacggcgacaattccaagcgctaccgcaacgataaaagacagaacaacagttctcattaagttaaagcgacgatcaaaactactacgaatcattatattttcctcagatgaaagcattaatccaaacgttaactaaatcccatgcgaaaacaccaatgaaagtaacgataaggcagaatactacaaaggtgttcttcaaaatcgtgagtaactttttcatttttgttctccagtttagctaacaagattatagtatcaccaaagaacaggaaagtaaaccgttaaatgcacaagttacgaattttttcttctaaggctttaactttatctatatgttcatcgcgagctgcagcggctccattgggatacaatccgccgtaagttgaatcgccattatcgcaagcaatgatagtataatgccaattcatagattcgagaatcctatactctttcaaaagttcagctttaatagaagcatttccgcgtttagctcgaagtgattttagctctaagtaactcatgttttactcccgttcagtttgtaaggccatagtatcatggccaatcccggaagtaaacaactttttaaaatttgtgcatgatatacccgccagcaccaactcgtgaaggttttactacttccatgaggtgttcgatgccgccggcaaacattggtgtgtactgtatgacattctgggacacttcttctgcaacgaatataattatacagtctgcaactttatgtttaaacatgggccctagatttattccacttccatctgggaatgggccgtctttaccagttgtaacattaatccatggcttatgatttgctcggtcatgaacaaagtgtgttttaacttcaactctaacaccttggtagtagggatgagctaatacgtcccaggcccattcatacggatcgttgttattatggtcaacaacttgatcgtttacgtatccatcaagaaaatctgctaccacatactctgccggtatagcaattctacatcttttaagaacatcaattctgtcttgagatggatcgatatctaaactatatctggcagtatcaatgatttttacttttgcttcaccccttagcttattcaaatctagggtaaatgtccggagttggttcaatctctgcagggctttgttcatcaatgccataaattcctctgatatgtaattcaccaaaataaacacgatcgtcgtggttacaagtgtctggttccacaacaaaatcatcaccaagttctacaagttcatcacagtgcaaccaagcatagtgaacatcaccttcatgtttaaccacatgatgacaaaataccgtagcagcatgatgagtaccacgaagattaacaactttagaatgagatacgttaaatggattaatcatgtttcacccataataaaagaggagcccgaaggctccttataattagcgaagttctgaaccccaacgatcggttacatcttcaagtactacataaccacatgtacgcattttagcatcgttgtaatcaaccgggatagatactacatcacgcggatgaactttaactgaaacgatacgatcggaaccactaccgaagtgaccgatgtaagatttagagcagacatgcagacctgtggaacaagtacgctgatcatcttcatctacctggttacgcggcattgtaacagttttacccggagagttatcaaatgtgtttgaagcacaatccatataagtggaacgaactactttccaaccaatgaagtgaccatcatcagtgatgtcgatatcgtttgcattcaggaaatcaaacagacgataaactgcacgacgagacgggttcagcatcaggttttccaggaaaggcagataacgtttaaagtcttcaccatcttccatagctcgaacgatacgctcagtcagaccagatttcagctcgatatctttatagaacaaagtaccatcttcaattcggacgttaccctgaacgaatttcttgatgccttgttccaggttaatgtggtcaatagcaccagcgatatcaccatctacaagtttctgcagtgcagatttaaacccgggatgttggctatcagcgttataagtagtacggccttcagtaattgaaatgaatttggaacttgctgcccatttaaattcacgctcaactggagcttctactttagcaggaacagctgccgccgcagctcgagcttcacgctctttaaacacacgccgaatggtgtcacgagaaacaccataattctcggcgagctctttcttagtgtacagaccgtttttgaagtttttaacgattgcatctttttggatttcagacagacaggtaacagccatttattcacctttattttcagaattttgagtagaagctccatcaaggagctccatgatttttacgatatcatcgacgagtttgctgtcagtccgccaagtatccaagacacttgcgatgacaggataatcatctttaaactgttcaatctttttatagaagattgtctcagcatcactagacagtttattataaattttattacataaagctaaatcatcgttttcatctttgattttacttgtacgacaaaccttagcgattttgtttagttttgtcaggaacggatttttcattccagacgcagtaaacttactcgacaagaaattcaatttatcgtaatgcgcaatatttccacagatacggtttccagtagcatttgatggcatgtactggtcgtagtctaccttatcaatacacttgatgtattggtcaataataaaccggtcaaatgaaagcaatccatcagctttggccgcggctttcatagcactcggacgaattgcatagaatttcttaattccacatgcttctgccaaagaacgcatatctgtgatgctcatattccaccaccaaacgttatctgggaaagtgtggatttcatcacgattacgaccgattgcataaccttcaagctcagcaatttcagatgatactaaagtctgacggtcttcttcccagtacccgtctttatcaatccaatgcagagaaacatttggtgatttcggacgtttctcttttggaccagtgtcgtaatcaggaagagcttttctctgggcttcaagttcagacacacggaatactacaacttcatcagtatccatgattttcttcagctcatcaatgacatgtaattcatcttcattgtctttgattacagtaatgtgtgcccagatttgaactaacccagatttacacagagcacgaaccgtagcaatacgcttacccgctttatcgtcaataagaacaaacgctttagttctatcaaccccgcaaatatcagaaatgtttacttggttatgacgatgccaagaactgcttgacactttacgacgagcaggttcatcgcatgaaacataaactgatacttcgttatctacataatatgaacgaattttatcaagattatacttcgcaactacttgtttaatatcgcggttcccaatggtaataccgcggctctgaagaatagagcgttccttagaactcagcttattgaactcacgcaggaattcacggtcagattcatacgcttcaaacgctttaatatctgaggtaattacctcttcttcaagagcattcatacgcttctggatattagcaactgtttcttcatcaagagaaagctcttcacgagatggagtgatatccaattcgcccaacgggaaatgaatataaaccttgccataacgattaagcaaccaatctgccttaacatctacaccgctgatcggatatacgatttttccataaactgcatacagaccataactttcgtaagagctattaacgctgaaccactcagtcttatctaccgggaaatattcaatttcacggcgaagagaatctacctttggaggtacagcaccaaatgtacgcaaaatatatgcgatttcatagtgccaggtatcaatatcttctactttaaccggaaccgtgatttcaagaccagtttcttcgtcttctttcatgtcatcaacaaacattggtcgaatagtaggttcaccacggtttttcatgacagtataacctgtagctttaccatcatgataagacactacattaaatgtacttgtatagcttaaaggcgatttagaaccaagaccaagagcaccgatgaaatcattactattattctttgtagattcaaagaacgttttgtacatcgtcatcatgtcattacgattaagacctgggccataatcacgaattacaaagcgcgggtcaagacgtgttggtgctttgatgtaaaatggacgattttcattaccattcaatttatgagcatcatcacagttagtagaaagttcacgaacaacggcacggactttatacttataaagtttatttgacaaaatgtcaaaagctttacctgaagctttaatggtaaacgttgaatcgtcagcgtcagaagaaccaataattacttcatcatcacatttaattttcattttattcctatcaattgtgtcgtttaatgatttctgctacttcaagtaactcttcagcagtagcggtgttagttgtaaaaattttattatggatttctttgaagcgttctttgaattcctcagctgcttggatgtcaaagaaccgctggatgatacgatattcacgatatatagcatcgttgaataattcttctgatgggatgtaactacgtttcataatattttcctcagtggtttagggaaattatatcactataactttaagcaagaatcctagaatcatctccaagcacttcttgattaaagccatataaatccattcttataaagaaaaagggacccggaggtcccttagattaccacaccctactaactcgaccataaacctcatgtttagaaccatcaatgttttcaacccagatggttacccaagttccgggcagaggtttcttttcagcgaacagatatccatagtcgcctgagatcaaagtaatccaataacgttgcatgttaattccttctaagtaagggcaatagtacccttactatttattctttattcactcatccatgtcttacgtggtgcagcatcattacccataattaattcaaacagttctttccagttttcaggaagagtgactacatcataaaccgggtcttgaataacacgttcgtattcatcttcttcaagagaaccaagacctttaatataacgaagtttccaacctttgaaatcatctttatggtcttcatattcaccaagagaatagaaccaacgttgttctttacctttggtgagaataataaccggagttttcacaaagcggattcgaccttgttcaaacagctcaggccaattactgaaaaacgctaaaagacttgggaaaattgaaccaacaccatcaacgtctgcatcggtcatgatagcaatatttcggtagttagtattttcagcaggctcaccaatcgtcaaaccagtgattgcacaaatgtcaaatacttctttattcttcatagcatctgcagcagacattccccatgtattcatgaacttaccgcgtagaggatatccgccatgaagttcacggtcgcgagttgtgagcagataaccgatcgcagaatcaccttcggttaagaataaagttgtgtcagcatctttaccatatttgttggctttgatgtgcttagctactttagctttctgcgctttcttggcggctttagtttctgcagctttctctgcagcaagtttacgagctaacattgcctcaataataggcatatgaatatcttcggatttcataatagcgttagcaagtttcttataatcaatatcaatatggctacgaatttctccccaaggagaagtcaaacgctctttagtctgagaatcaaatcgcatgttagacatatcacgaataaacatgatgacagtcagacattctttaattcgtgctttgttaacttctagtttgtacttacgttttaatgctggaataagttcattgctcagttcatcaagaactaggtcaacgtgagtaccaccatttttggtgtgaatgttattaacatatgaaagctggcggaacccatcatctgagcgaccaatagcaatagcacaagtatcagaatcctgcactaccgcattttcatcatacatctgggcgtaagctttaaacttaccttgaacacgtttacccatgaatttgaattcaatatcaggataaactactgctaatgtcatcagacggtcatgaataatatcttcataaactttacccatatgagtttcatcaaaatgggaaaagtctggaataaaagaaactgttgtaccattctttgtagaaggaacagttttccatgatacattatctgaaccattagagcatgtaacggttatttcatttttaccgtcgcacgttgttccaataaattgagttgaaaaaatattagttaatgatgaacctacaccgttttgcccgccagtttttcgttcagcatcattaccaaagttaccaccagctttagtttttgtccatgctgctacgggacctgggatttcgtctccttcaggagttacaaccatcgcctgtggaattcctcgtccgttatcagtgacagtgacacgattatcttttaaatctactgaaatcttatttgaaaacttgaaattagtacgaattgcttcatcaactgagttatcaataacttcatcaatgattttaattaatcccgcaacatacgtaacagatgtccattttccaaacataaatctttcatgagattcatttgctacactaccgatatacatacctggacgacgaataacatgttccttatcggaaagcatttgaattttattttgaatcataatcacctctttcaaaagcacgaactaacgctttatatgaaccttttggatatcccattgtttccgcgtgcttaacaaatgctgcagttttaggacagtttaattctaaccacaatttgtataaagcaatatcatgttcccatacagggctttttctatttttaataccacattttattgcagcctctccaacatgatgctttccgtaaaaaggatttctttcaccagataatcttccatttgggcaattatctccttttcttccatacatcggattcttttcgcctttcatccgattcgaatgtctttctgaaaattcagttgagtgggtttttccaaaaaatggattattttctcccactgtatccataccgaagcatccgttaatagtagcaaatgccatattaaagaagtcttttgatttaactacatcgtatagtttttgataatacaattcacagaaagtagcttcttctctagtatcaaattcatcaattatgcaactatcaaataattctggatgttcctctaattctttatcataaatttctttgtacttcttagatttaacacttccgtgataataatcatatgtatgcttttccaaagaagttgagcctatatagaacggaggcagtttatctccagcataaattgttagatatgtaatatatttcatacagctattatatactgagtttgcataaagtaaacaactaaatgacccgaaggtcatttattcataacgaattgtgctgttcttgagaaaaagtcctgagcacactgttccgttaacgggtttccctgttggcccaatagccgtaaagcctgtgtgctgaaaatcatcctctgagcaagaaaagaacttatatccagtgattttgatatcagtaaatcccgcgttatctaacacgcgagttgcgttatcagcgtcagtacatccaactatcatgaaggcaagcgctgcaattagaatctttttcattttaattttaatttaaccctataagttatattacctactttaataacccggatttctccgggtttcatggtaatgcgtgctttagttcccatcaataatcaccgctctttaatccatcgtagtgaactgccggagcagaaaccacacgcttcatttggccttcacacttagggttaaagcagttaacagtatagtcacgatgggaaattttacgcataatttctatcttttttccacagacttcacacttgtaatcatacattggcattaacagcatccttccatttttgtgttttgaccatgatttgctcattcagtgcacgagtaaccatcatggagatttcatcatctgatacatgggtatcatttttatgacgatttctgaaatgaagccaaagtgcatctactacacagttaataacatctgcgcactcgccttcaaattcttctttctgccgccatggacgattaatccaatcacacatttctccagtttctgaagaaagttgcaacatgacattcccaatgctacggttaggaataggataagacaattttgatgcttcaaaaataggagctaaatttaacattgatatgcactctgcagtgctgcaatagtagcgattgcctggccacgattatgaacagaaagattcataaccaaatcggttggaattacattcgcggaagttccaacttcagtaaagtatttgaattcgctatcaaaaattacaaggtcttcaccatcaatttcatcacattctgtgccattagcccacgtaattccggatactctattattttggcggtcaactttagtaacagtaaaactcccgccattttcatggagttcatacacaaagtcttcattaaactcgtaacgtgatgaaaattcttcttcagcttcgcgattgacgaatttgtactgtacgccttctttaaaattcattacacaatctccatgtattctgggccatcaactgtgattacacgagcaaaggtacgaaccgggacgatatcgccgtgattagcgaatacatacaaccaggtccaatgctcttctttaccaaaggttttctctttctgaacgacgattaagtccgggttgaacagaacatcttcaaaagcttcagcagtaatttttacggtgttttcagttttcatgttattctcctcagtagttgataagataatagtaccacatccttgtggtaaagtaaacaacttttttaaactaaacctggattttgtgattctgacacttctacgtcttcttttggaaggaccgcaaagttcccctgaaaaactacgtttactaaggttttaccgtcttcttcccactcatcagtgacaagaacatttttgccttgacttagattttttgccggatttttggggtctttagattgagtgacaacgtttttaagggttttaacacgaacccacttacgttcaaagctttctttaacattgttagtgtctttaaacttcaaatattttgcaggaactacaaatttttctaagcaatgaatataatcaccagaatcagaatgaattttataacctgctttaccatcattacgattagcaactttaacgatcacaccagtatgaccaacccacttgccgccagtaacttctacagcatcgcctacaatcaaatttttcatcgtgtttctctcagtttgttaatgtagagccattatataacagctctttcataaagtaaatagctatcggtgagaaatttcacatccaacatcgacgccgaacagatacccagcttcccaccctttagccatcatagccttggccaccagaaccatcgttggagagatttccgggaggatttcccggttgaaccactcttcgaagttttcatcgaactcaaactcttccattagccacgccccttaggtaaactcagtggatcggtatcttctggacttggtgcttcgcttaggcctagagcatagcgttgagcatatttaagcattagaatatctttggcacagtcatggatactatcatgcgcgataaatccatcgagcgtaccctttggaagaggggtagttgtcagaccacgagtcagaagcagcgattcaattgcagtacgaatatcacgctgattccagaacttgcatggttcttctttaaatgtatcaatttcttcttcggaaattccttgggctcgttgaacatcacgaagacaatcgacaaaaatcggaaagtcaaagctctgcccacgacaccagccaaaggaatcccatgggtgaattccattatcaatcagatattgctgagcttctttaattccagcaattactgataaatcgtctggcgttgaggccaggttagcccgggcctcagctgattgtttcttccaccactcaagagtagacttaccaaacaaccgatgacctttctgggatttaaggtcaaacttgatacgatgaccacgtttaaccaattcatcgaagctttccagaacttcagggtcagaatcaaatgtgattagagcaaggtcaatcacagaagagcttgacacatttccgaatgtttcaaaatcaataataaagtctttagccattttgagcctctagcataaatttaatttcgcgtaactggcaaccaacatattcgctcagatacacctttgggtcatatcctgtaaaccaagtgatagcattagcgttatctgctatatcacgaagctcattcagaactgtatcaattttaatgttaatagcacgcttaacattatccggtgcttcaaacttagattcttgtaagccaacaatcattgtttgaatgtcttctaatttcaattcaaacatattacctcacacataaaacacatcataacgaccacgagtagtaccaacatataataactgctgtgcgagagaagcatctgccatgtgaatacatggagtataaatgaagcttctgtcaattgagatgccctgggccttatggaaagtcgaagccggcaatgctttcactttatgaaacttacgcttagcatcccagaactcagaccaaggagctttacctcctttattccaattcttatatgtatctgcagtttttgccaaaaagaattgaaacttattcatttcttcttcagatgagatgacacagattttctctctagcgtactcttcatcgtcgccataggtttcaatatctaatacccaatgacgaaccagatattcacctggaacacctctggcacccaaaaatgatgtggtttcaactgcatctaatatgcgaacaaactgaccattattgaaaagaatttcgctgaatttctttccttcaaatttaagttccttggtaagaggttcttgcataacaacaatctcacctactacaaatggccgttcagtttcgtatattcttcgtctgattatttcattcaatttatccacagatttattagtgaacgcaagcattctgttttcaaataaatcttctggggttttaactaaattaaaataatttagcataaaatctttaagggcagttcctttcgtaaaaccacgtacaccatgaccatcaactacacagtcacgaatccatccaccgtttctaatttcggtagcgacttcaatgattggggcattactccgcatcacctcggtcaaatgaagttgtaagaaatctttatgagtgaagaatggactcagtgcaggttcattacttccaggttctaccggacgtatctgagccttatcaccaatggcaatgacaatacaccatgcaggaatagttgccatcaaaatcttaaacagcttacggtcatacattgaagcttcatcacagataagaactcgaatagatgccatatccggaactttcttttgttcaaacagaacgttttcttcatatgtcgtcgggttaattttcagaagactatgaatagtactggcctgcattccgctgagcttagataaaacctttttggccccatgcgtaggtgctgccaacgcaatgccagagataccctgagaaatcaaagcgtcaatgataaatttggttaaagttgttttacctgtaccggcaggtccattaatcgtaatatgttgacctttagctccttgtttgaccatttcaatgactttattaaaaatcgctttttgactttcttttaattggtcaaacgtaatcatgccacttttaccctcactacatgtagatttttaatttttgcttcgagtttttcgcgctcaacatcgctaagtggttcatacaccagctcagatgttttccaccaaagcatccctttggttttgcttttcccagtaaaattcccttttgctaatttgtctgttaaaaccgacattgtacgaatccgtgctttattagccgattcttcattagtgaagaccacacatcgttctccatcgtacatatcagttgtgactggatggtcaaatccgtctttatccttatacgctactacatatccatagtgttgcattacattttacctctcaaaagttggaagaaggacgcagtcaatggaagaccttttttcaattttaacttatctagcattgagcatttttctaaccgacgaagtgagttaacaattaaccgtattgattgtacacggatttcagcatctgacggacgattcggaactgacgctaaaatagcagataacttacgctcaactttagctaattcagacttaccaccgctgatacgagttctcagtgcattaataagttctaaatcagccgaggttgcagttccattcttttctttttgcacaaattgagaaagatgattttcacgattgtgtaagttagttttaattgatgcgatagttttttcatactcacgaatcttttcccaacgagacgcttctttatcacttgtaggtttaacagaatcagaagagcgaactatgcgtgccgcagtttcattcgcttttcgttcaaggtcttcaatcgtgttatttccacgcaatgcattatacttttgtttaacaggaataacattaccccatcacatatcccaagtcattgttccaacgctcgagtgtcatgctatcaggatgatttcctttagcagttccaaacttttcgcctgagtatgcacagtgtgtctgctgcatgatgttaaacagatattctggggtgagattgaactccttgtgccgacgttgagcagaacctaaagttgtaattaaacgagtataaactttagcggtttcagcagtaaatttcatcatgttttcctcaaaaatgctttcgtcttacggacggtataatgggtctaggtccctagttctagataatcactagttaactaagctatagtaacactaaagtagtccataagtaaaccagatttttcaactttgttatgacccaccactttgaacttagttcccatcggtagcatcttttctcgttctttatcaatcatctcgatgttagcgcttctgcgctgagcaacgttatcaatcaaatcattcgggcgaatgaattcagaatctggtgcagtaattaaaagcgatttcatgttggtatgataatcaaatgattgatggcaattattgacttcaataactacaaaggtcgagtaatgccatttgcctgcaaactctcgggcgatcgtttcatctgttgtgaatgacgccacctttccaaagtcaaatttctcgcctttaataagggcgtcataaaatgctttagcctcacgacacgatagacctctatagagaatgtcactgttatcaatttgatgacgtctaacgatagagtcaagtttcttatgaaattcttcgccaatcttatcgttcatgcattgccaaagaattgactgttctttgcagtcaaaacgattggctaacgcttcccatacgcttaaatcatacacaggtaatcctctgtgccgtcgcgcggaattcagaatatcaatagaatgaatgctttctgttagcatagcttgtgggtttaatgaaatagccatgatattctccatttttggttacgagaggtatcttatcatggctttttgtaagagtaaactactttgtgaaattattttgcccagggagaccagggcggcgggtcagaccagattgaagctagttcatctagaagagcttctggggctttaataccatacttctgtataattatacggtattcgtctttgatgtccttagaaatcactggatgaacttgaacctcttcctgaggctcttccatcatttcaaacaaatccatcacatgaaccactcagtattacggtacaaacaaccactgttgttatatccatcagctgctttttgcaacagagggcttggagtcagtttgataaaatctgcgcccatatatatccaaactaacttagtaaattctattagagaatctgtgctatcaatgataatctttttgcctcttgaaattatgtcattttcgtattcatataagctagtttcatgacatacattggtgtatcctttcaagtggagagcatgcagtatagaaacaggacttcctggaactgtatctacgtcaaagacatgggcagtcttaataatgccataatcttcagaaggacgccaaccaaacgcctcgaatttattaactaagtctttgaaatctttatcgaatgtactgtatagagcaacagtaaaattctatcttggtctagacgcaaagctccttttgcgtcatttcttgattgaacattacgttgtaaacttactttatagatttttgtggcaaacacaaagagctccttcagtcatgttgttgtcttcaaaccacttatcatttgctttaattaaagcaggtgcagcttttagtaataacgctgcagctcttacacctctgtaccaacaatcaaaatgagacttctttaatggtgattgataccagggcttagtataacatatcatcttcttctcctcagttagtaggaataatataccattcccagtatagcataaaaggactcccggaggagtccttaattttatacttctgcatcagctggaacagcttcaaacattttcgcgttggtggttgcccaagttgcagcatcatcaactactgttgaataagcatctttttcagatgggaaaatctgatactgtgcgttagcaatgcgatgtgaatcagaatacaccttaaaagctacagatacttctttacctttaacttcaccatcagcagttgtatggtcaaaagttttgatgtttacgtaagccattatgttctcctatttaggttacaggagtatttatatagctgctgtaagcgcctttaatatttctttatcaatttctcgagtgatttcttctcgaagggccaatactaaggccctttctttttgttttctgataatttttaaacgacgcttagatattcttttagccattaatatccattatcttgacgttcaaaattatgtttgtttttcagataatacagcttaaagatttcttcagaatccagaccaagcgccataaacatattcagaacaaagtgcaggatatcaatcatttcaaatttgatttcaagctggtctttgtcagacaggtctttgatataagtttcctgcatcttgacgtggtcagctttccatggtttccacacagcgctagctgccttttcaccattactcataccgccaagagacgtcagcaattcgcggaattcgtcatcaatgtagtctttttgattacgcagccattgcacgatatcaccagcttgagccaattcatcaggatgcatgttagtaccaggcttgtcatttgcaagacgaacctgaagagatttttgcatatcaagcattacttgcagagggtcaccaccaactttacggacgatacctgcgtatcgagcttcagctttatctgcaccagcgatcagttgactacattcgttaaagtgtgccattattttattcctttcaattaaattagataaatattatatcacttaacataaatagcaggaggattcatgtctgaagtgaaacaagaatgtaaagacaaaggaggatttggaagatatctttacgtcggaatcgccactgctgctttagctgcatggaattatgtggtagttccattagctagcacacacgggctagttcttcctccaatgccgttagaaaaagttgtgtcgtttattatgactggaggattgctttagtttaaggggctttggcccctataccttcgcatatttgtcaagacgcaatttagccattaaaccctgcgatatattttgattaatataatccgttatttcagaagcagttgccccctctttcataatcatatcatttatatctttgcttttccaaggcgatttatcccagaaaactaccttttcaccagcatctactaaacgtttcatacgcttaattgtatcaggatgacgaggttcatggtccataatccacgctcggttatcatggcatggaacttgagctaaatctaaagacccgccagtgattgcaatagcattatcaatgaacaacgaatctattggtccttccatgacgaatacgagttttgactcatcaatagtgtcgagaccataaattttggtcgcgtgttcatgggctttgattgtgatgtatttttgtggagcattctttcgtagtgctcgtccttgaaacgactcaatctctcctttcttgttgaagataggaataaccaaacgtggttcgttcgtctcattcttataggttcctggattaacggagttaacaagagaaggccattggttagtaaaccataaccttttccaagaagtgcttggaatacatctggcagtcacgtatttaactatcggatgttccttaggaagtctatctaatctctcgcagaaattaagtttttctattacggggagttttgcattaattttctcagacggttctacagcctttggcttatcaaagacctgctcctttcttttctcaagaagatactctcgatagaggtcgggttcattatctttaagatactgcgatagccacttattatactcacagttgaagcaatggcagcgcaatccttgacctgcatcaaaaatccagaatcgtgctttattgatatctttctgtgagtcaccacaaattgggcaacgacagtttaacttgaatgttgaagatgtagtaacgtgtctaaatttaggtaggtgagatattgcacgaattgcatactcgttatcaacccaagacataatatttcctctggccttaaactaataaggccattttatcactttttcttggcagcgtctttatccgcttttcgtttctttggaagggtttctgggcctttatttactactgcgcccgaagtagtgcctgatgcaatgttctgaggattaccgccggcatcgccagcaaccatttcctcattaagtttaacaaactctttaaatgttttcatagagcctccaaactatttattatttccaccatcaatacgaatacacttgtacgtagtgtagactgatggtgaaccgaacccggaatcggctttgatgccagtaaattgttttcccgcatcttcacatttctgagccagcgaagactcgttcattcctgtgaatgataacttttcagtagaaacaccgccggcaccagtcattatagccattactaatacgtatgtaatcatccgagaatccagcttgcaattgtgaagttatcaaaattagcatcgcagtacagagcatagttcagtttaattgctgcgccatcattggagatttctgcctgaacttctttcatcttgcttgggtcagtgttatcaatgatatgacctacatcagcacgaatctgctcagcaacatctttttcatctgcagtcattgaccattcgcagaggtctttgtcatagttcgccagagcgggaacagcagagcaacttgatactgcgaagattaaagcaagtacaatctttttcattttgttttcctcagtttgtttcagtaaggccatagtaacatggccaaacttaaaagtaaactaccttttgaacaattttttcaacaaaatgtcagaggtcagattcttggtaggtaggtatgtagcagagttaacccagatgccatcgctgtcatacaccttgacctctccatagtcgcatacagataggtctgctttgttatatgcctcaatgcctcgatgaatggtatctgtggctgttacaacaaaagagtgacctgactggtcacggaccgcgctaaacacaaaaatcataaaatttacctagaattttaactcttctgccagagcatcaagcttagaacgtgatactcgttcctgacgattagattcggctacacggttctgtacacctgcaccttctcggacggtattggttggattaggcttagttgggtcgttttgcttctcaatttctacccagcgttgattagccttatgcacgcccataaagaacttattgttgatgttcttatcaccgtaacgtgatttaatctgcttaattaactgttgcttcatctgagcaagttcaggggtttcaatcacagctaacataaagtctgccgtagcaggtagacccgcagattctgcaatatcactcatgtccatatcagaagcatcccaagccgaacgaccgacctgagctgcggtccaaagaacagtttcagattctacagccaacgcacgaagttcttctgcaatagctttaactaacgtgtaactgttttcagtatattgacgaatacgacaagaagcacaaataccaagatagtcaatgatgataacagtcggtttaaagttcttcttgagtttcaactcattcagaagagctcggaatgtattagcgttagcgccaccagtcggatactgtttaatgattaaacgaccaagagtactagaactacgccatttttccatcttgcctttatattcagcgtatgatacacatccatcgtcaatatcgtcaagtgatacatcaagcaaattagcatcaatacgtttagcacaaacttcttcggccatttccatggaaatataaaggacattatgccccatctgaagatagtctgcagccaatgaacacaatcctaacgatttaccaacgttgacgccagccatcaatacgttcagtgtaccagtctcggcaccacctttagtaattttgttcagaatgctaagtttaaacggaactttacgagctttattctggtatgataaccaacgagcttcataatcttccatccaatcatggccaatatagctatcaaacgatactgataacgcttcacgcatgatatcaggaatagccccaatatcaggaagacgcttatcgcgtttatttggctcaagctgggcattagtctgaatttcaataattcgagacgttgcgttgtacatagccttttcttgaacgtacttctctgtttccttaactaaccaattcaaatcttcaggagcatcagataacttatcaataagtttctttgcaccttcatgttccgtttcagttatagacgaattatcaagtgctacacataacgcagtctttgaaggaattgctgtgtattcattaacgtgtttcttaattatgttaaacaccgtctgagcaggtccttgctcgaagtactctttgtccatatatggccaaaccttcgtaaagaaagcctggttgtaaatcagattagctaagattgtttctaccactttaacctcttaaaagattttccataatgattttttcttggtctttaatgcactctggatttgttgtttaacacaagcttccacatgaggataaagttcatccttatgagcttcagatggtgtactgaactcaatagttacttcccccgaaggagaaatatttaatttatgaacataaaccaagtgtgattgaccatttaattttatcacaatttcttggataacagtcttcatagcttcttggattatttcatggcttttcttgaacactcgttcttgacgctcgaagtctccc

SEQ ID NO: 16 - DNA, 47889 bp, unidentified
  source 1..47889: mol_type = genomic DNA
gcacgaagactggactcctgtgtttgagccggtgaaaggcgcgggcgttcctatcagtaatctggtttacaactcggcccgcccgaacatcagtctgcagactgtgcaaaacgggactgtcattattccgaagttcgcacaaaagaaatacgacctgccggaatctattgacacatggcagtggaagaactacaccatcgtcaaagacggtatcatccatatgaagacccttcctgtggtctgctcggctgaaaccgtatctgaactggttagcaaaggcgttgaagtttacggcggcccggaagtgttcatcgtaaatctgggcagcgttcctctggttaaccgcgcgatggttaagaacatcagcgctgcgcagttctttgctgaccatgtccgtctggaatccctgaaagccaagcagaaggttctcaaatatttccgtgacgaactggttgggaaaggtaatgccgtgggcctggcaggcaaatacggtgccgaagcggctgagtttctgtctgcgaatggcatccgcgattacggcttctctccgaagaccgcttcggttgagtctactgatttctacatgagccgcgaactcaatgtgaagatcaaaggcgcttcctcgctgccgtcaattgccgccgttctgaagaaacaggcagacaacaaaaagctgaacgcagctgatcagctgatcgctaatgcgctggcagaatacaacgcctttgtcaaatctccggcggtgactgcagtcccagaagcaacgcagaccaagatcattgaatcttggatcagtgacgctgccaaggccgcaatcacccaagtgcgtgagctgaacaagaccctgtccaaatccctgtatgctatcgttgctggccatggctggttcaccgacctggatctggaagagtccaccatggaagtggaagttgacggcgtgaaatacaccgtcagcgcagtcctggaagagaaagagatcaaaatctaatcaactgtgccggggaaacccggccttttcataaggtatcccaaatgtctaagaatgtgtcttatatcgatgtcatgcgcttccttgtccagtatgcaagcgacaatctgaatatggaattatggcgtgagaagaaacactccgtaacaatacaatccgcgattgaaaaaatcgaagatcagctggataccctggctcctctgcgcgtcaaagaacatctgggcggcgatgaacttgacgcgatagaaatcatcatggaactggaagaagaatatgatgtagagatcacggatcattggatcgggtctcaccaagacgacccaactctaggtgaattggctgaacacgtggttcacctattaaaataattttgaagttggctttacttcttcaataaatgatttaatattaattttgtagggcgggaacggctcccgcctgattgaagaaggtgctatattatggaacaactactccccgaatccgtatgcacatacgttcgccttgcaagtgaaggtgacgaaatggccacccaactcactgacctcatcctgagctacggtatcaagaaagtcaaccaagttgataactctggtgtgaaaggcgactatatcgttctgaaccaccgcggtctaaagaccaatccggtatttttcgtcggcgttcataagaaagatggccaggaagtcgtggagatcgtatcgtgagtaataagaaagtagaaaccacggttgaaattgaaaagaattggggtttcctgcgtgctaaaggtttccgccgtgtgtatgctgcgaaggaagtctatgtccagcgtaaggacgttatcattagcaagaagggtaagtcctgggtagcagaagaagtagacgaagacggcatcgtaggcaagattaaggccaaggccgaaatcctctttgctcttctgaagcaaatcaactaaaatcaataacacggacggggtatgatagccccgtcaatttgaagagactatatcatgaaaaagttaatcattgctttggctctggccagcctttccttcgctgcacaagccgatcgtgtcatcaagggtataaccactgatggcaaatactccttccaggcatttggttctgaccttgtcctttataatggtgcaaagcggctgtatcattgccgttacgacatgaccactcgcgggattgataaagcagaagatccatatgtgctggacatataccagtgtgggaataaaactctgggtgtcaaaaccttcgggaatatcgaagaaggtggttgggtaacggtagtcgcgaccgtcaacaataaacctgtcactgtattccaagagtcatttgccatattcaccggggcgaattcattgtgatcaaagaaggggctgtaaaatgattattaattgggaattagtcggattggtgctcagcattattttcggtgtggtgggtgtagtttgggtaatcattggcatctggttctatcgtttattcaccaaatatgagaaacgtgatgctgaacgcatgaaacgccaagaacaaatccgcaaccgccgggagaactggtggtgatggtcacaataattgggtatgggattattgggttagtcctattcttgatcattatctgtttcactaaacatatgcgctaactaagggataactccatatcccgaggtgtgccatgttcttgacttcctttatcgactggttgaatatcatcaacggcctgaggattcctgtagggaacctcgggctttctcgttcttctatgccacaaattgacgctgataaacagcaagacttccatgattatctggaggcgaatggcgtgaccatagatgcatctcaagtcccgatccggacattacggctgactcagaacgagatcaacaaaatgaaggtctggaagatcatgaagcagatcaggaacaagaagccgatgggcagggtttgggtatcttcagacaattacgtcgtggatggttcccatcggttcgttgccgctctgaatatggacggcaagcagcgtatgaaggtttacaaagtagatttgcctgctatggaatttgtgaaattggccaggcagttcaatggtgtgcgttacagaacagtttcagattcgagatactaaaatggatttttatttggaacttgtaagcatcggggcgaaaccgcatttcgtcaagaaatatctttcgctcctttcttcatttaatgattatcgcggtgatggtgagaaacaccatatattaccagtatcgttgtttccagagtacgctaaatccagtttcaatatagttaaattgccttatagggttcattatattgttcatttatgtttggcgcttgcattacctggaacttctatggtcaacgcagttatgatattaagacgcgccgacaggaaggttaattctcatttattcgcaaagatgcggaagaaatttgcacaaagactttctgaaacaaataggggtgaaaataaccccatgtatggtacaaagaggtctaatgtggcgaaggaaatgacttctacatctcttttaaagttttatgaagagaaaaggaagagcgatcccgatcttaaaatgttcttttctgaaagaaattctaaagtaaaacggggtagggaacatcattgttatggtaacagattaactaatcaacttactacagagcaagaaagaaaacgagtagaatcatttaccagggcttcccgagaaaagatgccttgggagaaacctagatggaaaccagaaagagatcaatggtggtgttgggctgctcatatacactattatctgataacaggtaaaagtagaggcgaagccctaaaggaagtgtttggttctaatgatgccgaaatttggtcacaagttagacccatcatgcttagattagacagtggatgggatccgttaacttgccataaatggttgaatagatacggaattgaattccagtgaaagtttctgaataaagaatattattgaaatcctttactcaataaaccttccgaactactatttcctcaatgaacaagagggaatcaccatgaaacgtttaatccttggggtgctgctggctggactggcgctccccgccgctgccaaactgaactccacaggtgagaaactgtgggaagatctttcttactgtgctggatggtctcaggctgtcgccatagacaagactggttctatcgagaacttttctgaattgtggaacacaggcaacgtatctgacgctgttgtcaacgccggaattgaatttaatcgatataaacaaggagcctataatctcaaaggctacctgaatgacgataaattcaacaaaggtgggatggatgcctcagatttgatcatgactgggcgtatgggtacggcaggacggattcaggttagacaatgccgttcgcttcccatcccggcgcttcagaaaggtgtcaacatcgggcgtcgccatcttgatctcattaatgatgggaaccagtgcgtcaaagtatttgaatacagtgccgatcagatcaatgatcctaaattgaagaaagaatggcggactcgtgctcttgggcttcgggcctggctggtagagaatgaccattattaccaggacagggttgattcaggcctcaaagatttatcgaccaatttgtctgtgaatctggatgacccacgactgtcccgggaacttcagcagacacgtattgattgtgacaacatgatgaaggagaacgaatgatgcgtgcgaaaaagtcgactatcataatcttctacctggcattcgttgcagtctttgtggtctgggcaagcaatgcgttggcagtcccggcgaacaatctgaacaaatgcgctgcatggctgtcaacgtatcaacagttccatcctgacgataaagatacttctattttgctttccgattttgaaggtgaaatgaaacgtttggaccagtacagtactgaccagattgagaatgctctggatttaccaatgatggattccgcagcagataacagtcaccaaactgctgtaaacctgtcatattgccgtgagattgcgattaactttacccgtaatcaaaaataaaatcgggttaaaatttaggctctaattgaaaatgaccggagtactttaaatgaccgacaacgaaattgcccagatcattaagcagcattcccgttttgctccggatgctgctaatgtcatcatgctacacaaagacggacgtgtattctttgctgaaaaatttgagcaagggagccagttctgggatgcgagcacgatgcttccacgtaccctacaaggtatcatctactcctgttctctggtagcgaagcggagcgatgctggtcattgggttagtgttaatgatctcggtggcattatgggtgggaaagaatatccgaccaaacgctccccgccgccttatgtcaaagaacagatgtccaagattaccaatcgtccaagaccgaccccgaaagaaccgaaagtcgaagtcgttcctgcaacggctgtagaaacaaaatcagccaaaaagggtactgattggcgttctgaatttatcgggattaaagaattggattgtgaacgtaatcctcgcaatcatccattgttcgtgtcaatacggactgatggtaaaatcatcctgagcaaaggtcttctggataaaatcgatggtaattttgattttctggtgtctaaggatcggaaggtcattgccctggtgaaaaacggttctatgtataatatgaacaaatcggggaattactctcacaaaggtctgcccaagtatctcaagttcccagaagattccggtacagttcgaatctatatggactgggaccaagaaaagaacgcatttatcggcagtctataatatcggggcggttataatgagcatgctatttgatgtctatctggttcatatcgccgctagtcaatcccaacgttctttcttcgtgctgttgccagcagataaaggtatgggtattgatgacttatctaccctggagcaccagttcttccaacgttggaaagacttgggacaccttgttaatttcaacaaattgactgatgagatcgctgcgcaagaaagtgacggtcttcgacttctttcacggtctgaattacaactaatcaggagtaaacatgagcagccgtatttttgatctaaaattccgcgtttggcacgttcctcaggttcccgggaaaatgtttacagttgaagtcccgacgtatgctgaagctgaacgtttgaaatcggcgctggctgattatgatctgttccagtatgagaacaacatcaagcctgattattgcaataccagcggtattcagatttatcaacacgacctcacagaagaagagatcgaagaaatgggccttgaagatcgttgggtggatatcgaggatgaccaagatctacaggattatctggatcatattcgttctactggttgggaaataaaatcatgaccatgatcagttcttatatcgttcaaaaaggtgatacccttatggggatctgtatgaaattttattcggatccctatatgtattcagatatagcgaagtacaacaatatcattgatccaaacaaaatttgcgtcggccagctgattaaatttccccggcctgtcaatgacccacaaacagtcgttatcccggtagaacccactcagaaatgtttggatgctatcgcaggcttattccaggaaggattttgtgatggtcgtatagaaagagatatttatgccatcatagtgagttcggctctgaaccaataatttattgggaatcggcaaataagtgctttattcaataatttttgttaggtaagctgtaatcctcttgtagtgaacacagaagtaaacatttaacataaaccaactggagtaatccgaatgaatcgtcaagattttatcgcacatatcgcccaaacccagggtgtgaccaaaaccgaagctgaaaaaactgtcgcgtcctttatcgccggtatcaactctgccgtcgctgcgggccaatccgttcaactcgtcgggttcggcaccttcgaagtgaaacatcaggaagcccgcgctggccgcaacccgctgaccggggctgcgctgacaatcgaagcgaaaaatgtcgtcaaattcaaggtcggcgaaactctgaaaaacgtcgccaacggcaaataaaacaaattcggccagtaccaggcgcactgcgcaggcaggtacaaagagaaagccggggattaccccggctttttcgttcttgggattcgggtaaactatactgacacccccaaaggagaaatcaagtgacagcattcaaccagcatgccaaagcgctggatactcttcgcagagaaataccgatagaagaaatccagaaattggccgaacgatattttccatatgaccacgccaaccccggccaaatggaatgtattgttgaagccatagatgctttggtcaataagaaattcaaacacgtgattatcgaagctcctaccggagtcggtaaatccctcattggcacaactatccatcaagtgttacgacaccttgtgcttgaagcaaacccctatggccaattccgtacatccatttccacgccgaccaaaggtctacaagatcagtatgcggctgaaaaggctgttgctatcgatatcctgaaaggcaagaagaattatcgctgccatatgcacccggatatctattacaacgcagtgcaatgccgtatcgcttgccgggatgggcattgtagtaagaggcgttgcccctatgtccaggcacgtaatctctggaccaacatctcttcattacgctgcacaaacgcagccatgatgatagaaatgtgcaccaccatttgtatgaagccagaaaaccgggccgacatgcttattttggatgagtgccataaaatgccctctacactcctagaccatacgatcatggaatacaatacgaaggtattggaaggactgagatcgttgcctcaggggaaggatatcgtccaggcagtggttgagattgtatcccattgcaaagactatgaattgggcaagctgtattcccttgatggttatctgttcgaccgttttgtggacttgttaggaaaggtggaagccattttaacagaactgcatgaactcgttgaatatgaccgcctgaccgaagcccaggtaatgaagctggccgatattatcgacaccctccacaacctatctgactattgtggtatcatgtcacagacccaggcgagtacattcatcgtacaggagaaaggagaagaattcatccgattcaaacccgttatagcatcggatgtgtctgaattcgggcttttccgcaaagccgattatcacgtgcatatgtctgcaaccatctgtggaattgatgcgtatgctcgctccttgggtattcgtcctgggcagtaccataagatacagatagggaacccgatcccgattgagaatcgcaaagtcaattacatgccggttatgaaaatgaccaacaacatgggtgactatgagatgcgtcagctggccgggtttgttgacgagatcatacaattccatcaaggccagtcgggcatcattcatacggtgagttatgaccgggcgctggcgatacagaagttcagcaaataccggaacatcatccacgtacccaggacccgcaaggctctgatggaactgatggataacgctttccgtacgaagacgccttgcatcattgccagcccggctatggaagaaggatatgacttcaaaggggattacagccgtttccagattcttatcaaggtgccatatgattaccttggtgacccattagttgcgcatatcaactctgtggacccatcggcgtatttccggaatgccatactgcgtatcatacaaatgtgtgggcgttcggtcaggggcgtgaacgactgggccgcgacatacatcctggattcttcctttgaatccttgatgatgcgcaacccagagttctttccaacttggtttaccgaggcagtatttgaagtttaataaccagcaataaatgacaggcgacatttgagattcggtgccagggatgtcagggatatgatcatatcatcgctgtccatactgtactcaattgtcgccagttgctgggtttgaacattgttgtattcactgtagatcaggtcctcaccacggaaaccgatttttccatctgtatcttgccaatgaccttgtgttttgtcatacacatggacacggaattctaccatatggaaaagcgctttcggtatacttttcaatatactggtgccgacgaccgggatatcaatatttgaatcattggccccgccttcataaactggcgtccaattgaatataggatcaccaccagcgaccggagtccttttccaatattggaattccgggttccctgaatcgtttttctgcaacaatatgacttcgccacctgtaaaattggtggtgtcaatatcgtctcttgctaaaatatccgccggggagccgataaatttccagccatcacgatccaataatgacttataatagtctgtgaaaacgttgctgtcgccagcattgttgattgcgtctttgagaccttctcctgtgaccatctcattgactttcaaccacatgtttttgaccgcagacgctgctgcaacctggcctggtgtaccgcctgcagtgtagtcatagatgatgtctacattctgtattgcggtctgtatggacaggagaagtcgttcgatttcagctgcggttaaactgaaacgataagaacgttcagccataataatgtcctcatgataaacaagtttggagtatttatatcgtgattgaaatttacactgacggcgcttcatcgccacagaccacacaagcggcgggatgggcctttgcagtcagcccgatttctggcggggcgcaatggaatgtattctatggttatttgccgccgccttctacgaataatatagcagaactcttgggcgttattaatgctctgaaactcctttggaaattttcgggttgtggtgagcgtaatattcccaaagcgacgattatatctgacagccagtatgtgatcaatagtgccaccaaatggcgttcgaaatgggaatatgagggcatgcctcccaagaatactgaattgcttcttgatttgttcaatatgtatgacaaagtttgttcaatttgtgaacttgaactaaaatgggtcaaaggtcatgcgggtacaatcggcaacgaaattgcggatcagtggagtgtccgggccaaagaaaatagcagtatggtcctggaaaatgagcgatttcgcgtcaagaaagtcgtcggttcattcaatcaatttatcggtatctctgagggttagatcatgggcatgaatttcgtagacagaggggaaaacgtcaccaaatatttcactgacgaagacaatgagcgtgtcatcgcaatattacgtgactggatacccggaaggaaaaaggcgatagccgaagggaagcccctacccaagatcccaaattatgtggccactaaagtccatatgatcatccagaaaatgagtacccgctacaactacagagattatcctttccgtgaagatatggtgagcgatgccgtcgccaatattcttcgatatttacacaccttcgacgtcagccatgtcggcaagaaagggaagatcaatttcttctcttgggtcaccatgtgtgctgatcgttcattcgcccgcaaattgaccatcgaagaagaacacacatatatcaaattgcgttcgttcgaagacgcgggtggctttgctgcgttcagtgatgatccagacttccagactcagacatttgttgacaacactgggattacaatggattttcgtgagcgcataggccacttcgaaaataagaaagaatcccagcgtgaaaaggaaagacaaaaacaagccgacctcaaagaagacgaaaagaataaaaagattccaaaaggtatacttcaatgtcttcgtggaccacaaaataatactaccgcacaggccgaagatgattcagaacaagacttcggcaaaacccaattcagccttgaagaaataatggatagccctacgctgctatccgaattatcaggagaaaagaataatggcgattgctaagatcggcgatttacatatcgggagccgcaatggctctcgttatgttcgtgacttcattaagaattatctcatcaactatttcattcctgaactcgttgatgccgacatcaaagaagtctggcaattcggtgacacatttgatgtccgcaaattcatgtatgggcgcgacaaagattggctaaaatatgatctggccccggcgttgcgcgctgctggtatcaaatggaatggtctgatcggtaaccatgacattactttggaagagtccaaccgcatcaactggccttcttatttggttgaacttgctcccgatgtgttcacatattactccgaaccgacggaagttatggtcgagggcaaaaaagtcctggtgcttccgtggatcaacaaagagaattatgcgcggtcagtacagatgttgcaagacactgatgcagagttctgttttgctcacctggaactggctggtttcaaaatgtatcagtcctccacttgtgaccatggccagatcgatttggccctgttgagtaagttcactcgtgtagacacagggcactttcacacccgttcgtttgaagggaatgttcagtacctgggaacgccgtatcatctgacatgggaagaccacaaagacggggataaccgtggattctacgtggacgacctgacagaaggtggtgagctgttcatccccaacaacgccagccaaactctattccggtatgtggaatatgattacaccaaactttcatctgatgacgaaggtaattggattgatccggaatggctaaacaccaagttgggtattgaaggacagatcgttaagattatcgtaaccaatcgcgataattctaagcattacgagaagttctgtgatgcgatgaagcgctgtaaatgtattgactacaacttcatcgataagaccgtgaccgtttcggctgaaaaggttgaagtcaccgaagaaatgatcgcgaccgatgccgtggaagttctgaagaatgatatccgcgctgctgacaatatccagcgcccagaatcagtctgtaaactggccgaagcattctatacagccgcccaacaacgtcttaatactctggatgcataacgatgacagatatccttgaaaaatttggcaacctgttaaaagaagctgcgacgccggaagatatcccggttccatttgatgtgcgtggtgatgttacccacaaactcaccttccgtaaggggcgggcgaagaacttccgttctattggtaatgaattcatggaaattgattaccaacgaaacccagcaaccctcgttacatctgatgataatggtgccgggaaatccactatgttggtctggctgttattctttgtcctgtacaacgatacatacagcaagaaagagaagaaggccgggctggtaaactcccagaacaaaaaggactgcgttggcgaagtagaattcgcctgccggggtagtgaatggaaggtccgccgtgggatcaaacccgacttcgttgaagttcatcagctggttgacggggaatggaaacaggttgtaaacgaagcggctaaagccgacatgaacaagtatatcgtcaacctgatcggcatcgaccagaagatgtttgagaactccctggttctgggcaaagagaaattcatcccgttcacggaaatgtatacggctgaccgccgtaccatggtagaagcgatatgggatcttggtttcttcagcctgatgaacgaagacgtcaaggcaaagatcaaggtgctcaacaaaacgttggaagacatttccaatgagtttggtatgaaaatgatcgaccataccaacaaaaagacgcagctggcacagatcattgaatccaataaccgcatccaacaacaatctgccgaaatcctggagcaggaacggatccgactttccagtctggatgcggatatttcttcgtatcaagatgagatggcccggctacaggaagtcgaagtcaacaccaaaaaggaaattggtgaagtagaaagtcgtctcaatcaagaatctattgaagagatagaaaacctaaaggcacaatatgccgagaagatgaaagcagtagatgacattgcatcagataaagctgaagactatgagcgtatagaattgtcttcggctgagcaggcgcttaacgatatccgagaccaagcccgtaaggtcactgaacgcaaaaacgaagtactcaaccagcgcaatgagaatctgaatgttctcaacgaagcgatggaaaggctgcgttacggcgaaggtttcaggatcaaattccaaaccgaaaaagaagggtatcaggaatccattcagaagttccatgatatgggtacttgcccaacttgccaacaagaagtatctgaagaagctaaatcccaggtccaatacgaaggcaacatcaaaattaaagatgtagattcccgtattgaacgactggaaactatgctggaagaaatcaataccaccatagcagagcacaaagcgaaagatgatgaatttgttcgccaagtcgctgaaatcgatgctgagttaagttctctgcgggatcaagcggcagaagcgcagaacggtattgaaacgattaaacgggatattcaagagttctacaaaactgctgaaattgagaaggcttctcttgaccgtgaactcaaatctcaaatcctgtctaaccgccaggcgctgaacaccaggttcgatgacattacggcatcattacaacaaacgttagagacagcctctcagggacgcgcaactgtcaaggataagatcggcgagctgaaagcccgtcgtgcccctctcgttgcttcaattgccgatttggagcgtaaactatccgtacagccgactccaactgccgacctggaagcagtcattgcaggtattgaacaatctctgaaagatctggaagaacggcgtcaaacgacagatgaagaacttcaggatcataatcatcttctccacttcttgaaggatgaccagaccaaggcccgcattatctccttgtacctgccattcttgaataagaagatcaatgaatatctggaagggatgaatatgttcttggacatttctgtggacgatacgtttgatatcaccatgggaaccgccgggcgtaaaggccaaagtctcttcagcttatcttccggccagcgcgtccgtgttaacattgccatcatcatggctctgcgtgacgtcgctaacctgaaagcatctgtccaatgtaacatactggtgtttgacgaagttctggagaacctttctgagcgcggtgtacaagaatgcattgagatgctgaaatacaaattcagcaataataatctcttcgtcatcagtcaacgtgagcaggaattccaggaatacttttctcataacattcgttatgggctgcgaaatggtatgacccaggtgatcagcaaggagtgatcatgaaagtcgtccatttcaagaaggaaccatatgacatctacatcgggagacccggaaaatgggggaacccgtttgaggtcaaagatcatgggcgcggtaattgcatcgaattatttgaagatgatctttaccgacgcttgataaatggagatatcacggaagatgaactccttgaattggacggaaaggtcttaggatgttggtgtaagccgcgcccttgccacggcgacgtttatgtcaaagtggtcaaccgtattaaactattccgattgatgggtaaatcctttgtagagcacttgagacaaacatatgggaaataacatagacgaaatattcgaggcatcaaagattgcatgcgacacctggaatagcaagaacccgaagttccctgtggccatcggtgttatttcataccatcttgaaggatacgtgatatttgttgacgggaaaatcaacttttaccgtgatgggcatgaattcaacggattattcaagatcgggaattacaaaacttcatttgatgaccctatggaactggtgtatgcctggttggaatgcatcgaagaatgctataacgccaaatttgaataatgataaagggcgctaattatctggtgccctttatcttttaaccctgtcaggaggctcaatcgagctgcaagtcgacaaacaaataaggaacgccatcatgacgatgacaacgttgaaggccatggctgctttcgtgacctttaccattgccagcgggagtgtgcacgcttcccaaagtacatcacaatgtgactatgatttttctgagcaacaactatccaccatggcgactgcataccacgtaggcaagtcccaatctcttggttacaccctggcagctatatcctggagagagtcccgtgcgggcgaagacgtcgtgtctatgcgatctggtatcaaagccgccaatatgggagcatttcaaaacaaagttcaaagtgttggggatcgggaaggatgcaagaacagaaagtgctatgccaatgtagctgtgaaacttttgattgatcaggagtatgctgccaacgccgcgctggatgagatgaatttctggatgaaccaacataatcagaatgtacgcaagtctctttcatcgtataatgccgggcacgcacgcaacagcaaatcgaattcgtatgctgccgatgtagtgaagaaggctaaatatctgcaaagatgtgtgtctttcaaaggcattcccgcgagttcgaaagttgatcctcaggtgatagccatgaacaagcgcactatagagaaactcaagaggacgcgataatgaatatcaccccatctcaaacaggttatgagcacctgatggtcttcctggctattcagggagccaaagagggcatcataacttcagaatacagcgggaccgtccgcttgatcgactacacggccagcgaagcatttatcaagaaatgtatcacggcatggaccaaatatgctgttgggacttacccggcccctcctgctggagaactgttatttgtcgtgcctaccctggcgacaaccgatactgacgagatctttgccgatatgctgtccaaaggatatctggcttatgacacacagcatgatatctatgacttctcggccttgaatcgggtgttcggttatacgatcacttctgaagcgaatatcccagattgggggatcctggcttggggtaaagatggccttggggcaacatatgcttcatctgatgttggaccagtccttattgatccgggcgttaccatggaacaataccttgcccaattccctcagcatggtgtaacgggtagcgacatcattatcgtataccctggttctaacgcccttgagcgtcttgtgtccggatgggatccacatctgaaagcggtcgtagaaggtatccggttctacattccggtggtgacccccacgccttaaaataattcaataaaaaggggcttcggcccctttacttattcaataactacccctataattcaatacataagcagtacgatgaaacaaattgaaacgaaggaactacattatgaaaattatcctcgacgcatatatccactacggcaagaaatatctgatggcgaaggtgtacgaaggcgaaaccctggtacacgcccagacccacgaagatgcaaaactccgcgaaattctggcacgtgacttccccggcgttgaagttattgagccgaccaaccaggctgaagttgacaaagagtgggaacgcgaatggagtccggctgcgttggccatcgctgaaaagaactggaacaaccgtgaaaacgccaaccgtccgtttcgccgttgacacaataggggctataatgcccctttcctttcgctaattaatggaaaccgtccgttttattatcaggagaaccaccatgtctacaccgaacttcttagatttcatgaaagagcgcgaccagttggacgaagcgttcaactcagctccttatgaactcaccatgggcaagaaaaatgccggggacgttttcttcaccttcatcgacgaagatgataaagaataccgtatccaattctataccccgcaaggtctgggtaaaaacgtccgccaggtctttatcggacagaaacgtggttcagtttatcctgatgccatcgcccgtttcaagaacccgatgcgcgttatcgccagcatgatcgaagccaccaaacaattcatggcgacgcctctgggtaaaaccatcgatggttatgccgtcaacttctctaagaaagcgctggatcgtggtatgaccctgatcccgaaaatcattcgtcaatccggcctcaaacagaaactgaacgtcatggatcttacctacgcgcctgtccctgaccgtggttatgtttggctggtcaaaaaaggaaaagacccggctcaggtattcgacggtccgaagatgcagggtatcacctgggatgatccagacaaggtcggtgacgtcccggttcagaacaatactccggatgtgggggcttcatcttctgttgatgattccaacggatggaaattaacttcaaacggggatcagcccatgttgatatgggttggtaaggagagaggccgcatgaacacggcaaatatcgctccccactacaatgagccaggcgtgtatgttggcgcatacatgaatgagaaatctgtgcgtgggcaaagtgctgatttcattgctcgtcagttgaaattaccgcaagtccctatcagtatcctgaatgatttcaccacggcgtccacaaaattttggaaaggttctcagcagaagtccgcgccagctgactccaacaccactattggtgctcggggtgtgggaaccggggctggttcttctgaaatcgaagtcaaccgcgagtggtacaacagctcggacactggtctggagttgaagagcgggcgcgacccgattcgtggaaactacgtccgcctgataagcggttcgaaagaagtagccgtattctatggttataattttgacaaatatccagacgggactgaggtatcttggaatatgaagcgcggcttcaccaaccaagacttggtcggtgcgtccatgaccaaacagaagaaaggcatgtacgatcagtacactttcaagaaaggtgctcaaataattctggtggtggacgttgacaccagcaatgacaccggcaataacaccagcgatgaacttaccaaatccaagtggctcaatttactgaattacattggctacagtaaggcagctggcggcaaattatttggtgatgatgaatacatcaagaacttcgtgaaagaccgttacaaactgactctgtcaattgcgcggcgtaatcaatcagtccagatgtctgttaatgcctggaacgcaacagcagaaaaatgggtagcattcccgccatctgtgggtgtgttagaaaatgttgacatcagcgatccaaaacgattccccaaaattattgatgattttgttcaaacagcaacggactacgttgaaaagaacttggagaacgtcgtcgttggttggtataacaaaacggcacctgctggacaaccaagattggagttccgtgagaaatcaggtatgtatggtggtggtatcaatgtgataccaagttctggcaccccagtatatggtgtgtattacggtgcttcctcaaaattaagatcttttgcagaagtgtccggctcagacttgggtgtcctggccaaaaccttgaaactcccaccgattccgtctggtgtggctaaagagtttacgaaggcggcgactgcctggtggaaacagaaaaatatcaccccaccaaacactgattctggggaacaatccgttttggataatttgaagataccacgtaacgccacggtgtttggtgagactgtcaacggtatgtccatcacttggtccggcatcaatttcccggaaactgggaaatatggtggtgctgtattgacaactaatgtgacctgctactatgataaagacaaagtcgcattcacgccgatgatctcccagaaagggcggctactgaacaatccgaagacatatgaacttcctttgaagaaaactattgttcaagccgtgatcgatgaaatttcttcgaaaatggaaattttatctcggaatatgcaaactctgaaaagcacgtcctataatccgaaacaagtatttttggacgacattgttgtcgacaacaacggttcagtcctttggcgcgggcacgacatggctgatcgccgcactactgaattcatgttgggtatcttgaatgacgaaaatagtcgtctggagaaggagggcggcaaagggaagacagctgcagacctggcaacatatgcggcgtcgattgaagaaagtgctccaaaggggcgtgaccttgattggcgggtatacttaaccaacaatggcaattccctgcaggttgattgggaaattactttccgccgcaacacacacgtcggcgccatgaaggaattcagcgctcaggtctaccgtggcaaccgttatctggaagacgtatatgccgatgctaagagcagaggctatgcgccggaacaaccgaacctgatggcgatgtccgatgctcaacgtagcgatgacatggctatgatgaatggcgaagacgcatattccgaatacgagcagtcaatcggcggtagtttgaaaattaatctgaagtaaatgattagcccctgcgggggctaattatgaataaattcttaggagataaacccatgaagacctttctcgaattctttaccgaacaagcagcgcagcctgtgacccatgctggtgtacagggcaaaagtgttaccatcaaaaagcaagctgacggcactcagtggtgctctggtactgttacccagatcactccagacaacgcagctgacacctataacctggagctgaccgatggtaataccgtcaaagcagtgctgaccccggaccaggtacacgcggtgtctcagggacaggaagtcgtagccgttcatgacggtttcgaattcttctttggtaagtctgctgacaaaggccaggtcactgaagcatatgctcaggaactcgccaatatggacaaaatgatcggtaaggcgctgggcgtcggtaaatctcgcaagagcgggcgtaccgaatttgaatattcgggcatccccggtatcggcaaatctgttgctatcgacttcggcggcgaagacgacccgtatgtgatcgtcaccatgggcggaaagcaacaggacatcagcaaaggtaaaacgctggctgctgacattgccaagtacctgggtgtcaagcctcagtaaggaactcgagtgaaaacatttcaagatttcttgaaagaatcaccggattaccaagaaattggcaaccgtaaattcagacgaaaagatggttcttggatagaactgattccggctgatgagcacggtgaattacctccagccacgataacgatcagcccagaaatggctaaagatctgggccttggttaaccaaaatcccccttaaatacagggggatttgtttatttgacgtacatacacacctgggttttcttacctttttcgttcttgacgtccattaactttgaagctccatttaatttcattacagtccctttttctttgctgccggatggtaattcatattctatctcatcaccaggggaaggcatcccggcatgaggtcccatgaccatagctatcttatatcgcggcataccagggcgaccacctttatatgcataccaaccaccttccatcatatctttccattgtttgttaccatcaacagaaatatatgaatggcccaatgcaaggagttcaatatacttaccagatttattgaatttaacttcgctatcaccatcgaacttatccatttttgaaagtgtcgcgaattggccatctttgagacctgaaatttggataatttctttcgctcctgacaatatgaccgttctaccatcaggcgtttcgaatgtggccttatcacctgttatgttaactttagcgaaagaaccgacattatcttcggtagaacttccgatcttactggatttgatatgaaccgaaataggatctggttttgcttctgtaagaaaatcatggaaagttttcataagtcgtctctataatgtgtatattgatattatatagtgcgtaatgtgtagaaactaaatatgatattattcaatgaggacactaaaatggtcaatgcaagtgcatttatcaaccgtggtctgctggcaatagcacacacccatgctctccacttcgtcacgcattcatattccaaacataaggcactcggggagttctatggggacctcgaggacttgctggataccttcaccgaagcatatatcggcgcgggcgggacttatactcccggattcgagaacacgaagttgttcaacccagacccgatccaatatatccagagcatcgttatcgacgtcgacgccatttatcggcagtgtgattctcatctccaaaatacgttagacgagatcaagaccctttgctatcagacgctgtataaactgaagcaactggcgtagtctatagacccctctgataatataattgcccattatttgtcaactatggataaagataaagatgggcaagatcttcgttccaactcatttagaaggctgtcagatttcagccaaatatcttcacaagcagatgaattgcggtgccgtatttgtcgaaccgaatcctcataccaattctgaatcccctgatgcaatcggtttccgccccgatgggtgtagtattttgatcgaggtcaaagtcagccgggatgatttccgagcagatgccaagaagcctcatcgcatcaatcctgagcaggggatgggcagctatcgtttttatgcatgtcctgagggagtcatccggatcgaagatctaccaccaaagtgggggttgttctatttcacgcctcgaaaatcattgaaggctatccatgtcccagacatgcagatatcttccctgtattcccctcagcactatctgaatatgatcgcccgccgaagcccgaatggcaagatgcctccttatctcctccattatcaaaagatggtggaagacttcggccatgtcgtaaagaacaccgtcgctgaacacaatatcctctatggggcttggcgccagctctgtattgctcaaacccgtggtgtggcgtatactgtcaatgaggtattccagaggccaaacatctgatgaaatttcttgacgagcaattcataaattatctggcaccgcgcctggagcgtttctcatgggagcgcgtaggagccgtcgccaagttccgttgccctctgtgtggggactccaaaaagagcacttctaagcgccgtggtcatttcttctatgaccatgacgacgatgtctatcggttcaagtgccacaactgtaatgagatgagcggttgggcttttgagttctggttgaagaaatttgatgaccgtctgtacagtgagtacagcatggagaagtttaaggttatgggggatacccgcgcccgcccggtacagaaactggcacccttgaagaaactgacacagacggcgcgtatcggtcaacaagtggcgaagcgggatgaggaccacctcggcaatatgatccgacttgatctacttgacccaacacattttgctcgccaatatgtggaaggcaggggaatgccggagagcgctctatctttgttgtatttcagtgagaacttccggaaggatcttctcaatttcgagactgatccagagaagcagaagaagatccctgatgatcccagattggttatccccttctggactcaggacggtcgaatgaagattgtccaagggcgagcatttggtgataacctcccagaagggatgttgcggtatgcaactgtcaaaccccgcaatgaagacacgaaggtctatggcgaagaacgcattttaatgaaccgggtgaagttggtagttgaagggccgctggatagtctcttcttaccaaattgcctggcgacggcagatgctgatctattgagcgccaagggggatatctatgttcccgacaatcaatatcgaaacgcccaggtctgtgacggtatccagaaaatgattgacaagggtgtcaagatcgttttgttcccgcgagagatacgctggaaggatatcaacgatatggtgaacccgagcaaagggaatatccctatccgtgatcttctgaaaattatggccgacaacgtctatcaggggcttgcggcttccttacgatttgccgatttgaggaaagtgtgatggacatgaaagaacttgataaactggatgaccaggagatcctccggggataccagcaagcccgagccggatatgttctcagtggttatgaatcaccgagtttcgtacatggatggcgtaatggggtagttgattctggggtgtgtcatcctgatgctgatcagatggatacggcaagaaactatctgaagcaactacgcgaacaaaaataattcttccctccaggcctctatctacgaggcctcgtaaaataattcaaaaatattttaaatttttattgaaaaagactttactcttcaataaagctggcctattatagttcacatagggcggtaaacaacaccccgccgaatgaaaagtgaaaagcaccaactacataatgaggatttaacatgaaaactatcaaaaccatcatcaccaacggctctgtatctttcgaactgaacaccgaagtttccaaagcagaaatgttccgcattgcacaggaagccggtttccagggcggtaagacctccttcatgaacctgctgagcggcaaaactgaaactgcttgcggcttcaccatgaaagaccagattgtggttgaccaggcggtagtggctaaatcctctgacaaagtcagcatgctgaaaatgtttggcctgaacatccacatcgtcgaagcgaagaccgaaacctacggcaccctgaacgtcggcaaaggccgggtgcagctgaacccgctgaacaacggaacctactcggtgatggtattcccgaaaaaaggctacgacaacacagatatcctgaaagcggtcggtggtgattctaaatctcagtatgtcaaaatgggcaaactgactctgatcgaagtgcagaacatgatcgagcgcctggcataagtcgccaagggggaggaaactcccccattctggaaggatatcaaaatggaagaattatattgcccgcattgtggtagtcagattgaattcgaagaaggcgaatgcccttactgcggagaacacatcgactcttggaaagatgaggaagaaactgatgagtaatgaagtccagctgtccgaaggcgccaaatggctcgtcaaacggatcccgaataagaactttgaggcgttccaggctgaattggtcgccgtgtttgagaagtatggctatgacgagcaattgcgtctggcatacaacgaagacaagcctctgatcgtccggcgctgataaagcccaaccctcattcactttcactttaaatacctctgcaaacattgcggaggtattttcttatggccattttaaagattggcagcaaaggtctggaagttaagaatcttcagaccagtctcaacaaaatcgggttcaatctggttgccgatggcatatttggtaaagcgactgacaacgccgtcagggcagttcaggcaggtgccggattggtcgttgatggtattgctggccccaagaccatgtatgcgattcgcaacgcaggggaatctcatcaggatcatctgactgaggctgacttgattgacgctgctcgtgaattgtctgttgaccttgctagcatcaaggcagtcaaccaagtagaatcgcgcggtacgggcttcaccaagtctggtaagatcaagacattgtttgaacgccacatcatgtacaaaaagctgaatgccaagttcggtcaggcaaaagccaatgctctggcccagctttacccgacgttggttaacgccaaagccgggggatacacaggtggagacgcggagttggaacgactccatggtgcaatagcgatcgataaagattgcgcctacgagagcgcttcctacgggttattccagatcatggggttcaactgcgttatttgcggatatgccaatgccgaggagatgttcaacgactttctcactggtgaacgtgctcagctcatggcatttgtcaagttcatcaaggctgacgccaatctgtggaaagcattgaaggacaagaattgggctgagtttgctcggcgttacaatggcccggcgtatgcacagaaccagtacgacaccaagctggctgcagcatacaaatcattcagttagtcgaaggccggaaacggcctttttctttatctatgacagagttatgctgggcgcgtcgcttaattaaaggtgatgagataacccctgtagaaataggaaggttcacatgcaatctgcgagcaaagtagtatccatgaagccagctggtaagaccaaatcagcgcgcaagaaagaagtaacccagcgcgaagacgaatggatgaagttctctaaaggtgatttcaaaatcgctccattccatggcctctctgacaaccagaatctcgcctaccaatctgcccttgaaaacaatctgaccatcacaatcggacctgctggtacgggcaaatcttattgcggtgctgccgctgctatcaaacatcttattgatcgccgtgtcagtaaaatcatcatctcccgttcgccgttgccaaccggacagactgcggggttccgccccggcgacacgtatgaaaaactcgttccatatctccgcccgctgatcgaaaccttcaagaaagttctgaagaccgatactggcagcgacggcttcttcaactatctgtgggagaagcacatcatcgaaattcaggatctggagactatcaagggtatgacctttgatgatgccttcctgattatcgaagaggctcaagaatgcgacatggagcagctgaagaaccttctcacccgatcttcagactcgacttacgttttcgtcaatggcgacatcaagcaatctaacaaacgtttgcgtgacagcgcccttgacacgtatgtcaaagcattccgtgatttcaaccagaaactggaagcaggtactctggctgttcacggtgtagaaccgggtgatgcatatcctgattgggttcaacctttcagcatcatcgagttcaacaaagatgatcgaaatggtcgtggcaatttcactcgtctgatgctcgaggtcaatgacctgtacgacatttaaatacctcatcaccattccccgccgccttcaatctgcgagggcggcgtataatatagagataatttcatgaattaccaaaacatttatgactctttgataaaaagagccaaaacaaggtcattggttggttattctgaaactcaccatattatccctaaatgcttaggagggaaagacaataaagaaaatttggttgaattaaccccggaagaacattatttggctcatcaattattggtcaaaatacatcccaaaaattataagttagcgtttgccgcaaatgctatgtgtatcaacaatgatagatcaggccgatttaacaataaattatttggttggttacgacgtaaattatcagaatccaacaaatctatgtatgaaaggaatccggaattaagatatgtccgttctaaaagaatgaaattaacccatgaagaaaatccccatctaagaaaggtgcaatctgaaaggttgaagaattctaatatacaagttccccgtaatccttgggatagtaaccgagccaccaaagagtcattggatatatggaaacatgctgaggaatattacaactggtggaagttacaccaacaaggctatacttccatggcaaaggcatttggttttaaaaataaaacaacgccacacgaaaccatggttaagaaatttaaatctggttggattccgcaagaagatccagaatggttagattttgtaagtcaatagcctctatgcgtttaatatagaggcggagtatattcaccaatcgtatcataggaaataataaatgagcgacatcaaagtcataaagcgggacggatcttctgtcccttttgatattgaaaaacttcacaccgtcgttgaccgcgcttgtgatgggctggacggggtttcaatgtcagaggtgattgcagcatcaaagatccaattcaccgataatatgagaaccgaccgcatccaggatattcttatccaggcggctgcgtctctcatctctgtagaaaagccgaactatcagtatgtcgcagcgcgtctgaagtcatacgatctccgcaaaatcgcctatggccagtacaagccgccccatctgctggatatctttgtcaagaacatcaaactcggtaaatacgaccgggaattcctggatctgtacaccactgaagagtttgatgaacttcaggccaccatcaaccacaaacgcgataagaacttcacctgggcggccatgggccagctgactgagaagtacctgttgcgtgaccgttctcaaaaagacaagaaagtctattgtgaaactcctcaggtcatgtatatggcgattgccatggcattgttctctaattgggataaggccagccgcctggatatgatcaaaaagttctacaattatgccagcacaggcaaattcagtcttccgaccccaatcatggcgggcgtccgtaccccgacacgtcaattcagttcctgtgtattgatcaaaactggcgacacgctggattccattaacgcgacagccaaatctatcgtcgactatgtgagcaagcgtgctggcatcggatttgacgttggtgcaattcgcggtatcggcagtcctatccggggcggggagatggtccacactggtttggtgccattcatcaaatatctgaccggggcactgaagtcgtgctctcagggcggtattcgcggtggtgctgctacagcttatatcccgctgtggcattaccagttcgacgatgtcgttgtgttgaagaacaaccgtggtacggaagaaaaccgcgagcgccggattgactatggtattcaaatcaaccgcgtcatgtttgaacgtctggtcaacaaacaacctctgtacctgttcgatccgaaagacaacatggatatgtacgaggcatatttcagcgacgtggatcaattccgtactctgtacgacaacatgatcaaagcagcagacgccgggttatgtcgggccaagactctccaggctgaagaagtattccagacgttgctggatcagcgttccgataccgggcgcatttacatcgcattcgttgatcacatgaacatgtatagtccgttcaacctcgacacgatttacagctcgaatttatgtctggaaatcgcgctgccgactcgtgagttccaacaatacgatgatgaaagtggtcgtatcgctttgtgtactctggcatcattcaacctgacggcgtttgatgagccgacggaaatggaagatgtggcattcgtattagtgtccgcgctggacatgctcctcgaataccaagattacccggcccgccaagcccgcctggctgttcaggaatatcgtcccctgggtatcggtgttgtcaacgtcgctcacttcctggcgcggaacttcaccggatatggttcgcccgccgggttacagctggtcgatgaatggatggcgcatcttcactattatctggtcaaggcatccaacaagctggcggaaatgtttggcccgtgtggtaaagaaacaatccattcaagcggtatggtaacagctgacctggcccctctgccactggacctccttcctaatggcaaaaagcctgttggggacgcatacggtctggattgggatgggctaaaaaataggctcgccaaatttggtatccgcaatgctaccctgttggcgatagcccctaccgaaagctcttcgcaggtgctgaatgctaccaatgggattgagccgccgaaaggcttggtgagcattaaggcaagcaaggacggcatctacaagcaaatcgtaccggatgtcgaaacccttgggcctatctatgatctcaagtggaacatggaatgtatcgactatctgaagacggcggcggtgttccagcgctgggttgaccaatctatcagtaccaataccttctatgatcccgagaagttcccgggaggcaagatcccccgcgccaagatgatgcaggatatcttatccttctatatgtggggtggcaagactctgtactacaacacaaacaaagactccaaggaagacgaggagctgaaagcagctgaagaagtttgtgatacctgtgtagtatgagttaggtctatatctcactgtgttatattatcaggggtggagcaattcaccccattatccatcaggaaagaattatgtctgaacaaaagcaattttccgttttcgacccgacatcgaataaccagggactcccgttctttggtgatccggtatcaatccagcgttatgacgttgttgcttggccgtttgtacagaagtggtatgaaaaaggcctcagccaattttggcgcccggaagaagtagacatcaccaaagacaaggcagattttgccactctaagcgatggtgaaaagcatatctatttctccaacctgaaacggcagaccatgctggactctatccagggcgcggccccgtttgaagcattcggtgcctgggcttctaccccggaggcgcagttcgctatcctggaatggacccgtcaagaggcaattcactctctgtcctatacccatatcctacgcaacacggtcaatgatcctggtatcgtgtttgaccatgtgctggacgtagctgaaattgttgattgtgcacaccaaatcagcacctgctacgatgaatctgtgcgctgggcggggatgcgtatggcgggccggatcttcacccgtgaagatatcatgaatgccaagcggtcattctggcgatccctgtttgctgccaacacgctggaaggcatccgcttctacgtttcctttgcatgctcctgggcattcgtccaattccttcaaaagatggaaggtaatgcgaagatcattcgccagatcgcccgcgacgagcaggaccacctgatcctcactcagacattcctgaatcgtcttccgttgatggatccggactttgctgtcattcgtgaagaacttcgtgctgagatgacgcagatgttcatggatgtcgtgaatcaggaaaaacagtgggctgactatctgttcaaagaaggttctatcctgggcttgaacgccaagatccttcatcagatggttgactggctggcgacacaccgtatgggtgctatcggccatccgtatcctggggaaccgcgcaaagacaatccggtgccgtggattaacgactggctagataatactacaatgcaatacgcattgcaggaagcagaagctcctgattatctgatgggcatactgactggttcagtatctgacggtcttaaatttgcataaaggtgagaaatgattacgatctattccaaacaaggttgtgcacagtgtgttacagctgagaacatctgtcgcattcgcggtattgagcatcgtatcctcaaacttgaaaaggactacaagttggaagatctgcaagctctgacgggcaaacaacgcatgtcaatgcctgttatcgttctcgctgaccagactgtgaccgacgttgctggtctcgccgcaagcgttaaacgctgatcatatcaagcccccattccgggggctttacttttgaaaatctcaaacctatacttcctgtacaacacaaatattgaatagcaggaactatatcatgtcaaatatcttacgcaaccccggccatcattttggatacatccaactcccgttggtcatcgacactttataccctgaagacaaagaagccgtttgctggtctccagcggccctcattgaacgagagatattcaaatcagaagtcgacgtgatgtatcgctttgggtcaaatggcgaactttattatttgggcaaagtcatagaattgcgtacgacgagagagcaacgtttcttacgcatagacacaacggattgtggtttgttctcccaactacaagaatatgtgaaacagaatcgtccagtttcccagcaccgcccgttcttgacaagtgtgcatattgacaactttatctctgacgttcaccttgtggcttctactcttcacgatgaagaaactggtgtaccgaacgacacagtcttaaatatggttgtgatcacattagtggagtaagccgctatgagcgatttagtcttgaatacccaattccgtcttcctgtggattctcttgtcccgtttcaaatcatgaaacagatgcttgaagaaggcatggaagttccgttaaaacataatggacaagatatcgggcgctgtatgagttgctcatttcaggatgatgcgtattgggcaatggactataatgctcaaatgccaatcgaggctaacactctcatggaattgggtttcattttcaaattaaaaccaccaattcgtttatacgatatcaagcctgtggtaatacagatacctgctggcaaatcaacttacatgtacttgatatcgcattttatgttttatgacgttgcgccgtcagttggtccgttgtaaccagatggtgtcagtaatcggttcaggatcattcacgacgttaaacgtaatggtgactgccagggaatggtagtcatcagacagagatacttcgacagactgtatttctgccctcggttcataaagagcaatagcatcttcaactttgttcttcacatccacctgaatagtcggcgtcgtgttttccccgagcatcccataaaggccagcacccatatctgggagagtccgccattctcctgccgacgacataacaatattccggacagactgtaacacagcccatttaccagatttcatcgtaacgtctttggtaacaggatgcatcccaaattttaggtccacatctttataatctttcatgttgaggctccctcagcagcacggagaggcattatccgcctctcctggtgtaatcgtatggggttattggctggaaccaaaattaccgccattgtcttccagttccggtttgatatcgatagtgcccggccctgtcggtgacgctggggttgcaccactaagagaactggcccggcccgcgccttccgcatatttgatgttgccatcaatagtttgggctaccgtcaatttgtcagcgatgatctcggacacgaggatcttaggaaccttcaacgttcctgacacttctaacatctgacaaacgatacggaaaatattctgcgcctggatttcggcaagctgagaatatttcatcaaagatgtcccggcaaccacgtgtgaatgattgctggaatgaagatgataaacttcgcctgtcttgcgctgaacttccgtcccaccaacagtcaggttatggtcacgcccgacgtaataccttttgtcgaacatcgcaatatcatagtggtcttttactgatttattgaccacgtcaccattcggtaacatttgtttataggaacccgattggtgcatccagtggagacgctcaccaccaggcgtatcgtctacttccataatgtggccggaacgagaagccataacattgttgtatggatacaccgaaccgccagcagatggaactatggtttcgcctgtgttatcaatatcctgtactcgaccagatggcggcggggtttcttgtacttttggggtgcgatcaggaataggttcagaccatttgctgttttgctgtgctggagctgccgccttcgtgttcgctggaccgggccaacgataacccaaaactgaagaacgactgaaacggctgactttcacgctgtcagattggttgcccccaaggcaccatacataattcgcatcaaacttctggacaaatgcgacatggccaaaagttgggttgttcccccggcggaatacgaccactgccccatatcttggttcagacaacggagaaccccattgaagatatgaacgggccaaagcagatcttgtagatgtgaatccagcctggaggagaacccaaccaacgaatgcagcacaccaactcacttcgtcttcagatgctccaagagaagtggttttgtgatattctacaatccttgggttgttgttgaatttaccagcatattccttcacacccaattcgcctcgagcgacagtcatccatttttcaggatcatacccatctttgggcggctctgggtcaggttgaggttcgtcttctatttttacaggaacatctgtaacagcattatatttttgacgttcaatagactgcacaacctggccgagagccaacgggttggtgtcagaaccattaacctggttggctgctggccacacccaagctattctcaaattctggtatgcttcgtcaagcgcgaaccccatgacttcactgttgacagtaataccagtcggagaccagcctaaacctgccgaggacgcatttgttgcaggcatcataagcacagcccatggcaacagctcagtaggcagaagagtagtgtcttgggtgtgtacgccgtatacacggacggcaacgcgcccgttttcttcgggatcattcacgtcttcaacgcgcccataaaaccaacgcatattttctaacatagtgatgtccaaatgtgtagaggatgttgaagatatttatgctctgtcgaatataatattataggatgcgtcagcatccgttgtatttgatttatttcaactcgcgttgctcgtgaaagaccgtcttacgcagacagcgcccttccaatgccagggaggcataaggcgaggaaacaaccatacagcacagaatgtccgtagaaaaacgatttttattccatcctaaacattcaatagcttagaagccaggagtttgttcaggaacaatgacattataagaaattgcgttcaagaaacaacaaatagacctgtaaaacaaataagcaataaaaaccccgctcatgcggggttttggttctttttagcaagacgagctttcaatgtctccgtaagcatatcaagatgccagggcattaattcgcttatttcaaatatgctatagccttgtgactttaattcgtcacacatcacgaagtaggataataaatcaatttcaaaaattaaatgaaaatctcttcaagactattaaattcgatcttatgctctttaccgcaaccaggacacttaatcttggtttcaaaatgaatgcgcggtattttggaaaagaaatcgtctttaattttctggataatatccgtttccaggttatcgccaacccattgtacaaactcatcacgagttttcttacgagcaactgctacctgaggatcaatacccggttcgttagggtcatcaaaccgccaaacctgaccgtcatcgtcatacaaacaatcgatgaatgtagcaatgctctcttcgatagaaaccactttctgaagcactccagcatcagagaaggatggttgacgcatcttgatgtgatagccacccggcaggtcgaagcattctgtgaaaccttccacgccccgcgccgccaccttgtccagggggataggcacaacgagttcttgaccgcatgcttctaaattgtccccaggataatcaggatcaaccgaaggaactttgatctgattgttgcatttgtaccggattttcattacttcaccgattgatatacaacgcatccgaaggaaaacttcttctacaacaccgattgggagtttggaaaatggaaccccagcgtctacacaagacgaaaataatgattccatcgttgcgatacgttcatcatcaggagtgtttgggtcagccacctgaagtaaagaagtttgttgccccgcagtaaacgcgcgatacttgataacagtaggccaaaattggcttttgagcgttctttctgtacgaggcaatgatggtaaattcataatgtatctccacggtatatttgtacagatatttatagtgaggaacgaaaatgcatggtttctgttttagccagatcggagagcaattgacaatacttcatcctgatgctggtactgatttctatttattcctgtcggattatgcgagagatttgggtgtaaacgccatcgcgatgtctaaagatgacatgaaatttggtaaactggggacaaaagatttattgagatatggattcaatgtcattgtcgtagatcctgtctatagtcctattcaggatgaagacattatacccgtgggtgtacacaggaatattgaaacattgcacaaatattatcccgattgcattgtgatcggagagatcattccgtattttcataaaagaagacgccttcaaacgattaaaagttattttcaagaaggccaagcgtccgttattatggatgtcctcacaagtggttgggttgttaaaagtacgactggcaatagccaacaaatcaattcccgtgtatatgaatatgtgaaagaacgagactacgaactggagaatagtaatgcaaaacgaaaaacgcgccgatcttgagcagttgaaaacagttatcatcaatcgcctaaaggccgtcgtcaccaacgataaaggtgaagtcgcaccagggtttgaaggtattttcgatgaattccaaaccgacgacatgggtaatccggtcatccaaaccgtcgccgggatgatcatgatcgataaagagatcctggaaagcggttctgttcgttattcaccgaacatgggtgttgaagccgaatccctctgttccgaagtgatggacattaacgaagcgatcagtgaaatcgggtacaaactgcttatctgtaccggccattatgtggatcctcaggggcagatcgcttatggtgacgaagcacgtaaagtgaaacgtcacgttgaaactagtgttctgctgaacaccatccgtgagatgcagaaagagcaggaaagcatcaagccgcgtctgatcctgccggatagcaaaatcgtcacccgataaatcggtctaaatacccataacaccaatgaaactatgttatgggtatttttatgaaatattgcggaattgactactcttatggttgcccggcgatttgtgtctgggacgacaaagatcctttggaatttaattcccttcgcttctatgcatattacacggtagaaaaatattgtcgccctattcgaccgaacatcagcattatgaagcaacctgcatattcctcccctgaagaaagattctataacatttccaaatgggcagaagctgttcttcttacagagaaacctgatttcataaccctcgagggttatgcgatgggcaactctaagaactccaataatatatgccaaaccgctgagaacacttctcttttgaagcaagcaatgcgccgtaataatatggaattcgaaatcatcactccttcttataccaaaaagaatttcacaggtaagggcactgctgacaaacttgctatgatagcccacttcgagaagctgttcaacgttaacatgcgcggtataatggatatgttggaagttaaagatccgaagccaatcgatgatcttgtcgatgggtttgccaatatggtaggcggttctgctttcaaagagaatcatcccgaatttaattctgaggtgcacaatggttgattattggttattggcgaatattatcacgttcgcattattgatggcgacggcgttcgtttggttaaaggcgatgctgacattcttgtcttcgttggcgatgcaaatatcgtattattctgtgacaccgcatgaagaccagaatattcgggctgctcaacagagcgaatatctgtccaaatatgttcatttacgcgaacgctcggtcacaatcgttttgttttccacaatgctgtttgcggttatcttatttgtacgatatgtaatggaggccatccatgccgttctatgattatgcatgcaaaggatgtggtcattctttcagccagcgcaagacctgtgctgagcgccatactcctgaacttgatccctgcagcgaatgtggtggtcagatttctatggtaattggcgctccaaaaatcgtttccggtgtccgtggtcctcaatctgctccggacgggttcaaagatgttcttcggcagatcaagaagacatcgggtaaggggaacacaatcgatgtctgacggacaaatcgctcaggttttgacgcctgattcattttcagagatggtattgatgcgcgcacagaccaccagggaaagcctcctggaaacaatggccagcgtgtgcgaagagtatgatatcgaggaatctaagattcgcaagatgattacaccgcctctgttatcccgtttaacagctgagtgcgctgatgctcgtttgttgaaaggtgaactgaaatccaagaaaattttataggttgttaaaatgactaaagaacaagtctacaaattgattaaggcccaaggcttcttgcctggtgttacccgctggcgtgtgggtagtcttaacgagcacgaagaccaaactgaccggatcaaattcacgactccggaaggcggtgtgtatgtcgtggaataccacactcacaccgatgccaaacgcactttgtctgacgtgttcgatattattgagattaacccgaaagaacaattacttcgcggttaaatcaatcaaatatgcgggggtataattactcccgctgtgaaagaaatattgtgtacagaatagccccctggggcgatactatcgaggaaagaaagaatgtctagcttatttgatcgtctgaagcaatcccgtggtcagcaatctgacgctctgcaaaaacgtctggaacaacagggccagcgttcggctgcggcaaaggatccgcgtatctggaaatggacctggaacaaggaaggtatttccgaaaacatcatccgttttctccctatcccgctggtagatctgaaagcacaggaagaaggcaagatcgatgctgagcagattcttactccggttgcgatgatcatgcgtcattccttccaaggtaagggcggctggtacatcgaaaactctcctcagaccttcggccacgaagatccggtgcgtgatcatgatcgtccgctgtgggcgcaacaaaaagagaccaacgacgaaaaactgaaagaggttctcaaaggtcgtctcccgaacaccaagtattatgccaacattctggtgatcaaggatgttaattccccagaaaacaacggcaaagtattcctgctggaattcggcccggcgattaagaaatttttagacgcggcccagaacccgaaattcgctactgatccgaagtttgatccgtttgatatgtggggcggcgccaacctgattcttaacctggttggtgagaaacgcaaattcggcaattgggaaggtctggtgccggtcatggataacgtgaaatgggatgcggtttcttccctgggcggcgaaggtgaagaaggcgacaagtacaaagaagacatctgggaaaaagaacacagcctgtttgagttctacaacccagccaacttcaaatcgtacgaagaactggaaaagcgtctgcgtaaagccctggctatcccggacagccagccactggtagaaagtggtgcagcaactgtcgctacggctccggtgcatcaggaaccgcaacgcccgacggcccaggatagcctgaatcagcagcagtctcagccgtcgcaagcacagcagagcgttcagactccttcttctactggcgctgatgctaagcatacgtcgtctctggacgagttcgagcaattcctgaaacgtgaataacaacacaaagccccttcgggggcttttatcgagactctatatcatgaaatctttcttttccaaaatttgtcctaccctgttgtctatcctgatcgttgtgtccctggtttccggttatgttgatatcgggatcccgccgttcgatggccttggcgtggcgctgatctacatcaacatcgtattgctgatcctgggaattgtattcctgttaatcacgttggtggaaggcggtaaaagcgttctgaaccaaaaggaaatgttgggggggaaggcatcatatgcctggcgtaatacaagagtggcgatcatattcgttgttgcggcactgtctggccatgttctcactgctgtgttgtatgtcaccgcaattgtcatctatcggggatttgagtataccgcccgcctagaatacaaaaagctgtcagacgcagttgacaatcccaccaaataagaaaagccccttttggggctttttaattgctggcgactctcttcaacatccccaatagactactcttttcagatgccgtcaggttgtcattgccgagaatatccctctggatgccgatagagatgcgctcgaagtcggccaggcttattcccgccatgttgtttaccaattgatcgagttgcttgtaggcaagaagggcttcacccgtgaagttgccttgctcgagcttcttataaagctgcccggcctttgacgcagcggtttcccaatctccggaagcaagagcatcagcaatacccagaggaagaaagtcgctggcgaggctgcgtgtttcatattctgtctccgataggactttgttgtatgagaatgaaatattgtattggttaaattgatctgtggcacctttgtcaagttcaatagacgagaagtttacaggatgcgcttcaacaatataaacccggtggacaacctgatcttctgtgtccaattgttcaatgcaaatatcggttacaaaatcttcgtaataacccatctttgtagtgagaggatcgaagattaaattcttccatttgtccataacagacttttcataatagtcattggccaaaaggaatgagagttccaaatcaacgtttgatttgttattcggcattttgatatggttgccgttattattcataggtgtggtgtcgataccgacaccaggtaatgaagcgaccatacacatcatttggagagaacgagaagtttggtttgtccctccaaagaatgcgtttacgatacgcgctgtggaacggaacaagtcaccaaatgacgttgtatctgaggtgtacgcttgaccatcattggctaatgtagcattagagtcaaagatgcctgcaggcaaggggatagtcacctggaatctgttcttccttgacagaccgcgctgcaacatctgtgtaataaaattgcgatagtcttccacgatgaggactccacttaaataatagatctgaaggtatttataggagttgacaaatggcaaagaatgcgatgggtgaagaagatccgctgctgcttccagccgaaatggatgctcccgaattggtgaagcgctacatccgaaagtaccgccagcacttcggggccgaagccaagcgtaatattcgccgctcccacgtgtggttcatggaacgtgtgtctaaggatgccaacctgaccccacagcatatgatgaaagcatttgctgagaacaagcgcccggtacagggtgtccgctatatgatcgggcgcatgttctatttcaaatatgatgccctgacaaaagaagagttgccatactgggacatgtatcccttggtatttttcttcaattttgccaagggggatgggattaattttggtgagcgtggcgtgacttatctgtgggggcttaaccttcattatcttccgccaaaactccgacttttggtatttgaagacctgattaaactgaggaatgaaagagcataccgttctaaaacccgtttgcgactaacgtgggacgcattgaaacggttcgccaaccatcctctgtatgaacattgtgtcaaactttacagggctgatcggttcagaacacagctttatgaaatcgaaccacaatattgggaagttgtcctctttatgcgtactgcacgcttccagaaacaaagccaggccagcgtctggaaggatgctcgcatgcgccataaacccaaaaagtgattagttctataacccgtttgcagcgataattcgcgaacgggttcccttcaacaatgaggctttacaatgtctactatgtatcgtattcttggtattgagtttgttcctgctcgtctggatgccaccatccccatctccaaaggtaagaccgggtttgaaatcggtcgttctgttttctatgaaactcatatggtccaaccgaatttcgaaagtatggtcgccggtatgggaatcagtttagattctgaagcatgctatgacatgcgtgaccttctccgtatcggcgacagcgatatgctcgattttacccaagacttcgtcactggttgggttcattcagccgagctgaagatgcaggcgaataaaacgatggcatgcttccactttgcttcggattatctgaaatcaaagaatcgtgaacttattttccttgaaaacgagttattggaatgcctgggcgaaacagacaatattccgatcgttatttcttcagaaaaaggtctgtctgaaagtgacctccggactgttctcgccgtggggaaatccaccattgtgaagaatgggaatattttattcaacgatggacaacatccgtttgatctaccggcaaaaattgtttacaacgatgaaatatgccgttcgattaccaaattcttcggcaagatcaacagtgctctgtatgatggtattgcccaattaatggaagaagagagctacaatcagaaagttctaaaaatcagggaatacatttcagctaattgtatgggtggggaagacccgtatcttatgccgaatttcttcgatcagtaaactgccacgcctggagatgtctatgagaaggtatttgagacttaatacagttctagaatcattgatagaattttatatcttacaacatctccgttcaggaaacgagcacattgacgacttcctcttgtatgatcaccagataacgatccattcagttgaagtcgttgatgacgatctgctcctggccaacatagagcacagtctgtatgataaccaggcgggtaaatactgtgctccggcattttctcaggtagagataacaccatgctggcctgccgaaaaagttttcaatatagacgatgtggtttatgatgaagcgaactctttcagatagagggttgtgaagaaagtttgttatctgaacattctttttatagaaagtagtttacaatcttcaaaactacagtatagttgaaaacaagcgaaacggctttgtcagccgaccgatttacaacatataggatctacactatgtcttacattctccatattgagtccggcctgaaatttgatattgaaggtaaaactgcgtctgacgtccagtccgaaatcaaagacgctggtctgctgatcggtaacgtaaccatccgccgtatgctcgacggcgtcctgcaaagtgccaacgggtttgagctgatcgattccctgtctcaagaagagcaggaagaaaccctggaggctctcgaccgtgcgaaggccgaagaagtccagccgactgacggcgctggcgtgaaagaaggcgctggcgatgccactccggttattgacgctgaagaaaccgttaaccagccggaagcggaacaaactgcaaactccgaagaatctacggaaactgctgaacaggctgacccgcaggaagtagaagctgtggcaaacgcagatgaagttcgtcgccgtatcctgggtactaacgtggcagaagcgctggccgaaggtagcaatgccgccgaagacgcttccctggccgcgaaatctaagctgaccaacctgaccccggcagttgcgccggaagatcgcaaacgtcgccataacaaacgcgaagaaatggttgaagcggcacgttcttccaatttcggcgcgatcctggcagcagtagaagcaggcgtcattccgggtgtttacctgagctatgtcaatccggatatgcgctggttccagttcccggtcaccgacctggctgataaagaaaacccgcatgcgcggactaacacctacgtcgatctggcgccgatcacttccggcggctggggtttcagtctgtacgtgaaaggtaaatctttcaccaaacgccagaaaatcaaagagaccgatgcggaatctctggttaaagcgatcaatgaatggttgccgggcgctctggaagaagccaaaaacgcaggctgattttaaatcagaatccgttcaatagacgaagggctgctataatagcagcctcttttgtttattggggctttgtatgtcttatacgatcaaaggtctgttgaaaagacctgtccatttgttccataaaccgcctgccgttgtcggggaatatccggcaagaggagagctttattatgtcaaaggctccaacggtagtggcaagtctaccgttccgtcctggatggcggagaatgatcctcaggcatatgtcgtgacccacaatggtaaggtgatgctgaccgtttgcccatcatttaatatcatctgtgtcggcaaatatgacaaatctaaatctaaaggggttgactctctaaaagacacagagcagatgctattcgccgtgtctatcaccgagcaacctgaatacatcgggtatgatgtggtctttgaaggtattatccctgctaccttgctcaatacgtggattgaacgtctaaaccgcccgacccgccgccttgtggttctgttcttggatacccccaaggaagtatgcctggcgcgtgtgagttctcgcaatgggggtgaagacttcaaacacgaactcgtcctggagaaatggaagcgtgtcaactctcaccgagagcggcataaagagttgttccctaacattcctgcgggtatgatgaagtctaatggtctgaccgttgatcaggctgtatctgcgtttctcaatcgtgattttggagatatcgtctaatggaaatttttgctttaaacaacaacgacatgctgaagaaagctgtcctggctatccgtgaacatgggattgagtctgatcccggtaatgcggagattaatactgatggcacccggtttcttgatgacgtgaccataaccgtatcggacatccgtgaccgctggctttctgttgaaggccgtaattcatctgcgctggctgctatcggcgagaccttctgggttctgtcaggccgcaatgatatccgtttcctttcccgagtactcccccgcgcggccaacttctctgacgatggcgtaacctggcgcggcgcgtatggcccacgcctgtacaatcacgggcagctggatagcgttatcaaccgtctgcgcaagaatccaaatacccgccaggcttatctgacaatctacgacccggcgctggactctgatgaaggtttggccgctcataatgaaacaggcgaagccaagaccaaggacatgatctgtaatctggctcttttgttctctattaaaaacggctgtctgaacatgactgttatcaaccgtagccaggatgttctttgggggatgtcttcgattaacttcattgaattctctattcttcaggaagtgatcgctaatgttttgggcgtgaatgtcggccagtacaagttgttctcctacaatcttcattactacaacaatgaagtaagtcgtaaacagcttggtggtatcacctggaaaacacaaacttctactggaggcctggtgtgttctttgctgtctttcaatcgtgacaaagtaaagaaccagaacgacatccgcaacctgttcctgggcgtcctacaccattgcgatatcggaagcgactttggtaaagtccgggagcatctttctcagtttgatgctgacaaagggcttatgctggatatggcttattgtctatggtgtcgcctaaacggttcgaagatcgacaaacgcagcattgctgatgacggtttacggacagcattaatgcattcttcggttgatcggaaatatatttggggacaaggcgaatgatgtatcctaatcttgaatttttcacggggcgcaagcgctccggtaaggacttctgccttgaatctctgatcagtttccatgaaattcagggttacaaagaaatccgccgtctttcattctcagacgaactgcgccgggtggccaattatatctacccatggttgccagcggacgtagacgacgctatcaaggacgttccgttcgttcacccagataaccatcaggggttaaccccaaggcagatctggctccatctcgggagcgcctctgggctgcgttatgttcagccagacctattcctggcgttttttaaacgttatcaactccctctcgttgaggctaatcctcatatccattatatcgtcagtgatttgcgtactccccaggaatatgaatgggcgctgagcactaaatgtcctatcacgcgcatttcaaaggcagaccgtgccggtatcatagaagacgatatagaggcgttcattgatgagatgaaggtcaattatgaatttgtcaatccgttccaggggtgggcaccattcgtcaaattctatgaggaaaggaaatgataacagcagatcatattaaaagactgctccaactccaagaggccactaatgtggcctactttggggaagagtgggaaaagtattggactcacgttgccgtaacgaactcaatttatcgtgaatgggcagaattccttgatgaaaccaccaaggattggaagatttatgggaatggtatccatttcaatagaacggatgccgtctatgaattggttgatgtggtccattttatgctgtcttccatattgtccgggtatggttctgcgttcccgatcgaaatgcaatttgatcttttcttcaaagaaggtcaggtaatagacaaatctgctaatctggtacatgtcaccgaacggttcacgtcgtttatgggacaacccgatatcatccggtttgtacggttcttggtatgcgcctgtggttatctgggactggacgccgagacatacatgctggcgcacaaacgcaaaaatgatcgtaatcggctgcgcgctgcaggcggcgctgactacgacaagtccacagaaatccctctgaccctggagttctaatgtttacgattaacatctccatctcggccgagaatcttcagacctcggtcagtaatttcattgagcacatgaaaccccttgggcatgtggtgctcaattgtaagttagacgtcgaaggcggggttgcggagatgttatttacaacaccttccccaacagacgcattcgtcttgattgagcgctgggcatcggaggacattcctgttccagcgccgttgcaggatatctatttcagcgagacgatttattcactccataccatgcccaaagatgttagccaggctgatattgttcgtctgattaatcataacataaactttgggtgtatcgttcggcgtgataactatcgtttacgcaatcatttcctgtatgataaccagaaccaattggatgaagattcattattatccatcaaaacgatgcaggaagcgattaatattttgtctaagaaggttctgggtgcagaattattaaccacaattaacaaacaagaggaagtaaaatggccagttcattaatggatcgcatgttgaaagttgctaagaaacatgacgatcaggcttcggtattgtctcagtcagacgcgctggacccgaaaattatctgctcgactggtattccccttattgatatcgcctggtccgggcgtgttgatggcggtctgatctctggcatcaaaatgatggtcggtgattctcgtacattcaaaacgatgttcggcctggttgacgtcaaagcgtacatggataaattccctgacgcgatctgtgtattcgccgattctgaaaaaggtgccaacgccgattattggacatccatggggattgacatggatcgtgttctgtatgtcccgatcgataacgttgaacagaccaagatccgtctgttgcagattcttcaggaagtgaagaaaggcgataaagtaatcgtgttcatcgactctatcagccagttaccttccaccaaagaggtagaagacgccatcgctggcaaagatacccaggacatgacccgcgcccgcgccctgaacagcttctggcgcgtcattacacccgagatcaacagcaaagagctggtgttggtctggatcaactcgtattatgatgaaattggtaaccaatatgctgagcctaatatcaaaggcggaaagcagggattcctatcatctaacctgatttggttcatcacccgttcccaggtaaaagaagacaaagacctgctggggtggaacttcaacatcggcatcatgaaaggtcgccatgttaaagagaaagccaaactccctgtcacggttctgtatgatggtggtattgatcgttggagcggcatgctggaaatttctcgggcgcttggctatgtcgatatgccgacttctggctggtatgtccggacagccaaaggtggatttgatccggagaaagagaagaaatatcagaagcgtcaaatggatgatgacttttggtatccgctgctggaaaacccagacttcgccgatgacgttaaaaagatgttcggcgtttccaacggtacggtaatgcctgcgaacatgctggagcagatggaccatgttatcaacaccagtgaataacaatggagggggagtcacctcccccgttaattacgaactcatcgaccccggtgaaggccaaatatc

SEQ ID NO: 17 - DNA, 45883 bp, unidentified
  source 1..45883: mol_type = genomic DNA
cgccgcctgcgctttgacttctcaaacaatcaggacgccagtaactactacgccgttaactggatggcagtcggccgtccgacacccggcgcatcgcaggcgcagattcaggatctccgcacggccatgaccgctgcggattccgcagaggctgcggaacgtaacacgctggccgttcagcttcgcggcaactatgagggaaccgacccggccaagctggtgacgggcattatctacaacgaacgccagacccgcgtcaccgcagaacaggccatctcaagcgacgttaacacgctgcgcaccgactacaacgccaacaaggccgcagtcacccagcgccttgacacgctgaccagcgagaatcaggcgcaggctcaggcactcacccaactgcaaagcggtctgaccgatgcgaacggcaggatcacggcgaacgccaccgccatcacccagctcaagactgatgtgacaaacattgacgggcgcgtgacggcgaacagcacgctgatcaccgggcttgagagcacgctgaacggcgacgctatcgcactggccgctaacccgaataacctcctgacgaacaccggcttcgagcgcaaaacggcagcgtggactggctttaacgcctattccgacgtgtacgccgcacaggtgcctaaatccggctctatgatccttcgcgggaaggctggcggcattgcctccatcggccagaacgtcgccaacgttcagaaagggcgaacctatcgctacggtggctgggtcaagcgctccggcgacatggcgatgagtccgaataccaccgggaataacaagttccggttaggcaacgctgatactggtaccggcccgctgtccgaactcctgtacaacgccaccaacgtcggcactaactggacgctgttcaccaaggacttcaccgcttacagcgacatgacgattttgtatagcgtcaactggatcctcaccgctggtgaaatctacttcgacgacgtctttttcatcgacgtgacagaagaaatcaggaataacgccaacgccaacgcgatcaccgggctgactacccgcgtcaccgctgcagagggtgccatcaccaccaacagccaggcgatcacccagcttaaaggcgacgtgagcaccttgcagggtcagatggcgaccaaggccgaagcgagcgcattgcagcagctggcaaccactgttacccagcaggggaatacgctggcgtcgcaggggcaggctatcaccgatttgcagaacaccgcgcagaacgggaaagcgaagtactggctgaccaaggtcttcgacatcaaggtgagcggtagcgggtacatcccgaaactgtccgacctgtctggcgttccgccgctggccgtgtctgagatggccgacgctgcaaaactggacttcctgacttacggcgactacaaaatcgcgtatgcgaagtcgctggtgtatgtcgcagctgacaagactatcgcaattgctcctggctcacgcatcgtggacgacaccgcgcgcctgtacatcaacggggcagaggtagccaccttcggtgctgggactatcacctatagtctggtgctcaagaagggctggaacacgctggaatttgtggttgcacagatcaccggccagttctttatcaacttcgggctcaaactctccgacaacgttgatcagctattcagtggtgccggtcagctggcggctgcatccgcatcgcagatcttctcctctcaggttgagcagacctccgggaaggttgacgcgaacagcgccgcgattgtcacgctgaacaactcagtgcaggacatcaacaccgcgctgaacaacaaggccgatgcgagcgcgttgcagtcactgaccacccgtgtcacctctgccgaagggaagatcacagctcagggcgatgcaatcaccaggctcaacagcgacgtgagcaccatcaacggcacgctgagccagaaggcggatgccagcgcagtcaccgcattgcaaactcgcgtaaccaccgcagaaggcaagattgagagccagggtacggctatcacccagctgagcaatggactggaagcctaccgccgcaccggtgagaacctgatccagaacttcgacttcctgcaagcgggcaccgcgtacagcgtgcagcaggacagcgtcagtactgtgaccttcggcgcgtacggcgacggcaaagcaggcgtgcgcatggtgcgagccaacggcacatctccgggcctgttcgcgaacaacaaaaatccggtaccgcagaacggacagcgccgttaccgctacgttgtgcgtgcgaagggtgtgagcggggcaatgaacctcctcatacgtcgctggaacttcaacggcaccgtggaaggctcttacgctgacaagaacaacacgctgacgactgactggcagaccctgacatgggagacagatcttaccccggccaccggcgttgatgggtcggcttttggtctctactgcgatccgtcaaacgcggagatctggatcgactccttcaaggtttacgacattaccgaagaagtgacgatcaaggcgaacagcgacgcgttaagcacgcttaccagcaccgtgacgcagaacgggaaagatattgcggctcaggcgaacgcgcttactcagctgaaatccagcctgacgaatgacgcggtggcactggcaaccaatcccaacaacatggtcgcaaactctggttttgagcgtggaaccgataactggagtggttttaacgcttacgcggatatctacgcggatcaatcgccacgaactggcgcatatattatgcgcgggctttctggcggtaacgtggccgtgtctcaggtcatcctcgggatcaagaaaggccgcacctaccgttacggcggctacatgcgccgcgattcaaacacgaccatcggataccaaggaaataacaagttcaggatcggcaatgccgtcaccggcgatggcccgattcatcaggtcgaatactcgcaaagtaacgtagggacaagctggactcttattactggcgattgggtgccagcaagcgatcaaaacatcgctttcagcattaacgtgcttttgactgccggtaacttctactttgacgacattttctttgttgacgtcaccgacgagatcaacaacgcagcgaacgcgacggccatcaccaacttaacgacccgcgtcacgtcggcggaaggaaagatcacgtcgcagggtacggcgatcacccagcttacgtccgacctcagcaccgcgaacgggaagatcacggcgaatgccaacgccatcaccagcttgcagtcgaccgttacccagcagggcaacaccctgaccactcaggggcaggccatcaccaagctgaacagcgacctttccgacctgtccggcgtggtcgacacgaaggccagcgcgtcggctgtatctcagctgactacccgcgttaccaacgcggaagggaagatcaccgccaactccacggcgctgaatagcatcatttcccgcgttgacgatgccgagtcggcgattgacggcctgaacgagacgacggcagcgaacgggctggcgatggcgaacggcttccagcagctgcgcgcgcaaatcggcgacaaccaggcggccatcacgcagacgaacaaggcagtagtggatcttgagtctgcaacggcgcagcagatcgacacgatcaacgcgtcaatggatggcatgagcgctaccgtacagcagacctcaacggcggttgcggatatcaacggcaagctgtcggcgcagtggggcgtcaaagttcagactgacaccggcggcggcaacccgcgcattgctggtattcagcttggtatcgacgcaagcggatcatctcaattccttgtcatggccgacaccttcgccgtgtacactggcggggcaaacaaaacttacccgttcgtggttcagaacggcgtggcgtacatgcaggaagcgctgatccgcgacgggtcgatcaccaacgcgaagatcggcaacgagatcaagtcgaacaacttcgttgatggctcgcagggctggcgcatcggtaaagatggtagatcgcagttcaacaacgttatcgttcgcggtcgtgtcgaggctaatagcggctcattccatggcaccatcgacgcgaccgacgggatctttcgtggctcagtcgaggctaacagcttcgttggtgatattgcggcaatgagcaccttcccttccaaggttgggtcggcctggaaatctcgcatcatgcaccatgactcaagtgcgaagggcggcaaaagctatgctatctgtggcctcatccgctgggatgcgggcgacaagaacggctcggttgtcgtggaatgttatgtgaatggcgttcgggtatcgtctcagtcgtataacggccgagacaccggggaatcaacccgcgtgcgcttgactgccgtcggcgttgcaactggcatcggcacgagagacaccttggttgagattgtcgtgagtggaaccggcaccagtacgctggaggctggttactgcgtcatgtctcgcggctcaggctcatgggaagcagtagcataactggaggcggcccctgtgggggccgatattgaatggcaaatattagcgatcagctcgcggctgatattcacaacgcgtttaacaaatactacacagacctggcgaaccaggatcagatcttctttggcgtcggtgatgtgacaatcacgaagcaggacggcaccaccgccactgtgcgctcatggaacaaggtcattggctcagtggacaccgcagcgcagcgcgggacggagaataactttaccgctgtacagacgttcagtgccgggatgaaggttaacggcaacgtcaattgcatggccgacaacgcgatgatctacctgggcaagaactcagatcttgcgctgcttaaaaagagcgggcagggtggcaccatcgccgtcggcagcggcacgccgtttaagatccagcgcacgaacaccgccaccgtctcaccggcttctacggtcgaggacattcttgttattggcacaaacaagcaggtcacgctggctgggcctttagccgccggtggcaatattgacaatacgtcgaaggggaaaatgcttacgcaggcgattgagctgtcatttagcacgccatacatcgactttcattttaactacagcaccgacgacttcaccgggcggattatggccactgccgccgatcaaattagtgtacaaggtagtcattggcgagttgacagggatcttcgtgttggtggtgcggcagatattggaggctggacgcaatgccgcgacgacctttcggccaacaaaacagactttggatcccctgctattggttcgttggtttcaggcggaaggattcgatctcgaatgctcgggcgcggcggtaacgttgacacctccggggcgtggggcggtttctatcttgaagagtacgtgggaaccgaacacaggattgtcatgtatatggacggcttcgggagaacggacgcatgggcattccggtcaggtggcacgatctccacaccaaaaggcgacgttctcactaccggttcagacgtgcgcctgaaaacagacttcacccaagcgcctgagaacgcctcagagcgaattgaacgcttgggggtatgtgagtaccggttgaagggagaaacgcgcgttaggcgtggttttatcgcgcagcaggcggagactgtagacaaggtctacacctatcaggacgtcgagcaggagatcgacggcgagcgtatcaaggtgatgaacgtcgactatgtggcgatcatcgctgacctggtggcttcggtgcaggagcttcggcaggaattgaaggagctgaaaggggaataaaaaaaggggccgatggcccctttctttacagcacgtgataaagcacgttgatcacgaagcccaacacgaggccgatcgctgctgccagtaatggctgtttcattttgtcaaacacgttattcaccctctactttaacgagttcatgccattcgattcccaggggcttcgcaaggcggatcatggtttcaatggtcgggaactcacggccattgtcataacggcatacgcggcactgcgcaatgcctgctgctttcgccagaccacgctgggaaaatccagcgcgctcacggtgttctttcaaaatcagtgtgatgttcattttctacctcagaacgggatatcgtcatcaaagtccatcggcggctcgctggactgctgctgtggttttgactgctggcgcgttgggccggaatgtgtcttcggctgtccctgcggctgcccctgctgtccgccttcgctcttgccgcctaacatttgcataacggcgttaggcccgttcagaaccacttctgtcgtccatttctcgactccgttgctgtcagtccattttcgtgtttgcagctttccttcgacgtagatctgagaaccctttttcacgtactcgccgacgatctcagccagcttcccgaagacgacgacacggtgccattccgtttgctcctttacttctccggtctgcttatcgcgccatgattctgacgtcgcgatcgtgaggttagccaccgcgccgcctgacggcatgtagcgaatttctggatcctgaccgatgcgacccacgaggatcaccttgttaactccacggcttgccatttataacgctccttaaaaatcttcttcgacgtctgattgctgcggcggtacatcttgcggctgaacgtcatcaggtgcaacctggacggtagccttaccgcgtttagcattggctggcttgccggggttgaacggtctggcctcagcgtttttcagctcgacgatcttgctggcgcgggcatcttcgacgatgcgcagtgatgccttgtcgctgcggaacagctcgcacgcggcgcggtagattgcatccacctcatccttgtccttcgcggcttcaatggagcggcggcagtcggctgcgctacgcactgatttgttgccatcgtcgtcatccatggtgaggccgaagatcgaaacgcgggcatagcggcgggcgtaggtcagcgttgagccgaagccctgggcgtcgttcttcgccagcgggatctggcagatatcggacagccattcgcctgtggcaacgtggatgatgcgcgtctccatcagcatcacgttcggagcctgtccggcctcgtgcgtcggagactggatcatgatcaacccggcatcttccattgccgggccgatggcggccgcaacgtctccgagggtcgcatagtggtttttcaggtgctggttctgcttggatttcttcggcgatacgcacatatcctgcgcgtgggcaaactgcttaacgatggtgctgcatggctgagaaaatttcatcatttggtcactccttatattgagggggtaatatgtcagtatattaccccggaatcaattattttttggttttcacatcttcccacaagtggcggaaggcgttttccaggtagtacggaggatcgaggtcaatcacgcttccgccgccgtaggtcggccacgtgtcattgtcacggcaccatttaaatgtggcgatggcttcacgcagctgcgcatatccaatcatcagtgttttgtttgacaaggcgaaaggagcgacgacgaacgggctgctcttctcctgcgccagcaacatcgtccttctcggtttctggccgaaagccgccttaaacccctcgcgctgcaacgccattttcagcggatacccgagatcgaagcacttacgcatgaatctttcagggttggccgtgtccgtggtcttatagtccaccatgtcggcgaacttgctgatccagtcgaggcgtaccttgcagcgcaatccctgatagctgaaaaagatcgagacttccgacattccgtcaacgaaatactctttaaacgagtcgttattaaacagaacggcgcgcatctcctgaatgatgtcataatcctgtccgcgaattccttcacgatcaccgcgctcttcattggcctttttcacgatgtcgtgccagaaaacaacgtcagttatcccaagagctgcggcggtgttggtgactgtctcaattaattccggctctttcattttcgaataaccggcaacaccgtgttctttcagaaatgccttcgcggcctcaagcgaggtaataaagttcggctgcggaataatatcgcctttatcgtcacgcttaataaagtcctctttctcaggcatgcggaaatattcacgggcaaataattcaggttcgaggtgattggcgtgggcagcagttccgaataccagtgcgcgggattgctttttcttttcctctgcgaacttccagttagccgggcatgtggagaacaactcccacaagccggagccgttcatgtggtctgtctcagcgtgatagtcttcgttcgacagatcgttattcgtgaagaacagaacttcatcatctttgagcgatttaatatctgacattacatgatccccttattcatatctaaccgaagttttcgctcgatatcttcctgcctgacaaagcggcgtgaatcgcccttgcaattaactttcaatagccatttgcttttattctcaatagccggatacttcacggcaggatcgcggaatagaatctgaccaagcatcaactcggttccagtgggtacgccacaaaataaaacctcccatagcacgtccctgataagattatttcccggcgctctatatgtgagaaccactttctttaatgatcgcataaggccgtaagcctctttgaatgttttgcggtcagtgttgcgaatgccgccgtgcaatattctgtgtaactctgcatgtgtcatgatgacctcctgtgtggtgtttgggcatattacttccgcataataggccatgtcaaggctatttaactatgatggtcgacggcccgaggaagtcgatcaccgccatcttcgcgcagtggaagccatacgccaccgcggcgaacccgccctgagcagatacggcggacagacattcaacctgctccttgctgactggcgtcgacagcttcttgttctcccgcttcatctcgatcaccccgaacggctccccgttgcggccacgatgcaggatcacgatgtcggcaacgcccttacggagtcccttcgcctgctggcgcagaaaatactgcttgccagccgtcccgccgttctcgttcggcacgtggaaccagtacacgtctggataccaatgattaaaccaggtggtgaagttaatcaggtggtcatcctcaagcgccttcgtcagcttggttggtggatccagatattctttgatcacaggtcgtcacctccttcgaaaattttacgggctatgacgtcgcgagactttctgccgcctatacgccggtgcgtcacacgcttaggcgctgcaatcaggtgagcggacggcaggatcttcgtttttacccctttccgcatcttgccccgggtgttcggtgatgcaacgtgcttatccagtgccgccttccactgctgttttgctggcatgctgtcactgtccggccaaaacacctcataggctacgaagtcaggatccccctcattccccagcacgtagcggaacaccacgccgtttccgcatttcgtcggttcaacgttgaaggatcgcacgtccacaaagtcatcccgggtatagctctttttctcaaggctcctgtttgggtcgatcaacgtgttcccgcagtgggcgcactgtcgggcggtgatgtcgttctctgcgccgcatccgcgactgacaaccacgccgcgatcgttcttaaagtcatcgcatgtgcgcgatatgaaccagtggtgacagcggtcgtccttgcggtatggcgtgccgtcttcctcgatcccgtcgtggtcgtacacatggcggcaccggcgcgcgtgcttgccgttcgtgtgtccataggggcattccttcgtctggccggtgctggtgtccgtctcatagcggtactgttcaaggaatggcgagaagtacagttccgccaggtcgtccagtgctccaccgtagtcgagaacaaggttgtcctctttgatcatcccaagctcttcgatgtggaatttcttgaggatgcgcatcccgcgaccgatgagctgaaccagcagagtgaggctgccgatcttgcgcaggataacgatcgtgtcccatggcgggacgttgtatccggtggtaaggcaaccgatctgaaagataaatttgcagcggttgttgaatgcgtcttccagtatccggtcgcgctccttctgtggcgtgtcgtcggtgatgatcccgtaagtcacgcccggaggtaacgcgctggccgcctccttacagtgcttcttaccggcgcaggtaacgagtacgcagttacggttggcggtacgcttcacgacgtcgagcatgatgttttgcgtgatggttccctgggacaggatctgcttctccatctcgatcaggtcggcatcactgaattcgtcgtcaccctcttcgccgcgactcacgaaagaatcaagctggtaggtaagctcatcatcgatcgcaccgtaatgggtaggcaccaccgcgccaacttcaaccaggtactcagtggaaatgtcacacaccgcacgccgccagaatcctggggtgttcctgtcttcgttgatgatcggctgagtgcctcggtagtctgtgccggtgtacccgataacaaccagatcccgaccgtacatctcccggcaacggcgctgcatctcccggatgataagcgtgtacccggtgcggccagcggcgatcatctgcgccagcgtgcgttctgcgttgcgctgcaacctctcgttgtcggggtgcttatcagccagctcgcaagtcatctcgctttcaacgatgtcgtcgacgttgacgtgctggcattcgtcgatcagcaggaagcgcggcacgaagttagccagctgcttttcaagggcgttgaccaccgtcttctcgctgccgcaaatgatagggaaggtcgtggatttcatgcgcaggccagcgctgaacacgctgttctccaccccgaagttccgtatctccatggcgttctgcttgatgatcccgccctgacgtgacaacacgagcgcgggcttgttgagctgggtcaggcggcgggccaccaggctgatcagcgtggtcttccctgccgacacggcggccttgacgacgaacgggccgatctccttgtagttgttgatggcctgagacgtcgcaaagtgtgccgcgaactggaacgggtaggggtcgtatggcatgccgcgaagtcctcgcagtagctggccgcgaaccgcctctatgtccgtctcctcaatcatttgcttgatgcttttcaccttttccattgttgcctcgttgacgtggtaaacattacaatatattctgcacaacgaataccaaaacacaaggaatttaaaatgatgaatattggcaaactaccggaaccagaaattaccgagggcgcgatacagcgggcttttgtgcgttctatgggcaactcattccagatcatgatcccgaactactacacccctgacaacctcggatatgaggcggacctgttctgcatccgcaagagccgctacacggtggaagtggaggtgaagatctccattgccgacatgcgcgctgacttccgcaaggcccacaccgtttacccaaagacagcggaggaagcagaaaaatactggcgatcagacgaaaacgagcgcgtcccgtacccggtgaagatgaagcatgactgcctgaaagctggtgagctgatagccaaccgcttctacttcctggtgccgtggactatcgcggacaaggcacgggagatcctgccggactatgccgggctttacgtgtacaaccagcgcggactggtacacgaggaaaagatggggccgatgctgcacaagcgtaagctcgatccgaaatatgaccaggggatcatggccaacctcaacacccgctacctgaagctgtggaggaggtcatgaagttctaccccattgagcagatagaacgactcatggtcgggcgctgggaggttctgctatcccagtattgggataagcgcgcattcaacggcaggcatcaggcctgcccgctgtgcggagggaacgaccggttccgctggggcgaatcgaagcaggacgtcacgatgaagggtcgcggtgctgcaatttgcaatcagtgcggatcacacctgggcctgtggtggttcatgcaaactaccggctacgaattcccggtggcgctgcatgagataggggccaacttcctcaaggtcgagcctgaccaggaaatgacgaccgatccggtgatcgcccgcgacgcattcccgaaggctccgcgcgtcaggctggaagagaaaaacttatcagcctctcagaagtacatccgcaagcagcaggccgcgcctgactatgatcgccggttttggatggcctacgacctgatcgagacgatgcgcaaatatcacatgtgaaacacagttgacaggtatatggtgcccaagtaatatgcccgaacacccaacagaaggagcagaaaaatgtcagaacaaaccaccgtgtcaccgaagaccgccagcgcagtagcagaagaaatcaaaaaagctattggccgccgccgtatcccggtaattgtcgcagaccaaccggccatcgcgttcatgatcgccaaagaggccagcaaaacaggctacggcgaagatgagcagctgggagtgaacgccggattcgccgagaaggacgtggtgaaccagatcgctaacgccgcgctgttcagaaagtcatataaccgcgtccagcacgtcgtcgtcatcaagtcgagcaaggcggcagcggctggaaactttgatggccgctacttcgtgaagatcatgtgcaatcgcctgtatgtcaccatggggagcctggctaactatcttgcgggggcggaatagtgagcggggcaaagcccgtggtgattggctgccggaaaatgatcaaaggcagcgagcgcggaaagatggtctgctgtgggacatacttccacgctggcgggcgaagcagatgctggcacgtgatcgataatgtcgtggtgtgtaaacgttgtttcaaagagtggaaaaaggagcacaaagatgaagaaagcgatatttctgtttaaccgctcgcggcacatgttgcagccgtggttagacgctggctatgagtgctggacatttgacgggcagcttcctgacggtgttcacgaggttgagccgggattgatggcggttggcatgtggttcgacgcctcagctaccagcgtgcatgccagcgacgtagccaggatcgtaggtggtggcgtgaagttcatcgcctctttcgcggaatgcacatatctgaccactaccggcgcgcgctggctgtatcacccggaagatcgcgatcttccagttgctgagcgccgaccacacccggcataccccaaccgccgccgggatatggaggacgctgtgaagctggcgaaattcgttgagctggtggaggcatatcgccacatcgtcaacggtgatttttccaccggccagatcccgtggatgctggagaatccggctcgatcattcctgccgaagctgtggcgcaacttcaatcacaccttcaacccgtgtgactatggcggctatatcccggagggtgaagagatgcacccggactaccctggtgtcattcctgaccgtgacgcctacaccaagctgaccgggatctggtgcagtgaagcgttcgtgatgcccgagccgaagccggtggagccagtaggcaaggatttcaaccgggcgataaaggtcggcggaaagagcacccgcaccaagaacatccgcagcgccactccgcgaggcttcgcgctggctgtattcgaggcaaaccaccgtgcataagttcattatgacactggaagattaccggatgtttgccactcgtgaagaacaccgcgtgatcagcgttgaagagccgcagattggcgatgcctgcatatcgtgtgagggccgccttgatattcacgtacaggtgatctcctgtcgtgaatggacgttaggcggtcagctgttttatgtgagcaaaatcaaatatcggtcaaataccccaaaggaaacgaaatgaaagacgaagcagacaaagtgactatcgacgagttcgaagcagaccacaacccggcgctgcacgcggaagccgcagcaaagggaattacgccgtggcagctgttcagtaatcgcgtatgggctacgaaggggctggtgactggcgggcactaccaggcagttcgcccgcagaaagtgaccggccgccggttcaacgggagcaagaccccggataacgtccgcccgaactggcgcacccctgagcacgtgttcgcgtggctggatatgacctacggcccgtttgaggtagatcttgcggcctgcgagaagtcgacgaaatgcgacttctacttttgcaaggaagagaacagccttgcgcaagactggagccagtttgatgcgatgtttctgaacccgccttatgacgacatcacgccgtggacggagaagagccgcgagatcaagccgggcgcagtgctggcggtggtgctgccgaacgacaacagcacagtgtggttccgcaacatggtggatcaggcctacaccatcatcaacatcgtcagcaacggcaagaactctggccgcctgtcgttcgaacacgctggcaccgggaagccaggcaagcagaacaacaaaggcaccgtgctgttcattctgcgcgggcgtaagcgtcgcgccggtgtggagacgctctacatcgatcaggatcaaatgctgcgcgaactggggttactggatgcacagtaaggcgcaggtctggcaggccgctaaggagtgcggcctcgacgaattcattaccgccgtttcaaaagcgtttcccggcgcgattgacggcgtggcgatatctgcgaaagggatcggtgttctggcgactgacgaccgcatgctgcgcaggctggtgagggttaaaccgggcgtgacgctcacaaagcaacaggtcaaggagataaggacgaaatctggtgttactatgcgatataaaggggaaaattgaggagtagcaccgatgggtaagacgtacccgaggcacaatgcccgcactgtatcacgggctgacaggctgcgcaggatgaaccaagataagaacacgcgagtcatcaccaaatacatcgccgggacactagcccggataccagaaggagaagatcatgacgttagcacaggcaatcttgaaggcatcaaccgaagggcgagatcttaaagtaggaaagggcgtagatcgtgagaacaagcacataggcccgcgaaacggtaagttctggactgacgaacgcattcaggaagtgaccgacgacgtcaccgttcggcggatgacgaaggcgcagatcatggagaagcacaacatcactgaaagcggtttttacaacgcctgctaccgttttgggatcccgacaacaaaatgaaaaaacataccgttattcatatcgacacggctgaatttcataatgccgtctacatccttggtcgtgaagagaagatctataactggaaccagaacgtcgagttccgcaaacgccttgttggcctactgggggagattgcagcagcgaagcacctgaacaacatttacggccgccaccggatcatcatcccgatgggagtcaacgcgcgcaccggcgtttcggttaatgcgttcggccagggtgacatcatgaccatctcacgcacagggacgcgcgaacggcaaacgcacgtctatgaggtgaaatccaccgagggaatcggcaagcagttgccaaccatccggcaggacaacgctgaaagctacgtgatgaacggcgttgatgcaatcattctggtggcggtgcatatcaacaaggcgaaggcagagtgccggatcatgcagcaggtatcgcctgttgaagtgatcgagaagtggaggccgatggttaaccggtacggtcaggagtgttatgctttcaactaaatagactttgagattatcatggcccccgttaacactcacgggggcttttcttttgggcgacttcttccacggcatcaccgacatctatcggatgtataagaccgacttagattaccccatcgctgcggccgtcatggctacattgcgtcacatccagctcggtcatgaaaggcgacagatctggactaatgcgatcatggcggcaatgttcgcgaagggcatcacctttatcatcaacatcatcggggattccgttccgcgaatgcactggatcgcaaaccaggatgcaggctggatcgttgcctgcgtgcttgggtacgttgggatcgacaaggtcattcgcgtggttgagcggtatttcccgtccatgaatctcaggggaaaaaatgatcggcaaccttaaaatttacctgctggcggcacttgccgcctttttgctatggcagggcggcagctatgcactgagcaggtacggcgaaagccggtatgaaagcggcgttacagctgggattaacaaggaggctgaacgcagaaacaaaattgaccgtgatctggccgaaatgcgccagagggagaaagaccaagatgatcgcgacacgactagccggattgaccaagcacgcgctgacgctgctagtgctgcttatgctgctgacaggctgcgccagcaactcaactcagccactgccatcgcaaaacaacgcgcctccgctgtcggcgttagcagtgatgccggaacgctcgccgatctgctcgccgagctgttctatcagtcagtgcaagcgggtaacgaactggcagcagaagctgatcgatactacatcgccgggcagcgctgcaacacccagtacaaccgactattgcaagcagcaaggagtaacaaatgaagatgagtgacaacgggctgcaatttacagcagcatgggaggaattccgcagcgcgccttacttcgccaccgaagacgagcgccgtcgcgggatctacacctggggcttcgggcacactggccgcaaccctccacgcatcaacatcacgcgagaagccgcgctggcgatcctgcgtgaagacgtagcctatgctgagaagaaggtgaacgagtgggcacataagtccatcacgcaacccatcttcgacgcgctggttgatctggtcatcaatgccggtgaagagccaatcaagccggacaagaaggcgggagacttcgacgacctggtgacgcaaggtcgctgggatgagctgatcgtacagctggagttcttccgcaaacagaacgggaagatcatccctgggctggttcgccgggcactggcgcggcaggcgctggcgaaggggatgaactggcgggatgctgaggccgttggccggaacgcgaaggtgtaaaaaacagggggccatttggccccttgtttttagttcagaacaatgaaactcaacagcagatagccaggcgcgtattcgccaacgttggcgatgtgagtcacctcaaccctgaacacccttcctgtgtatccgccgatctccgtccactccctcaacatcagggtgtcgccctcagcgtaatcccggtcgaacttccttaactccgctcgttttttaccagaaacagccgcgttaaagtgaaccgggaggattttaagatcgtggatcacttcatccctcccacgacctcagcgccgatagccgcgtacccagcgaggtcttcgaacgagtcggtgttgtcgtcagtctgagcgcggcagatctttaaaatggattgtagcgtcaccacgtccaggccagtcagcggcatgttctggcggttcgcagacgaacgcacgatattgaatgcgtcagctacgcggtcgaactggcgctctttgccgttctccgcgccgtagcggcgaccgcgctcctcaaggtggccctttaccttctcaagaacctgggcggcgtcaagaggctcagaggagcttttatgggcatcggccttttcggcgaccatgtagatcgcggttccatccgtgcgagcacagtcgcggttcagtgtcgcgatgttgtcgagggtcagcgccgactcataagctacaccgtggtggtggaagaagttggtcggaaattcgatcacgttagggactgagtattcaccgtgttccaccaggcaatgccagcgggcgatgatggtttcctgtccggcaagctcaccgtagccgatgaacgtcaccagcgagttgcggcccggaatgttgctgccgcgcagcgggctgccgccttcgctgatctcataggtgaagcgcagaatgtccccggcagtgaagcggtcggtaacgtcagttgtttttttcttcttggtggtcatgttcatttcctcagcattgcattagtgttttgcgccagtctgcgctttcgagatcgacgtagcctagcagaacaggcaccccttctgaactccaaaattcagaacggtaattcacgaacggctctatgtcgtaggcatatagcgcgccatccatatccaccgccacccaattcgaccagcgcggcacggttatgaccatgccgttatagttgaataccttaaacagcccgttagttatcagcttcataatcatccccaaagcacggaacgcgcgggtaggtcactggtgcataggcctcgatcctgaaatcgcggttacggtctagcggctggtagaatgaactgaactccgggtgaatgccttcctggcaccagccgacgaagaagaacggttcgccgccttcatcggtgcggccgtcccagcacgccagctgttcatcggtgtacccgcattcgtcgaaattaacgtaccagaagcggcggatcaggcggcagttgttacgcagacgcaccaccacccaaaactccatttcatgcccgtgctcaatgtccggggtgtcgcccaaagaccagactgacggcaagaattgttcgaatactggctctttctgtttcatttgcaaaaatcctctacgttgatgaagtcgggggtcataaccatgttgcccgcccgtaggaagctcaggccgaagcggtggatcagggtgctgcactggtcgatgtcgctgtagtgcatgcgacgccagaatcctttcagtgtcccgacgtcgtcccagcgcacttgcgggcggtcgatgaactcagcgcggacgaaccggccatagtgccaaacccattgccctggcttcacgtcggagacctccacgagcttagtggggaataccgggatcttactcatcgtgctttcacctcgccgtagtagccaacgtccatcaggtctgatacgacagcgatgacctgagccttcgcctcatcatctgccttgttgttggcaatggccttcatcactgcgctgcgggtgacgtcgaacatcggttctgacacgttacccttgcggtagcgctcacccagcttgcaggcgtccttcatgaccttatccatctgcgcgttatccggcaggcggtcgtatacaccaagatcgcgctggatattgatgttcttgatgccaacggcgcagctaacggcgctggcgtccccgacgtatgagcatcccagcacagcggcggcggcgatggcgatggcggtaatgcgtttcatcggttactccttattaccacggatggcggcgatggtttcaatgtggcggcgctcttcctggcggcggcgctcttcttcttcggcgatgttacgcatcaccagcagaaacaggatcgccagcagcggggagaacaccagcgacagcagcgcccaacccagtccattacgtccacgacggtcagcagcgatgcctaccagtaaagccagaacacaccaaataattaacacgctcatgattctctctcctgttagtcccggcaccctgccgggatctgcatattagtacggaataataacccgtgtcaacactatagaataattccagcgccgtgcgtgtaaacggtggcgatggtgagcagctcaaggcgtagcgacttcaacgccccggcggcggtctttgcgtcgatctcggtgacgtggctcttcgagtcggtgtaagacgctttgaagcggttgtgcccgtaggcgatgcagcgcacgcgcccgaactcgacgacgacgcggtaggtcgtctccttcgtgttctcgttgacggcttccagcacggcgaactgtgccccagtcatgagcattgcgcagatatgcgcgcccagctcgcgggcttcttcacggctggtgatcttctttagctggtcaatcatttcgggcctcctcgcggcctgctggcgtgatctcgcacgccccggtagttatgttccattttgccagtccacggctggcaagtccgttaagcgcggtgacggtgtgggccttgctgtcgtagacccatgcaccagcgcgccattctgagacagcaagccgctttaatacggcccgctgcctgatacgcagcttcactccgggcgaccaccggcagccagccatgcagcgtaagcgatggagcgggtcagatcgcacttcatggtgatcttgcggtcttcatcggcgttgacccactgcgagaacgtcagattcagaggcataggctcaccctcagcggctgcgagcgcgtggtgatagctgttcagcgacagcagcagggagacgcgctgccgggcagtcatttcacgcatgatcgcccgcacgcacatggaggcgctccccgccccttcatgcttgcgctgtcggccatcccaaaactggaatttcatcgacagcggtggtcttttacgtccgtccataatttcctcctgttatgatatatattcgacggtttcaggaatgatcgccgcatatttgcagcgttttagcgctggtatatggtcaacaatatttatcagaaaggcagctcgctatcgatccccgtcacccgtgggcgggccatcatctcaaggtattccttttgggcctgctcctgcgccagttttgcgagacggcgaacgctaaccatcagtttaacgatgaagcgggccgggtaacgatcgagggcaagcagatcctggcgaacgcggtcaacggcacgctgtacgccgatgtgcatcaggtagccgttgtgagagtagtggcgggcacactgaacagcgcggtcaatgatgccattaacttccagcgcttcggcgtgtgcttcctggcgggctgcgtaggcgcgctggccttcaacggcgtccagcagtttagccagaagcgctttcacgtcgcacagactggcgttagctttccactctgcctggttccagtcgtcgaggttagcggagatgtaaccttctacagcctgctgcatatcgtcgtacatcgtatcgtcaagggtgtcgacgttttcgcagatcagcgcgttcgctgcggagtcgatgatcaggcaggccagcaggtcggcgttcttgaactggccgcgggcttgctcgttggtcatccagcttgccgggttgccgatggtcagatccagcgcggcgagaatttcgttagcggcggtaagatatttgatagctgacttagacattttgcgaccccttgtgatttatcggttagttactgcctgttcgataaatatattataggggccgcatcatgtcaatagtgcttacactactccttaatgaattctttgaaatctgcggacgatgtctcgcgccaggtcatcagcctgccgttaatgatcgcgtgacgctcgcagttgtaatcgtccctgaatttcagaatggtcatggtgttcaggccggtcttggtggtcagcttgcgcatgctgcccgctttagcgagaagtgcggggatgcttgtaacgtggcaaatcaggctcatgttgttttcctcagtggttatcacggcagctacccataagcgggggaacggcatctttgatcgtgtagtaagggttacgggcttcgtgtgggttagactctttgctcaggtgtcccagctcagccattttgtaaattgcgtcgcgcactgactcccgtgaatacggcgtcccgtcagccttaaacaccgtggagctgatacggtgcaggatctccttgtatggcgcggttccgtgcggctccgccctcagcagagaatacacggcttcctgcaatggcgtgtacacgtgcgcctggcgcttctcctccggctcaaagtgctcctcatccgctccggcgtccatatcgtaaacgcggtcttcgaacagccagaccttcgtcgcgtcgtcgatgtagatgaagtctggccgatcaacctcctgccctggggcaagtttcttctcatacgtgcttttcttcttcgcctcaacgtcattcgcgaacaccggcacctgaaagcctttgagcttaaagcgccccttcaaaccaccctggcggctcttgccgacgttcaggacagtgtagcctgtctccttctggcgggcgttcaatcccttgcctatctgtgtcttctcgcgtaccaggctgaacgttttatacaccgcgcccttcgctgcggatcctccacgagactcaagatcatactggccggacatcaggcttcccttgctgacatgcgggatgaagatcccggcgcagttgagggactcagcgaaccggtgcccggcagtggtgatcagctgctggtcggtgttgctgttttcgtccatgctcacgccgttattgttggccgccgccaggtggaacattttgctgtcgaagatgaccagattcaccggcctgccgttggcgaactgcaacacgcggctcttctggatgcgcaactttcctggctccatcaggtcggccggccgcttgaacaccttgatccagtcacggagattgacgccggtgcgcagcgaccaggcggccacctgcaactcaacgctgtccgggtcttcggtgaagaacacgctgacgccggggttacacacgcggaagcagttgaacagcgggcgacccatggcgaggctgaccgccatttgcaccagcagcgtcgttttccctgcgcctgcgtcaccgttgatctcgttgatggtgcggcggttcagcagaccttcgatcaccgggtcgtagaagtccggtgaggtgttcagcacatactcgccagggtcgtaatctttcagcgcgggatcttccaccaacccctgctcaacctcttcggcgaggcgctttgccacctcaacgcgctgggcggataagtccatcccgagattctgcttttcattctcctcgcgaacgatgcgttgcagctcaaggtggcgctgaccggcgtctttcttcttcggcttaggtggttcaggtggaacaggtggcgatacttcttccgcctgttcacgctcctccacctcagcacgtgctacctggtcgaagtaagcctgcatgtcggccatttcctgcgaataggcttcgtcctcttcctcgcgggtcattggctggttgagaatgtccgccgcttcgtgctgtttctcctgatcgcccagcaacgccttccagtcgtcgggcgtcatcggccttttgttctcttcgttcatcgtttcctcctgctttggttcggacattattcacggcaggtaataccgtgtcaacagcgattactttccgcctgaaatcagggcggtttttgcgtgtttatacagtatgtaaacaatgctgagggggactcccccgtatcaatattatatttccaagctaaatcaagaggatggcaaaaagttatcaacagaacacctgtacacaaattgagcacataaaacgcgtatacagtaccggcaacagctcaggcggaggtgttctgccgtgcttctaacggtgaaaatactaagttattgaatcgcaacgattaattcaggtggccggttaaaaatgctcaatacctgacgattgcaagtagctgatatgaaaggattaatttcaggtgttaagtggtatccctattatatataaaacccatataattacagaaacacgtacacccttacgcacatgggggaagaaaaaagcgctacgcagtggctgcgcgtttttattctccccaccatgccgtataggggtaaactgaggcagagccacttgaaagaggaaaacaacatgactgataaggtgaaggtaacgacacctcggaacccagtcggcagaccaaccagctacaccgaggacatgccggaaaaactccttgaatatttccgtgtcgacgttgatgactatatccagcactcacacacgacagccgggaaaagcaacattcgcattaacccgaagcacatgccgtctattctcaacttctgcgagagcatcggcatcacgacgacgacttttcacgactggcgttcgaagcataaggaatttgctgtcgcttacacgcaggcgcgcgagctttacgagcagatgattctgaatattggcttcgccacgaacagtactttcgcgaccttcatgctgaaagcgaacttcggctatcgcgacaacactgagatcgtcgtgaccggtgacgccaacaagccggtgcggttgaagatcgtcagcgagcggccgaaagatgagaagccgcgcgaggagtccgaagccgtcgactggggtgacgactaaatactgcttgacatatctatgactgcgcaggaatatgggggccgggcaatcctgccctcactgcacaggacatcaaaatgactgaatcactgaaattcacctccccggcaccggcaccagttagcggcgttctcgcttgcgcttcccgcgaggcaggtgcagaaaataacctcaagctggcgcgcgccatcgtagtcgaggtcgcagaccgtggcgctgaccagcacgtgaaaataaaagtcggcaccctgcttgccctggcgctgggccttgatggcgtcatgaaggttatggcgtcgctcgaggctgatcgcgacagcaagatcaaggcgctcagcgagtgggaagtgttcggcgtcgaaatgcttgagcagaagttcaagtgcctgccggtggtcaacatgaagccggaagagaagcgtaagcgcattgccgctggtatcgacacgctaactcagcgactcgacgagcgcagcgaagacctggctttagtagatggacagctgaacgaatggcgcacgcacacccggcacatcctggatacctacttcgccacctgccccaccagcaacgccaacgaccggaatcttcgcctaatcatgaaggcggctatcgaaagcgcacacaacaaaaacaagcagctgaacaaggactataacgccatgcacaacagagcctacgaatcagaccagctgcggaaggccgcagagcgggagcgggacgacgtgatcaacctcaaccgtaacgcagcggaagagatccagcacctgcaaaagcgcaacgagcacctcgatcagactgtcgtagaccttgtgcgccagcgcgataagaacggccagcaggctaaccagctggctaacgaactggtcgagaaacgcaaggagatcagcaggctgttagaaataattgaccgcctgcacgcagagatcacagagaagcgcgacatcatcggcgaagcaacgctgcgctgcactgcgctcaccaatgacgcgaaggcgatgagcaagaataacagcgaactcgcagcacgcctggctaacgttggtctggagatcgccaactataagcagctcgtggaagacctgaaagcaggaacggcctttgaccgtggcacagtgaagcgccaggcggacaccattgatcgcctgtatggtcagctcaatgagtggcacgactgggctacagacgtcatttgctgcccgtcatcaatgggcggtgaagcgctgcggactgccatcaccgcagcgatgcgcaagcgcaaggagcgaattgatggtcaggagtcggccatcaaggcgctaactgtgcagcgcgacttgtggttgcagtgggcgaagcagttcaccggaaaagacaatgcaagctggtctgaactgttagatctggtgaaggcaaaagtgaagtcgatcacagagggaatcgacgggccagcggagcacaccatcaaaggcacgctgaaagtcacccagctgaaaggggatgtcgttgccagcgatggaagctgggctatgctcaaacacggcaacgcggtaatcgctggaaacattcccgccagcaagctgaccctgggcgaggagatgaaagaggccattcgcgaagtcgtccgggaggagatgagcagcgcgttaaagcaagccatcaagaacgaacttgataagctgaccatgtaacccatcaaatcattaaccagcggcccacgacgggccgcaatgaggtgaaccaatgcagaccttctacccagtctttagcgccattctgtgcatgttttgctttctctgctgcaaagggtgggcgacggccctggacatcggagccggggaagacaagcgtatgatcaggatggctcgcaccttcgacatcgctggcgacgtgttccgctgggcgtgctggctgttcatcgtcgcgggcttccttcgcaccctcggattgttctgattgcttacactttgtaccatttgcccggttgatcaccgaagtggctgactgataggctttaatgatactcgcagcgaggtggaaataatggggatcgtaatgggtgtgtggttggcgctggtgacagctatcgcgatgatcgcaattcacatggccgcaatggacagggagcggctcaaggccaacccggtcagccagatcaccaagctggtgctcgcggtcttcctcctggtcggcgtagcgcacatcgccaccaggtacacagctttcctccgcgtgctatcctgacctgacaactgctatcatggccccgttaacacaacggggcttttttatgtctatccaatctgacgccagtcaattcattgacctgacactcacaccaccgcagaacgactttctgcaactgtcgtgcaaacacccggccttcgtggcgggcttcggtacaggcaagagtcagaccatggccgtgtcgtccgtgcttgacgcatcagagggtggcgcagatgccacgatcgctatccttgagccaacgttcgacctgtgcaagctgatcgccgtgccgcgtatcgaacagatcctctccgagctgggcattcgctttaagaccgtcggcaacaaggagatatacacctcccacggcgggatcggcgacttcctctttcgctccatggacaacccgactcgccttgtcggctgggaggcgttccgcgtccactgcgatgagatcgacaccctcaagaaagaggccgccaaaggggtatggcgcgcagccatcgcccgctgccgtcagtcaccgaaggagtacgagccgttcgacttccttccgtcagaccgcccgctgaacagggttagcgcctactgcacgcccgaggggttcaacttcctgtatggccgctgggcgaaggacaaggagcgcagccgaaaggccggttatctcatgatccaggccgccacctcatccaacccattcctgcctgccgactacctggacgccctgcgcgccagctacgacccacagcgcttcgaggcctacgcgaaggggcagttcgtcaacctgaaatcgggcacggtctataagaactttaagcgcgagctgaatgacaccgacgtggagatcatcccgggcgagacgctgatcgtcggccaggatttcaacgttaacaagatggcgacagtcgtctacgtcgagcgctatggcgaggatggccttgccgaactgcatgcagtggatgagcgacacaacggcatcgacacaccggacgtcatccgctggctggtcgagaagtaccagaactcgggaaatggctacatccacccgatcgaggtctacccggatgcgtcaggcggcaacaccagcagcaagaacgccagcatgtcagacctgtcgatgctcatgagcgcagggttcgacgtctactgtgggcaggccaaccctgccgtgaaggacagggtgatcagcgcgaacaccctgttctgcaacgccagcggccgccgtcggctattcgtgagcagcaagcgctgcccgcaattcgtcgaatgtctggagcagcagatctacgatgacaagggcaagcctgacaaggaggccgggaaggatcacatgaacgacgcaggcacctacccggtggtctataagttccctgtcgtgcataatggcacgatctcagcaaataatattgaatgggtacgatgatatgacgatcacgacactgccgcaggcggggacggtatccaccgaacacccgctttacaagcggtttaaccaggaatatcgcactatcgaggactgcgttgcaggacagacggtcatcaagcgtgccggtgttctgtacctgccgaagcccgaagcgtggacaatgaagcgttacaacgcttacaagcgccgcgcccacttcctcaacgccacctatcgcacgcagatgggtatggtcggcatcgcgttcgccaaaccggccacctacaccttgccgacggccatcggctacctgtcgaccgacatcgacggcgaagggctggacatggatcagctcgttcgaatgtgcgtggcgcagaacatcaccttcgggcgcggtggcctgctggttgactatgactcaccggaggacgtcgggcaggtgactacgctggtcaatagtggccgcgtgactatccgcatgttcgaccaccggcagatcatcaactggcgcaagagcggcggcaaatattcgctcatcgtgctgcgctacctggacgacgtcgactatgacggcttcgagcactatcaggtggttcgctaccttgagctgaggttggtggatggcaaggcatattcccgcctgtggacggacgaactacagggtgccgccgggctgccttcctcggtcattcaacagaacgggaacatgaaccaggagcagccggaactgcgcccgatcatggctcgcggaaagcagctcgactatctgcctttctgctggttcggcagcgagaagaacgacagcgacattgacccggctccgctgtccgacatcgcgaacaccaatatagcccactacaacgccgacgccgacaacaccgacagctcgtttatctgcggccagccgaccttcgtgatcgccggtgtgccgcagaacttccagaaggacaatccgagcattaaggtcggcggtgacgaagcgatcattctgcaatccatgggcaccggcacgcctaccgccagtatggttgttgcaccaccgaacaccccggccgccgcgctgctggagaagcgtgagaagcagcttgccatgctgggcgcgaagctggttgagcgcaacggggcaacgaagaccgccacccaggctggcgcggatgagaaaaccgacaactcgatcctctcccagtgcgtcggcaacgtcgaggcggcgttcaatcaggcgatggagatggttaaagacttcactggcaccgaaggcgcgaacgtccacatcaacaagcgatacgaagatatcgtgctgaacccgaccgaactgacagcctacatggcggcggtgcagtcagggatgatgcgtatgatcgacttcctcgcgtggcagcagcgtatcggcctgatcccgaacgacgcagatctggaagacgttgaacaggagctgaaagacggtgccgaagaaacgcagctgatcttcaacgcggctgctcgccagacccagcaggggctggacaacccgcaggaagataaagacccggaggaagataaagacccggaggaagacaagccgatctctaagaagaaggccagcgcgccgaagaaggaggctaaatgacatccgttaactcgcggatggcgtcggaggcggtaaggcaccgcctctacctctaccgctacagcgaaggccaggcgaagaagatgacccagctactgcgccgaatgtccgtggacgtggtcggccgcctgctgtacgcgctggacgactcaaagatctccgccgacaactacacggtgaagcgtcttgaggccatcaaagcagccattaacccgacgatcaaccgcatctacaaaaccacctacggacagctcaaagccgaccttgaggcgctgagtaacggcgagctggcgtaccagtaccgcacgtggcgaacgctcatccctaacccggtgcttgacttcgtgggcgggctggtggagatcccggaaacgcaggtatgggcagcggcgaacagtcgtccgttccagggcatgcttcttcgtgacatcccgtcagtgctgggtgaggccatgaccgactcgatcggtcgggcggtgcagcagggtatcttacagggcgagacgtatgaccagatcattcgacgggtcaaaggcagtgcagcagcggcctacaaagacggggtgatcggcaccaacgagcgccaccttgccaccgtcacccgcagcgcagtgtcgcacgtcgcagccgaggcgcgggacaagatcggcgaggcgaacgcaccgctcatcaagtcagaacagtggctgtcgacgctggacaataagacgtcgaagctgtgcatcatccgcgatcagctgctgtacatgcgggacaagaagcacacaccgatcggccatagcgtgccctacggcgctggccctgggcggctgcacatgaactgccgtagtacgtcgaccttcgtgttcaagagctgggaggaattgggcgttccgggcgtcaagatcaagggcgcgtcgcgcgccagcatgaacggacaggtgccgatttacatggactattcgagctgggtggagcgccagcctatgagcacgttaacgcaggtgttcggcgtggagcgtgcgcagctcatccgcgacggcaagatctcaccgcctgacctgttcaacgacaagggggagtatttaacactcgcccaacttcgcgaccttgaccgcatcccggcagaagactaacatcgtgccgttgacaacacaggagctatcacatgtggaaatatctgattaacaaagaagcgtttgacgccctcacccctgagcagcaggccgcatacaaggcagtcggtgattctggcaactatgtgatgaacatcgaaggcatgcctgacgtgcaggccatgcagcagcagatggccgatcttcaaacccgcctgggcaccatcgacgcagagaaggccgccgaagcagagaaggcccgacaggcagcgcttgacctggcgaagaagaacggagactttaagaccatagaagaggactataagcgccagatcgccgacctgaacggcaagatcgagggcttcggcaagcagcgacgcgacgacttcctgaacgcgcagatcgataagctggccgcagagctgggtggcaaggagtatgccgcactgttcaaaccggcgttgcagcagcgcctgtctgtcgagggtggtgaagatggctccgacttcatccctcgcgtgctgaaagacggcaagccgtcggccatgtcactgaacgacctgatcggcgagttccgggcagacccgacttacaagccggtgtgcgtagcgcctgcatcctctggcaccggccgccatcaggcaccgaccccgacgccttctgcttccgacaagctcccgagttttgaagatgtgcgcggtaagcagctgagccgcgcagaacagatcgcggcaagcatcagcgacgcagagtaagtaagcacaggcccggcaatgccgggctttttcttgcttgtccagtagttgccggttatcatccagacgtttaatcactcaaaggacatcgcgcgatgagctttactatcttccaacgaaaactgatcggtacgaccgttcagcttctgactgaaaacctgaacgtgttcaacgcggcttccggtggcaccatgcttatcggcagcggcgaggttatcaaggaaaccatggagaaaatgaccattgggatcattgacggcctggtgcaggatcgcaacgaacacgccccagttaacactgtggttcagccgaaggtgctttcccgcatccttggcggttccatcaactccgctggccgccttgggccggtagccatcacctccggccagctgcgcctgatcgagactgacgtgaaccgcgcggcagccgagatcgcaaccctcgcgtcggaagccatgctgaaacgctacgtgaccgtggcaatgggtgctggcgtggctgcgatcgaagcgttcggtcagggtatctatacccaggacgcccacgtgaccagcaaggccggtgaactgtatccgaccgtcgaagacttcccgctggcggcgtccatcttcggcgaccaagccgacctgattcgcacctggttcatgtccggcacccagtgggcgaagttctccgcccgtgaagcggtcaagtccgccaaactggtgtttgagctgggcaacatgaagatcttcaccgacggcttcggtcgttcgttcgtggtatccgacgcggcaagcgctggcatctccgcggcgacctccggcggctccgcgatctacgcacctgatcaggcgatcgtcggtctggcggcaaacgccatccaggtcaccactaccggcctcaaaatggctgctgacccggccaagctgggcggcgagaacattgaaagctggtggcagggcgagtttaactacggaatcgccctgaaaggcatgcgtcctaccctggcgttccgcaccgccaccgaaggcaagaaaactccgactatggccgacctggtcaagaaagagaactgggaagccgagaagggcgaaaccgaccgcaagccggttggcaacgacgccgatccggtggtgccgactcgcaacgtgcgcgagacgctggggatcattatgaagctgaccccaactaccatcccggtagcagaagctggtaattaagcgaagaagtgaatagcatgggggccgattggcccccttttcattggagcaaaatatgatcggcaatctggacgacctgaaagcattcgcggcggccaacggctacacgggaatgactgacgaggagctgagcaccgcgctccgccaggctaacctgtggctgtggtcactgtcatggaagggcgagcaggctgaacccggacaggcggacatttggccgcgcactatctgcgacgactacaactgtctcgactacgacaccccgccggaagttctccgctttacttacaccatcgtgtgcgacgccgtcgactctggcacggagttcaacaccgcatcggctggcgcgcataagaaacgcacccggatcgagggcgcgatcgatgtcgagtacagcgagcagagcctatacagcgcaggcttcgaggctccctacatgatgggcatgatcgggcactggctggaaggcaacgggcgcggctgtaacgtcaagatggagcgcggataatgaacaagctctatcgcgaactgcgggcagaggcccgcaagctgttcaaagagtacggcgcagtcatcaccatcagcaccccgggcggcatcagccgcgacccagtcaccggcgaggaagtggtgacgccaccgggcgcggtatgcaaggtgctgggcgtgatcaccggcgtcgacctcaagttttgggggctggcgaccatcccgccgggcgagcagcagatcgtcatggcatggacggacaccaccgggaaggagtgggagccgaagatgaatatgaccgtctcaggtggcggccgcgcttactccatcaccgagattaagccggttatccccgacggtggctacggcatcgtgtacaaactgaggatcaaggggctgtaatggcacgcaagcggaacggcacaatctttgccaacaatgtcgctcagtgggctggcggcgtcgtcgagcgtcacgaagagatcgtgcagctggcggcgatgaaggtcttcgcgatgatcatccagcgctcgcccgtcggcaaccctgacctgtggaaccgcaaccagcaggccgtcaaggagcgcaaccgcatgagcgacctacgaacggccatgcgcgaaagcgacactttcggctacacgaccaagcgcggcacccgccgcctcaagccgggcgcgaacatcgttgcagcaccggcgaaattctcttcccctgtcgggccagtcggcccgcgcatcccccgacttctcaagaatgagcagggcgtcaacccggtcgggaagggctacgtcggcggccggttccgggctaactggcaggtggggatcgactttgtccctattgagtggctggatgaacgggacaagtcaggcaccccgaccatcaacaaaatggtgaacgccgtcgagcgcttccgcgtcgggatggctgagcatatttatttcgttaacaattcgccgtatggctacccgctggaatatgaggggcactcacgacaggctcccgccgggatggtcaggatctcatgtatccaatttgaggaagcattcgcggcagcaacagcagaggcacaaaaattatgatcagcacttcacagattcaggcaaaattcgacctaatcgcaatgcagtgggggaataacaacaatatcgccctcgtgtggcgtaacagcgccgataacgacatgaacgagcaggcagtgagtcagctggtcggcttcccgcagcacatcccggccccgtctatctccatgggcttccagcagtcagacatagcgaagcgcgggatctaccaggttatgctgcgtgctcctcgcctttccggcacccgtcagatctacgacgcggccgacgcgctggtggaggcgttcaatgaagcgatgttctatgacggtaattatgttagcatcggcgacgatgatcggcagctataccttacggcaccggctgaaatcggcgctgactatgaagacgacgccgggctgcatgtggctgtcacgatgaactaccgtatcaacaacgtaagaggctaacatggctacgaaactctcctacaacatcccgaacggctccacgctgcaaatcgctcagacgatgggcgcaagcattgccatcactggcgtatcaaacgagaaggaggctatcgccaccctgtcagcagctgattctagcctggccgcaggcgactacgtgcagctgtttaccagctgggtcaatatgaatggcctggtgtgtcgcgtgaaatccatcgccaccaataaagtgacgctggagaagatcgacaccaccaacaccgacatttacccggcaggtggtggcgctggtacgttggttaagattcaggcgtggatcgaccttccgctgacccctaccatctccaactccggtaacgagcagcagaccaccacgttccaggctatccagcacgagcgcgcggtgaacatcaacacctataagtcggcagcgacgcagactttcaccatggcgcacgacgccagcgcgccagtgcgtgatgtgctgaaaaacctcgaccgcacgcaggacatcaccgcgttcaagttctacaacaagcgcgcgaaggaaacccgcgtttacggttgccaggtctcctttaacgagatcccgacctccgaggtgaacaacgtcgagacgaacagcctcgttctgagtctggtcagtgagatggtgatctatcctgccgcgtaaagcgtgctatcatcagggcggcttaggccgcctttttcatatctggagataatagacaatggctgcaaaattcaagttagtacccgctggcacgttcgaacttccgatcctgatcaccaccgtagggcaggatgagcctacagagctgaaattcacgttcaagcgcatgccgctgaccgagctgaaagagaagcaggaagcgatggcgaagcgcgtgcaggagatggatgaggaatacaagggcaaaaagctgtccgtcgtcgaagatagcgtgctgcaatatccgttgatggccgattttgtgctggatatcgcaaccggctgggagctgtccgacaagttcacgaaagagaatctgatcaccctgttcgataactacccgacggcgtttatgtcgatcagcgttggctaccagtccgagctgtggaagctgcgccaaaagcactaaccgccgcgattgagggtctgtatttccccgatccgccgcagcagctggtcgataatttcgggggggagctggaagactaccgtccagaagtggagctatcagcagagattgttgatagcttttatttttaccagcgtattgatacccaatggcgcacggggccgggcggtttaatcggcctcgactacaacgtgatccccgtcatggctgacctgtatggcgtcaagttcgatcgcctgctcatggatgacctggcaatcatggagggggccgcgatcagagttctcatgagcaggagtgatacagcatgagtgaaaacacagaacgcttgatcgtcgacgtcgacgccagcggggtcaacgcgggggcaaaatccctcgcagaccttgttgacgcggcgcaggacgcaggtagggcagcggacgggctgggcgacaagttcgaccaggtgaagccgtcagccgactcagcagccgcagcggtcgacaacttcaacaacgaggcgaagcagacgcaggaggctgctggcgacgctgccgtggggctgtaccggcagaatcaggagcttcaaaacctgctcgaccgcatcaggccaacgcgcgttcagcttcgtgacctggcgcagcagcaggaggcactggcgaaggcgcaggctaacgggctgctgggcgcgaaggaagcggaggagtacaacgctatcctcgccaaccgtgccgggatcatcgaccgcaacgacgctgctatgcgcggcctgaatgtgacgtctgagaagcagaagacgctacagcagggattaaccatcactaccgggcaataccgcgctgctatgggtatgttaccggcgcagatgaccgatatcgtcacccagctggcaggtggtcagaatccattcctgatcatgatccagcagggcgggcagattaaagactcgttcggcggactgggcaacaccttccaggcgcttaaacaattcatttccccttccttcctcgggctggctggcgcgacagcagccatcgctgcaatgggttatgcagcctacaccagcgcagaccaggccgatcgactcgctgcatcggtgacgctcatgggtggggcaggctttaagtcggccgaagagctgaacagggccgccgtcatgatccagaagtcaactggcgacagcattagcagcatcaccgaccggctgatcgagctgaacaacaagggcacgatgacagccgacatgatggagaaggtggcgatctcaacgtcgaagttgtcagatgccgggctggacgctggcgacgtcatgaaagacttcgataacctggtgaagaacccgatcaagtctatcgccgcgctcaatgagcagtatggtttcatgaccgaagcgcagatgaagcacctaatccagacgcagaaggagaagggtgagcaggctgctgctgccgaagcgctggacatctacacaacggccatgaataagcgggccgatgacgtgatcgagaagactgataacgtcggtcaggcatggaagacgctgaaaacagccgcgtcggatgtctttaacgatatggggatcgtgctgcgctcgtggggaaaccgagccgtcgacatcttcaaaatggtcaagctatcgatcgacgacctgctgaactatcttgcgcagatggacagcaaatttacgctgggcgttgctgacctgctggacaaggtgccgggcgttgacggtcgtggcgttctccgggcgatggggatcgacgtcgaaaccgtcgagaagaatggccgtgagtccatcgagaagggcaagcagatcgcgaaggagttcgctgaggtcagcaagcgggcctttgagagtcaggcagacgctgaggcgcgggcgcgcaacgccaacggcgctaccggcagcggtgctaccgatgagaagagcagggaagccgtcagcaagctggcgagtgagtcagcgaagcacaacaaggagaaggccgtcaccgttgcacagggtgatcgcatccttgagcagtatcaggcgcaggagctggcattacgggcgcagatcaagacgctgaaagaccgtaacgccttcgacgtcaacgcctccgagcagatgaagaactatcagctgttagtcgcgaagatctccatccttgagggcatccgggctgacgccaaaggccgggcactcaccaaggacgaacagtcacttcttgcgagcaaagaggagattctcgcgaaggccaagaccgtcggcctgctgggcgatcaggtcaagcagctggagcggcaggcgcagatcaccgatgaactgacccgcagcggcaatgacctgtctgttcaggtggcggccattaacgcctcatggggaatgtcagccgatgagactgcgcggctactggagaatatgcagcgcgcggcggccctccgggacaaaggcgcgactcaggagcaaatcgacgaggatgcacgccagcgtgaagcgctgcggcaggctaccgacgcgaaaacgcaggactgggcaggcggtgcacgctccgcgatcgaagcgtggggtaaggatgccaccaacacctcagccaacgtacagaaggccatcactggcgcaatggatgccgggctggactcgatcaactccttcgtgatgaccggtaaggcgtcgttcgccgactttaccaaatccatccttgggatgatggttcagataatcaacaaatggctaatgttcaaagccatccaggggatcggcggcgcgatgggcttcgatatgtccagcatcggattcaatgcgaagggtggcgtatacgacagcccgtctctgtctgcgtacagcaaccgcgtctacaccacgccgcagctgttcacgtatgacaagccgaagccgtttgcgaagggcggggtgttcgccgaagccgggccggaagccatcatgccactggcgaaggattccagcgggcgtcttggtgttcgtgctcatggcggcgctggtggcggcgtctccatcgggtcgatggaagtgaatgtcgaccagaacgggcaggctacggccaacgtgtcagagtctggcaagctgggccgagcctacggtgatgcaatggccgcagccattcaggacggcatcgcccgggcaagctccccgggtggacagatctggatgcttattaacggtcacgcgtgataacctacagcctcccacacaggaggctttttttatggctacattagacgcgtggatctggccgctggcggcaggtcaacaggtatcagtgaaagaccgcagccgatcgaacagcttcggcgacggctcacagcagaacgttttagaaggcatcaatccgttcattatggaggtgccctgctcgtggactggcaacgccaagaccggcaaccagatcctatccttcctgaaagcgcacatcaccaacccgttccagatggttccgccgcatggcgaactgggcctttacaccgtgaaatcaggcacgatcaaatatgtcgcgctgggacgtgcaaccatgaacatcaccttcacagccgagcaggccgtgggcatctacacaggggtgaaaggatgagcaacaccattttcgacgaagccacaaagctcgacccgtcgggcaagatcattctcatggagatagacggaaccgagttcggcgcggggatcatccggggccactattgccagctcccgcacacgagcaaggagatcctcgacagcgcgaacagcacgttgacccgcgatcagctgttcaactgcaaaagcgccaatacgcgcggcaccgtcacgacgaatgaagaccgtaacaccatcaactttaagtcgctgggcgtcgactcgaacctggttttgcctgagttctctggcggcctgactggtggcaagtatcaggtgatcgaggtggttggtcgctgggtgactccgccgccatcaactgacaaccagtatcagatctactacaaaaccgcagcgcatgatttttctcccggctacaacaagggcggggcgttggcgagcgtaaccgaagatcttggtgatggctggctgaaattctcgttcgacatgtcgaagctgagcgctggcggttcagactgggtaaacagccagattatcggcatccgcattgacctgtggcagcaggcagtcggtgagatcgagatcaagcgaatcagcatcctgaacaagaacccgcacgaggttgacgcgtccaagctggcaccgaagtcaatctggttcgacaacgtcgaatatggctattggccgtttatggctgaggggatcgagttcagcagcgagcagcagggaacgcctaccctgtccattggcaaccagtcgggggtcgtcagcgcctacctgcgcgcctatcagcagatggttggggcaaaggtcaagatcatccagacctacgcgaagtttctcgatccgcgcaacttcacagatggtaacgagttcgccgactcaatgcagcagtggacgcagctttactacatcgatcggccagactatgagggcgaagagtatgttcggttcgcgctgtcgtcgccgctcgacctacagaactttcaggtgccaacgcgcagcatcacgacgttctgtcagtggcaggcgcgcggtctttacggcaaaggcctggacgccggggaagaaaacgggtgcagctggaaccgtggcacagctaaaaagtggtacgacaagcacgggaaccaggtggacgacatcacgaaggatgagtgcggcgggtgcattcaggattgccgcctacgcttcggccagctggtgagtgacccaaaagcggccgttctggactacggcggttttatctctgtgcgcctgattgattaaacgcactgtatcgcgttctgcggcgttttcttgcgtaagacgtccgaacgtatggcctgacggcgttaaacgcgatagcgtgccgttcaggcccgtagttttcgattcacgaagataagaatacatcccatagccatatataataaaaaccctcccaagggagttttatttatatggtcttgggtatgtcttatatgtatttatggtaataaatatataaacccataccacctaacacctgaaattcagccttttaaatcaatagcttaaaatttcaggtggtgccaagtggaggcaaaaatgattgacgtaaatgacatcccggaacagcaattaacgtatattaaacaacaccttactgagtgttcgccgcaagagggctgcgggctgctggtgaattcaggcggaggcctagaatactggcctgccatcaactcagcagccgacaaaatgaacagttttcgcattgccccgcaggaattcgctgaggctgaggacgccggtaacatcgttgccgtcatccattcgcatcccggtgccgacggtctggcgtatccgtcaatcctcgatcgccagctcatgcaggaaacttgcttaccgtggttcatctacgccccggacaaggatgagatggcggtattctttgaggagccgaaggggctgctgggtcgtgacttcgtgctgggcgctacagactgctacggcctggtgatggcatggcaccgttcgcgaggcattcagctccctgacttccgcaagccgtacccgtggtgggagaagggtgaggagcttttcacggatgagaatttttcagcagcgggatttatcaagaaggccgaggcagagccgggcgacatggttgtgttccgcatcgcgtccagcgtaagcaatcactgcggtatctacaccggcgacgggatgattatgcaccacctcatgaaccgcaaatcgaccattgataggatgtatggcacctaccttgagccgcgcattactggtattctccgacatgagttactaccggagatcacaccatgggaaaccagctaagcaccatccgactgtacggcgaaatgggggcgcgcttcgggcgcgtccatcacctcgcggtcgactcctgcgccgaagcaatcagcgccctttcctccatcctccccggattcgatcaatacatgcgtgacagccagtcgcgcggcctgaccttcgctccgttcatcggaaagcggaacatcggcttcaatgagatgtcgcagccaatccctgacggcgaagaattccgcattgccccgatcattatcggcaacaagaagggcggcctgttccagaccatcctgggcgctgcgatgattgtcgcgggcgtcgtggcgtcgttcattcccggcgggcaggctgtctccccttacctcgttgctgctggtatctccacggctgctggcggggttatgcagatgctttccccgcaggcgacaggcatgaagatccgggaggatgacgccaacgcgccgtcatacgccttcggccagccggttaacacgacagcacaaggtaacatcgttggcgttttgtatggcgagcgtgagatcgggggtgctatcatcagcgccggaattatcgctaacgaggtacgttcttaatggaaattaaaggatacaagggcgggagtagcaacgtgcatacccccgttgaagatccagactccctgatcagcaacgcaacggtaaggatgctcctggcgttgtcagagggtgaaaccgtgccgattagcgcggaagacctgcccaagcgcgtttacatggacgggacgcccgttcagaacgatgacgggtcagtaaacattccgggcgttactctggaatatcgcaacggcaccccgcagcaggagccgatcaacggcttcccggcggtggaaagtgaaacacgtatcaacgttgagctgaaaaagtcggctgcatgggtgcgcaacatcaccaacaccgagatcgacgccgtccgcatccgaatgaatttccggctggtcatccagcagaaggacggggatcgcgtaggcggacgcattgagtaccggattgaataccgcaaagtcggcgacagcgcctacaccgtggccttcaatggtgctgtcgacggcaagcagaaagacaactatgaacgcgatcaccgcatcgacctgccgaagagcagcactggctggcaaatccgcgttacccgcctaactgacgacagcacgttggataccaccgtgctcaactcagggatcgtggctgtcaccgagatcgtcgacgcccgcgttcgttacccgtggacgtccctactgttcgtcagcttcgacgccaaatcgttccagaacatcccgacaatcagcatcaagatgggcggccgtctggtgctggttccgtccaactatgacccggttaaccacacctacagcgggtcgtggaacgggacatttaaacaggcgtggacggataacccggcgtggatcgtctacgacatcattctgcacaagcgctttggtattggccgccgtatcccgtcctcattcctgaacaaatggacgatgtacagcatcgcacagcgctgcgatgagctggtgacgaacgccgacggcacgcagaaccgccgttacacctgtaacgtgtatatccagaaacgcgcgcatgcgtggagcgtcatccgtgacctggcgtcgatctttaacggaatggtcagctacagcaatatgcaattgcagttcgcgcaggatgcaccggcagaagtccgccatgttgtgacaaacgacgacgtcgtgaacgggacgttcgaatattcctacggcagcatggctaaccgccgcgggatcgcgatggtcacttttgacgacccgaaggcgcactataagacgcagaccactgtggcgcagatcaaagacctcgtggagcgctatggcgttgagccgctggaagtgtccggcatcggctgcacggacgaatacgaagcgcaacgtcgcggcctgtgggcgctgctgtcgaataccaacgacatgcagatcagctaccgcgtcggcctgagcggcatcaagtacctgatcggcgacgtcgtcggcatcgctaaccgctacgtgcagggcggccagttcggcgggcgtgttgctggcgtatccggcactaccatcacatcagaccgcacgatctccgatcacgtggcaatcggcgatcgcgtgattgtccggcaggctggctccgacggcacctacaaccgcgtgatcaacgcaatcgcggctgaccggatgtccttcaccgtcgacggcactaaccttgatattcagagcggtgaagtgttcctgctggatactaaggtgctggcaccggaactaatccgcatcaccaagatcacctacaacgagcaggacaataatttcaccgttaccggtctgcaatacagccactcgaagtatttgcaggttgacaccggcgcgcgaattgaagaccgcccgacatcgctgatcccgatcggacaggtacaggcacctgctaacgtggtggccgaaggctacagcatcgttaaccagggtattcgctcagctaacgtaaactgttcatggttcaccgtagatcaggccgtcagctacgacattcaggtgcgccgaacctctcagtcaaacggtcagtggtcacagggttggactaaccttgccagccagtcgagcacgtccgtagacctgaccaacgttctgaccggcacctatcagttccgcgttcgttccgtatcccgtgacggcgggtcgtctcagtgggtcgagtcgaatcaggtgttcgttgacggcaagcgcggcagcatcccggcagtagctggcctgaacggcgtaggcatcgttaacggcatcacatggcgttgggtgactggcacagatgatctgatcgatatgaagtcgacagagctacagttccagcgcattgacggaaatggcgctccggttggtgggtggatcgatctcagcgtcgtgacctacccgaccgggacgttcacacagtccggcctgaaatttgccgaacgcgtgcaggtgcgcgcccgctttgtgtcgtcatatagcgatgctggcgagtggagcgccccggtcatggcgatgacgtccgacaacatggacgactattaccagaacatcgacgacgcgatcaaaggctccgacacctacggcgaacttaccagcggcatcaaagacgtaagcgacagcgcacaggcagcgaaagacgccgcgcaggccgcgcaggttactgctgacggagcagtgacaaccaaccagcagcagcagcagcagctgaacaaccagctggccgagatccagaagaacgcgcaggccatcaccaccaccgctaacgcgggggcggcaaacgccagtgcaatcgctcaggagatccttgaccgcaaggctggcgacatcgcgaacgccaacaaggcagctcaggacgtggccgacgctatcgctaaggctgagacggatgacgcagaagtggcagcccaggctgcggctaacctgctggcgacaaaaaacgaagtcgaagcgcagatcagcaccaccaataccacgatgcaggacggcttcgacagtctggctcagcagatggcatccatttctgctggcactggcgagcagttcgacagcctcgctatctggtatttcgacaacggcccggaagggtgggcttctgacgacgccaacaccaatctgctcccagtagaccaagatggctggatttacccagctggcgcagcagccaccatgcgctcaccaaacccgctggcaatcgacgcgcgcagctataagtacatgcgcctgcgcatgaagcgagtcgggaacccgtcatgggctggcaagctgtattggatcggtgttgatgagactggctggacaagtacccgctcgcttgctatcccggcacctgactttgacccgaccaccgggatcactgtcctgtcgctccctgatctcctgtgggcgacatccggcaccgtgcgccgcctgcgctttgacttctcaaacaatcaggacgccagtaactactacgccgttaactggatggcagtcgg

SEQ ID NO: 18 - DNA, 157736 bp, unidentified
  source 1..157736: mol_type = genomic DNA
agttttataccccgcaaggtctgggcaaaaacgtccgccaggtcttcatcggtcagaaacgtggttcagtttatcctgatgccatcgcacgttttaagaacccgatgcgcgttattgcatccatgatcgaagctaccaagcaattcatggcgaccccgctgggcaagaccattgatggttacgccgtgaacttctctaagaaagcgttggatcgtggtatgaccctgatcccgaaaatcatccgtcaatctggcctgaaacaaaaactgaacgtcatggatctgacctacgcgcctgtccctgaccgtggttatgtttggctggttcgtaagggtaaagatccagctcaggtcttcgacggtccgaagatgcagggtatcacctgggatgatccagacaaggttggtgacgttccggttcagaacaacactcccgatgttgggactggctccggctccaacaccgagattgaagtaaaccgcgaatggtataacagttctgacactggtcttcaactgaaaaatggtcgtgatccaattcgcggaaattacgtgcagctggtcagcggctcacgtgaagtggcaaagttctttgggtatgatttcgacaaatatccggacggcgctgaagtggcatggagcatgaagcgaggattcactaaccaggatctggtcggcgctgtcatgacaaaacaaaataaaggcatctatgatcagtatgtgttcaagaaaggcagtcaagtagttttgactgttgatgtggacaaagcagcgagtgctgcacctaccgactccaagtctcccaaattcgatatcaccccggcatcttcacctactgtgcgccgcttctccgagaagccacgtggtcagttcatcggtccagacctgaagacaactggatatacccgtgggatctactcttataagaagacagtagaattaggcggcggtaagctgataatgaccaatacggattttgatattatcacatttatcgcgtttgatgctgatggtaaaccccgtggaagcagcataggaggtttcagtgatcagagaaatgatttgaaagtatctatgatcgacagcctgcgggacgaaattggcgccaactacaactacgcctataagtcggttaaagatttcacgttcattgatataaacactgccccagacggtactgtgtacaccttgtcatccgaagtcctgaacgtccaggtatccgacaacggtgatgtgaacctcaaagttcatgtccacctgaacgtccaaccagcagcggctacccaaggcgctgatctggtcatcaccgctaacctgaaagcgccttccaacggtactttctttggtgaaacggttcacggtttctctgttgcctgggacttcaaattcccgagaggtggtaatctccaggatgccaaaatcgttaccaacgtgacatacaacttcgataagaagaaagcgaatatcacgaatatgatagtcgaggggcatcatcagcacagcagttcgtcttacgacgtaaatctggatgtcaaaacagtacagagcgtattgaacgaatattcggatcgcctgaaaataatcaaccaacagctgcgaaacttggattcaagttcgtacaatccgaacaagcggttcctgaacgacgttaccatcagcaaatccggtgagatcttgttccagggacaatcattgacacaaagccaaaatcgtcaaatagtcattaacgctctggcgaaggcacaatccaatgcagagaagaccaaaggtgacctggccaactatgcggcttcaattgaagcaagtgcaccacaggggcgcgaccttgattggcgggtatacttaaccaacaatggcaattccctgcaggttgattgggaaattacttttcgccgcaacacacacgtcggtgccatgaaggaattcagcgctcagatctaccttggcaaccgctatctggaagacgtatatgctgatgctaagagcagaggctatgcgccggaacaaccgaacctgatggcgatgtccgatgctcaacgtagcgatgacatggctatgatgaatggcgaagacgcatattcagaatatgagcagtcaatcggcggcagtctgaagattaatctgaagtaaaatggttagcccctgcgggggctaattatgaataaattcttaggagataaacccatgaagacctttctcgaattctttaccgaacaagctgcgcagcctgtgacccatgcgggtgtacagggtaaaagtgttaccatcaaaaagcaagctgacggcactcagtggtgctctggtactgttacccagatcactccggacaacgctgcagacacctataatctggaactgaccgatggtaataccatcaaagcagtgctgaccccggaccaggttcatgcagtgtctcagggccaggaagtcgtagccgttcatgacggtttcgaattcttctttggcaagtctgctgacaaaggccaggtcactgaagcatatgctcaggaactcgccaacatggataaaatgatcggtaaggcgctgggcgtcggtaaatctcgcaagagcgggcgcaccgagtttgaatattcgggcatccccggtattggtaaatccgttgccatcgacttcggcggcgaagacgatccgtatgtgatcgtcaccatgggcgggaagcaacaggacatcagcaaaggtaaaacgctggctgtcgacattgccaagtatctgggtgtcaagcctgtctaagggggttgtatgaagtctttaattgactatttgaatgaagtgagaattccaaaggtgggggattcgatgcgtgacacttctggtcgagcctcggcattcgaagccacccttgctgccgcaaggaaacaagcagcggaacgggatgccaagaccgcaaaagccatgaaggcggaattagaaaaatcaggaatagaagttggaaagattaaagataatgctatcatggtcggtgattatgccataatcttgacatctcccggtggtaacgttgaagcatcggtgaacgccaacgggaaggaaatcaaacgcctacacggcacttctgttgctgatgtttctaaacaactgcaaagcgccctttagatggtcctggtcaagctgtgattacaatcccccttaaatacagggggatttctttttctgaggatgtttaaaatggtcaatgcgagcgcatttatcaaccgtggtctgctggcgatagcacatacgcatgctctccacttcgtgactcattcatattccaaacataaggcactcggggagttctacggggacctagaggacttgctggataccttcaccgaagcatacatcggcgcgggcggcgtatacactccagggtttgagaacacgaagttgttcaacccagacccaattgcctatatccagagcatcgtgatcgatgttgacgccatttatcggcagtgcgattcacatctgcaaaatacgttagacgagatcaagactctttgctatcagacgctgtacaaactgaagcaactggcgtagtctatagacccgtctgataatataattgcccattatttgtcaaccatggataaagataaagatgggcaagatcttcgttccaactcatttagaaggctgtcagatttcagccaaatatcttcacaagcagatgaattgcggtgccgtatttgtagaaccgaatcctcataccaattctgaatcccctgatgcaatcggtttccgccccgatggttgcagtatattgattgaggtcaaagtcagccgggatgatttccgagcagatgccaaaagcctcatcgtatcaatcctgagcaggggatgggcagctatcggttttatgcatgccctgagggagtcatccgcatcgaagatctaccgccaaagtgggggttattctacttcacacctcgcaaatcattgaaggctatccatgtccctgacgtgcagatatcttccctgtattctccccagcactatctgaatatgatcgcccgccgaagcccgaatggcaatatgcctccctatctccttcattaccaaaagatggtggaagacttcggtcatgtcgtaaagaacaccgtcgctgaacacaatatcctctatggggcttggcgccagctctgtattgctcaaacccgtggtgtggcgtatactgtcaatgaggtattccagcgaccagcgatttaagaggtgtactatgtcattagcagcatacaataaagaattttcagaaatcaactatgacttcttgttcgcaagtgagcgccgatttgtacaggcaaaggagtatttggagaaccatggtatggaatccagatatgataacacattgaacatgaaagccgccatggctacagtagagcttggtgctgacagttatgaagccaaagcatattctcgtcttacgcactatgaccagaatatggtagaagaatacaaatctatccttttccggactgggtggggtaaatgaaatttcttgacgagcaattcataaattatctggcaccgcgcctggaacgtttcagctgggaacgtgtaggtgcggttgcaaagttccgttgccctctgtgtggtgactccaagaagagcacgtctaagcgccggggacacttcttctatgaccatgatgacgatgtctatcggttcaaatgccacaactgtaatgagatgagcggttgggcttttgagttctggttgaagaaatttgatgaccgtctgtacagtgagtacagcatggagaagttcaaggtcatgggtgatacccgcgcccgcccggtgcaaaagctggcacccctgaagaaactgacacaaacagcgcgtatcggtcagcaggtggcgaagcgggatgaggaccacctcggcaatatgatccggcttgatctacttgacccaacacattttgctcgccaatatgtggaaggcaggggaatgccggaaagcgctctctctttgttatatttcagtgagaactttagaaaagatcttcttaattttgaaactgacccagagaaacagaagaagattcctgatgacccgagattggttatccccttctggactcaggatggtcggatgaagattgttcaggggcgcgcatttggtgataaccttccagaagggatgttgcggtatgcaactgtcaaaccgcgaaacgaggacacgaaggtctatggcgaagaacgcattttgatgaaccgggtgaaattagtagttgaagggccgctggatagtctcttcttaccaaattgcctggcgacggcagatgctgatctattaagcgccaagggggacatctatgtgcctgacaaccaatatagaaacccgcaggtctgtgatggcatccagaaaatgattgacaaaggcgtgaaggttgttttgttcccgccagagatacattggaaggatatcaacgatatggtgaacccgagaaaggggaatatcccgatacgtgaccttctgaaaattatggccgataatgtctaccatggacttgcggcttccttacgatttgccgatttgaggaaagtgtgatggacatgaaagaacttgacaagatggatgaccaagagatcctccggggataccaacaagcccgagccgggtatgtcctcagtgggcatgagtcgaagagttttgttcacggatggcgtaatggcatagttgattccggggcgtgtcaaccggatgccgaccaaatggatacggcaagaaacttcctaaagcagctacgcgagcaaaaataattcttccctccaggcctctatctacgaggcctcgtaaaataattcaaaaatattttaaatttttattgaaaaagactttactcttcaataaagctggcctattatagttcacatagggcggtaaacaacaccccgccgaatgaaaagtgaaaagcaccaactacataatgaggatttatcatgaaaactatcaaaaccatcatcaccaacggctctgtatctttcgaactgaacaccgaagtttccaaagcagaaatgttccgcattgcacaggaagctggtttccagggcggtaagacctccttcatgaacctgctgagcggcaaaactgaagtcgcttgcggcttcaccatgaaagaccagattgtggttgaccaggcggtagtgactaaatcctctgacaaagtcagcatgctgaaaatgttcggcctgaacatccacatcgtggaagcgaagaccgaaacctatggcaccctgaacgtcggcaaaggccgcgtacagctgaacccgctgaacaacggaacctactcggtgatggtattcccgaagaaaggttacgataacacagatatcctgaacgcggtcggcggtgattctaaatcccagtatgtcaaaatgggcaaaatgactctgatcgaagtacagaacatgatcgagcgcctggcgtaaaccgcgacgggggaggaaactcccctccataaatttggtggaggtcatgatgactgcttatgagatgtgtatcaacaatattgcgcttcagattcacaaactgaaaccgtcggaaattaatccagatattccgaatgcatttgactattcaactggtatttctgctggattctgtaaagatccgaaagaagtcgtgtgtgacatagccgtggcagtcggcaaacttgggaagaaaacagatgagtaatgaagtccagctgtccgaaggcgccaaatggctcgtcaagcggatcccgaataagaactttgaggcgttccaggctgaattggtcgccgtatttgagaagtacggctatgacgaggaactgcgtttagcgtacaacgaagacaagcctctggtcgtccggcgctgataaagcccaaccctcattcactttcactttaaatacctctgcaaacattgcggaggtattttcttatggccattttaaagattggcagcaaaggtctggaagttaaaaatcttcagaccagtctcaacaaaatcgggttcaatctggttgccgatggcatctttggtaaagcgactgacaacgccgtcagagcagttcaggcaggtgccggactggtcgttgatggtattgctggccctaagaccatgtatgctattcgtaacgcaggggagtctcatcaggatcatctgactgaggccgacttgattgatgctgctcgtgaattgtcggttgatcttgccagcatcaaggcggtcaaccaagttgaatcgcgcggtactggcttcaccaagtctggaaagattaagacattgtttgaacgccacatcatgtacaaaaagctgaatgccaagttcggtcaggcgaaagccaatgccctggcccagctttacccgacgttggttaacgccaaggccgggggatacacaggcggtgacgcggaattagaacggctccatggtgcaatagccatcgataaagattgcgcatatgagagtgcatcttacgggcttttccagatcatggggttcaactgcgttatttgcggatacgccaatgccgaggagatgttcaacgacttcctcactggcgaacgtgctcaactgatggcatttgtcaagttcatcaaggctgacgccaatatgtggaaagcactgaagaacaaagattgggctgagtttgcccggcgctataacggcccggcgtatgctcagaaccagtacgacaccaagctggcagcagcatacaaatcgttcagctaattcaaaggccggaaacggcctttttctttatgtatgatagagttatgctgggcgcgtcgcttaattaaaacgatgagataacccctgtagaaataggaaggttcacatgcaatctgcgagcaaagtagtatccatgaagccagctggtaaaaccaaatcagcgcgcaagaaagaagtaacccagcgcgaagacgaatggatgaagttctctaaaggtgatttcaaaatcgctccattccatggcctctctgacaaccagaatcttgcctaccaatctgcccttgaaaacaatctgaccatcacaatcggacctgctggtacgggcaaatcatattgcggtgctgccgctgctatcaaacatcttattgatcgccgggtcagtaaaatcatcatctctcgttcgccgttgccaaccggacagactgcggggttccgccccggcgacacgtatgaaaaactcgttccgtatctgcgcccgctgatcgaaaccttcaagaaagtgttgaagaccgatactggcagcgacggcttcttcaactatctgtgggagaagcacatcatcgaaattcaggatctggagacgatcaagggtatgacctttgacgatgccttcctgattatcgaagaggctcaagaatgcgacatggagcagctgaagaacctcctcacccgatcttctgactcgacttacgttttcgtcaacggtgacatcaagcaatcgaacaaacgcctgcgtgatagcgcccttgacacgtatgtcaaagcattccgtgatttcaaccagaaactggaagcgggtactctggctgttcacggtgtagagccgggtgatgtgtatcctgattgggttcaacctttcagcatcatcgagttcaacaaagatgatcgtaatggtcgcggcaatttcactcgtctgatgcttgaggtcaatgacctgtacgacatttaaatacctcatcaccattccccgccgccttcaatctgcgagggcggcgtataataacaacctgcatataacacaaaccgaggatcgctatgattaacgtcataaagcgggacggatcttctgtctcctttgatattgaaaaactacacaccgtcgttgaacgcgcttgtgatgggctggacggggtatcaatgtcagaggtgatagcagcatcgaagatccaattcaccgataatatgagaaccgaccgtatccaggatattcttatccaggcggctgcgtctctcatctctgtagaaaagccgaactaccagtatgtcgcagcgcgtctgaagtcatacgacctccacaaaatcgtttatggccagtacaagccgccccacctgctggatatctttgtcaagaacatcaaactcggtaaatacgaccgagaattcctggatctgtactccactgaagagtttgatgaacttcagaccaccatcaaccacaaacgcgataagaacttcacctgggcggccatgggccagctgactgagaagtacctgttgcgtgaccgttctcaaaaagacaagaaagtctattgtgaaacccctcaggtcatgtatatggcgattgctatggcgctgttctctaattgggacaaggccaaccgcctggatatgatcaaaaagttctacaattatgccagcacaggcaaattcagtcttccgacccccatcatggcaggcgttcgtactcctacccgtcagttcagttcatgcgttctgatcaaaactggcgacacgctggattccatcaacgcgacagccaaatctatcgtagactatgtgagcaagcgtgctggcatcggatttgacgttggtgcaattcgcggtatcggcagtcctatccggggcggggagatggtccacactggtctggtgccattcatcaaatatctgaccggggcactgaagtcgtgctctcagggcggtattcgcggtggtgctgctacggcttatatcccgctgtggcattaccagttcgacgatgtcgttgtgttgaagaacaaccgtggtacggaagaaaaccgcgagcgccgtatcgactatggtattcagatcaaccgcgtcatgtttgaacgtctggtcaacaaacaacctctgtatttgttcgatccgaaagacaacatggatatgtacgaggcatatttcagcgacgtggatcaattccgtactctgtacgaaaacatgatcaaagcagcagacgccgggttatgtcgagccaagacactccaggctgaagaagtattccagatgttgctggatcagcgttccgataccgggcgcatttacatcgcattcgttgatcacatgaacatgtatagcccgttcaacctcgacacgatttacagctcgaatttatgtctggaaatcgcgctgccgactcgtgaattccaacaatacgatgatgaaagtggtcgtatcgctctgtgtactctggcatcattcaacctgacggcgtttgatgagccgacggaaatggaagatgtggcattcgtattagtgtccgcgctggacatgctcctcgaataccaagattacccggcccgccaagcccgcctggctgttcaggaatatcgtcccctgggtatcggtgttgtcaacgtcgctcacttcctggcgcggaacttcaccggatatggttcgcccgccgggttacagttgatcgatgaatggatggcgcatcttcactattatctggtcaaggcatctaacaagctggcggaaatgtttggcccgtgtggtaaagaaacaatccattcaagcggtatggtaacagctgacctggcccctctgcctctagacctccttcctaatggcaaaaagcctgttggggacgcatacggtctggattgggatgggttaaaaaatagactcgccaaatttggtatccgcaatgctaccctgttggcgatagcccctactgaaagctcctcgcaggtgctgaatgctaccaatgggattgagccgccgaaaggcttggtgagcattaaggcaagcaaggacggcatctacaagcaaatcgtaccggatgtcgaaacccttgggcctatctatgatctcaagtggaacatggaatgtatcgactatctgaagacggcggcggtgttccagcgctgggttgaccaatctatcagtaccaataccttctatgatcccgagaagttcccgggaggcaagatcccccgcgccaagatgatgcaggatatcttatccttctatatgtggggtggcaagactctgtactacaacacaaacaaagactccaaggaagacgaggagctgaaagcagctgaagaagtttgtgatacctgtgtagtatgagttaggtctatatctcactgtgttatattatcaggggtggagcaattcaccccattatccatcaggaaagaattatgtctgaacaaaagcaattttccgttttcgacccgacatcgaataaccagggactcccgttctttggtgatccggtatcaatccagcgttatgacgttgttgcttggccgtttgtacagaagtggtatgaaaaaggcctcagccaattttggcgcccagaagaagtagacatcaccaaagacaaggcggattttgccactctaagcgatggtgaaaagcatatctatttctccaacctgaaacggcagaccatgctggactctatccagggcgcggccccgtttgaagcattcggtgcctgggcttctaccccggaggcgcagttcgctatcctggaatggacccgccaagaggcaattcactctctgtcctacacccatatcctacgcaacacggtcaatgatcccggcatcgtgtttgaccatgtgctggacgtagctgaaattgttgattgtgcacatcaaatcagcacctgctacgatgaatctgtgcgctgggcgggtatgcgtatggcgggccggatcttcacccgtgaagatatcatgaatgccaagcggtcattctggcgatccctgtttgctgccaacacgctggaaggcatccgcttctacgtttcctttgcatgctcctgggcattcgtccaattccttcaaaagatggaaggtaatgcgaagatcattcgccagatcgcccgcgacgagcaggaccacctgatcctcactcagacattcctgaatcgtcttccgttgatggatccggactttgctgtcattcgtgaagaacttcgtgctgagatgacacagatgtttatggatgtcgtgaatcaggaaaaacagtgggctgactatctgttcaaagaaggttctatcctgggcctgaacgccaagatccttcatcagatggttgactggctggcgacccaccgcatgggtgctatcggccatccgtatcctggggaaccgcgcaaagacaatccggtgccgtggattaacgactggctagataatactacaatgcaatacgcattgcaggaagcagaagctcctgattatctgatgggcatactgactggctcagtatctgacggtcttaaatttgcataaaggtgagaaatgattacgatctattccaaacaaggttgtgcacagtgtgttacagctgagaacatctgtcgcattcgcggtattgagcatcgtatcctcaaacttgaaaaggactacaagttggaagatctgcaagctctgacgggcaaacaacgcatgtcaatgcctgttatcgttctcgctgaccagactgtgaccgacgttgctggtctcgccgcaagcgttaaacgctgatcatatcaagcccccttccgggggctttaatttatggtgaatatatcatgtcaaaacaattattgcctcatcaagaacgggttgtccaagaaaaggaagaactggaaaagaaatacaatgcgttgggcgcatttcgtgaaggtgatacattcaaatccctttcgaccaatgaacaattttggttgaattcccaacattatgtgatgggtttgtatttgcatgtgttaaacgaacgcatcaaccgtttctaatttgaatgaagcccccattctgggggctttacttttgaaaaagccagacctatacttcctatacaacacaaatattgaacagcaggaactatatcatgtctaacatcatcttacgcaatcccggtcatcattttggatacatccaactcccgttggtcatcgacactttataccctgaagacaaagaacagatttgttggtctccagcggccctcattgaacgagagatattcaaatcagaagtggatgtcatgtaccggtttggggaaacgggcaaattgcaatatatgggcaaggccaccgagttgcgaaccaccagagaacaaagatttcttcgtattgatacgacaaattgcgaattctttgttcttctgaaggaatatgtgacacggaatcgcccggtttcccagcaccgcccgttcttgtcaagtgtgcatattgacaactttatctctgacgttcaccttgtggcttctactcttcacgatgaagaaactggtgtaccaaaggacacagtcttaaatatggttgtgatcacattagtggagtaagccgctatgagcgatttagtcttgaatacccaattccgtcttcctgtggattctcttgttccgtttcaaatcatgaaacagatgcttgaagaaggcatggaagttccgttaaaacataatggacaagatatcgggcgctgtatgagttgctcatttcaggatgatgcgtattgggcaatggactataatgctcaaatgccaattgaggctaacacactcatggaattgggtttcattttcaaattaaaaccaccaattcggttatacgatatcaagcctgtggtaatacagatacctgctggcaaatcaaattacatgtacttgatatcgcattttatgttttatgacgttgcgccgtcagttggtccgttgtaaccagatggtgtcagtaatcggttcaggatcattcacgacgttaaacgtaatggtgactgccagggaatggtagtcatcagacagagatacttcgacagactgtatttctgccctcggttcataaagagcaatagcgtcttcaactttgttcttcacatctacctgaatagttggcgtcgtgttttccccgagcatcccataaaggccagcgcccatatctgggagagtccgccattcgcctgcagacgacataacaatattccggacagactgtaacacagcccattttccagatttcatcgtgacgtctttggtaacaggatgcatcccaaattttaggtccacatctttataatctttcatgtttaggctccctcagcagcacggagaggcagtatccgcctctcctggtgtaatcgtatggggttattggctggaaccaaaattaccgccattgtcttccagttccggtttgatatcgatagtgcccggccctgtcggtgacgctggggttgcaccactaagagaactggcccggcccgcgccttcggcatatttgatgttgccatcaatagtttgggctaccgtcaatttatcagcgatgatctcggacacgaggatcttaggaaccttcaacgtacctgacacttctaacatctgacaaacgatacggaaaatattctgcgcctggatttcggcaagctgagaatatttcatcaaagatgtcccggcaaccacgtgtgaatgattgctggaatgaagatgataaacttcgcctgtcttgcgctgaacttccgtcccaccaacggtcaggttatggtcgcgaccgacataatatcttttgtcgaacatcgcaatatcatagtggtcttttactgatttattgaccacgtcaccattcggtaacatttgtttataggaacccgattggtgcatccagtggagacgctcaccaccaggcgtatcgtctacttccataatgtgaccagaacgggaagccataacattgttgtatggatacaccgaaccgccagcagatggaactatggtttcacctgtgttatcaatatcctgtacccgaccagatggcggcggggtctcttgtacttttggggtgcgatcaggaataggttcagaccatttgctgttttgctgtgctggagcagccgccttcgtgttcgccgggccgggccaacgataacccaaaaccgaagaacgactgaaacggctgaccttcacgctgtcagattggttgcccccaaggcaccacacataattcgcatcaaacttctgaacaaacgcgacatgaccaaaagtcgggttgttcccccggcggaatacgaccactgccccatatcttggttcagacaacggagaaccccattgaagatatgaacgggccaaagcagatcgcgtagatgtgaatccagcctggaggagaacccaaccaacgaatgcagcacaccaactcacttcgtcttcagatgctccaagagaagtggttttgtgatattctacaatccttgggttgttgttgaatttaccagcatattccttcacacccaattcgcctcgagcgacagtcatccatttttcaggatcatacccatctttgggcggctctgggtcaggttgaggttcgtcttctatttttacaggaacatctgtaacagcattatatttttgacgttcaatagactgcacaacctggccgagagccaacgggttggtgtcagaaccattaacctggttggctgctggccatacccacgctattctcaaattctggtatgcttcgtcaagggcgaaccccatgacttcactgttgacagtaataccagtcggagaccagcctaaacctgccgaggacgcatttgttgcaggcatcatgagcacagcccatggtaacagctcagtaggcaggagagtagtgtcttgggtgtgtacgccgtatacacggacggcaacgcgcccgttttcttcgggatcattcacgtcttcaacgcgcccataaaaccaacgcatattttctaacatagtgatgtccaaatgtgtagaggatgttgaagatatttatgctctgtcgaatataatattataggatgcgtcagcatccgttgtatttgatttatttgtttcaactcgctttgctcgtgaaagaccgtcttacgcagacagcgcccttccaatgccagggaggcataggcgaggaaacaaccatacagcacagaatgtccgtagaaaaacgatttttattccatcctaaacattcaatagcttagaagccaggagtttgttcaggaacaatgacattataagaaattgcgttcaagaaacaacaaatagacctgtaaaacaaataagcaataaaaaaaccccgctcatgcggggttttggttctttttagcaagacgagctttcaatgtctctgtaagcatatcaagatgccagggcattaattcgcttatttcaaatatgctatagccttgtgacttcaattcgtcacacatcacgaagtaggataataaatcaatttcaaaaattaaatgaaaatctcttcaagactattaaattcgatcttatgctctttaccgcaaccaggacacttaatcttggtttcaaaatggatgcgcggtattttggaaaagaaatcgtctttaattttctggataatatccgtttccaggttatcaccaacccattgtacaaactcatcacgagttttcttacgagcaactgctacctgaggatcaatacccggttcattaggatcatcaaaccgccaaacctgaccgtcatcgtcatacaaacaatcgatgaatgtagcaatgctctcttcgatagaaaccactttctgaagcactccagcatcagagaaggatggttgacgcatcttgatgtgatagccacccggcaggtcgaagcattctgtaaacccctcgacgccccgcgccgccaccttgtccagggggataggcacaacgagttcttgaccgcatgcttctaaattgtccccaggataatcaggatcaaccgaaggaactttgatctggttgttgcatttgtaccggattttcattacttcaccgattgatatacaacgcatccgaaggaaaacttcttctacaacaccgatcgggagtttggcaaatggaactccagcatctacacaagacgaaaataatgattccatcgttgcgatacgttcatcatcaggagtgtttgggtcagccacctgaagtaaagaagtttgttgccccgcagtaaacgcgcgatacttgatgacagtaggccaaaattggcttttgagcgttctttctgtacgaggcaatgatggtaaattcataatgtatctccacggtatattgtacagatatttatagtgaggaacgaaaatgcatggtttctgttttagccagatcggagagcaattgacaatacttcatcctgatgctggtactgatttctatttattcctgtcggattatgcgagacatttgggtgtagacaccatcgcaatgtctaaagatgacatgaaatttggtaaactggggacaaaagatttattgagatatggattcaatgtcattgtcgtagatcctgtctatagtcctattcaggatgaagacgttatacccgtgggtgtacacaggaatattgaaacattacacaaatattatcccgattgcattgtgatcggggagatcattccgtattttcataagagaagacgccttcaaacgattaaaagttattttcaagaaggccaagcgtccgttattatggatgtcctcacaagcggttgggttgttaaaagtacgactggtaatagtcaacagatcaattcccgtgtatatgaatatgtgaaagaacgagactacgaactggagaatagtaatgcaaaacgaaaaacgcgccgatcttgagcagttgaaaacagttatcatcaatcgcctaaaggccgtcgtcaccaacgataaaggtgaagtcgcaccagggtttgaaggtattttcgatgaattccaaaccgacgacatgggtaatccggtcatccaaaccgtcgccgggatgatcatgatcgataaagaaatcctggaaagcggttctgttcgttattcgccgaacatgggcgttgaagccgaatccctctgttctgaagtgatggacattaacgaagcgatcagtgaaatcgggtacaaactgcttatctgtaccggccattatgtggatcctcagggacagatcgcttatggcgatgaagcgcgtaaagtgaaacgacacgttgaaaccagcgttctgctgaacaccatccgtgagatgcagaaagagcaggaaagcatcaagccgcgtctgatcctgccggatagcaaaatcgtcacccgataaatcggtctaaatacccataacaccaatgaaactatgttatgggtatttttatgaaatattgcggaattgactactcttatggttgcccagcgatttgtgtctgggacgacaaagatcctttggaatttaattcccttcgcttctatgcatattacacggtagaaaaatattgtcgccctattcgaccgaacatcagcattatgaagcaacctgcatattcctcccctgaagaaagattctataacatttccaaatgggcagaagctgttcttcttacagagaaacctgatttcataaccctcgaaggttatgcgatgggcaactctaagaactctaacaacatatgccaaacagctgagaacacttctcttttgaagcaagcaatgcgccgtaataatatggaattcgaaatcatcactccttcttataccaaaaagaatttcacaggtaagggcactgctgacaaacttgctatgatagcccacttcgagaagctgttcaacgttaacatgcgcggtataatggatatgttggaagttaaagatccgaaaccaatcgatgatcttgtcgatgggtttgccaatatggtaggcggttctgctttcaaagagaatcatcccgaatttaattctgaggtgcacaatggttgattattggttattggcgaatattatcacgttcgcattattgatggcgacggcgttcgtttggttaaaggcgatgctgacattcttgtcttcgttggcgatgcaaatatcgtattattctgtgacaccacatgaagaccagaatattcgggctgcacaacagagcgaatatctgtccaaatatgttcatttacgcgaacgctcggtcacaatcgttttgttttccacaatgctgtttgcggttatcttatttgtacgatatgtaatggaggccatccatgccgttctatgattatgcatgcaaaggatgtggtcattctttcagccagcgcaagacctgtgctgagcgccatactcctgaacttgatccctgcagcgaatgtggtggtcagatttctatggtaattggcgctccaaaaatcgtttccggtgtccgtggtcctcaatctgctccggacgggttcaaagatgttcttcggcagatcaagaagacatcgggtaaggggaacacaatcgatgtctgacggacaaatcgctcaggtgttgacgcctgattcattttcagagatggtattgatgcgcgcgcagaccaccagggaaagcctcctggaaacaatggccagcgtgtgcgaagagtatgatatcgaggaatctaagattcgcaagatgattacaccgcctctgttatcccgtttaacagctgagtgcgctgacgctcgtttgttgaaaggtgaactgaaatccaagaaaattttataggttgttaaaatgactaaagaacaagtctacaaattgattaaggcccaaggcttcttgcctggtgttacccgctggcgtgtgggtagtcttaacgagcacgaagaccaaactgaccggatcaaattcacgactccggaaggtggtgtgtatgtcgtggaataccacactcacaccgatgccaaacgcactttgtctgacgtgttcgatattattgagattaacccgaaagaacaattacttcgcggttaaatcaatcaaatatgcgggggtataattactcccgctgtgaaagaaataatgtgtacagaatagccccctggggcgatactatcgaggaaagaaagaatgtctagcttatttgatcgtctgaagcaatcccgtggtcagcaatctgacgctctgcaaaaacgtctggaacaacagggccagcgttcggctgcagcaaaggatccgcgtatctggaaatggacctggaacaaggaaggtatttccgaaaacatcatccgttttctccctatcccgctagtagatctgaaagcacaggaagaaggcaagatcgatgctgagcagattcttactccggttgcgatgatcatgcgtcattccttccaaggtaagggcggctggtacatcgaaaactctcctcagaccttcggccacgaagatccggtgcgtgatcatgatcgtccgctgtgggcgcaacaaaaagagaccaacgacgaaaaactgaaagaagttctcaaaggtcgtctcccgaacaccaagtattatgccaacattctggtgatcaaggatgttaactccccagaaaacaacggcaaagtattcctgctggaattcggcccggcgattaagaaatttttagacgcggcccagaacccgaaattcgctactgacccgaaatttgatccgtttgatatgtggggcggcgccaacctgattcttaacctggttggtgagaaacgcaaattcggaaattgggaaggtctcgtcccactaatggataacgtgaaatgggatgcggtttcttccctgggcggcgaaggtgaagaaggcgataagtacaaagaagacatctgggaaaaagaacacagcctgtttgagttcttcaacccggccaacttcaaatcgtacgaagagctggaaaaacgtctgcgcaaagccctggctattccggatggccaacccctggtggaaagtggtgcatcaactgttgccacggctccggtacatcaggaaccgcaacgacagacagcccaggatagcctgaaccagcagcaatctcagccgtcgcaggcacagcagagcgttcagactccttcgtctgccggtgctgatgccaagcacacttcgtctctggatgagtttgagcaattcctgaaacaagaataaactgccaagccccttcgggggctttttaattactgctgactctcttcaacatgcccaacagactactcttttcagatgctgtcaggttgtcattaccgagaatatccctctggatgcctatagagatgcgctcaaagtcagccaggcttatccccgccagattgtttaccaattgatcgagttgcttgtaggcaagaagggcttcgcctgtgaagttaccttgctcgagcttcttataaagctgcccggcttttgacgcagcggtttcccaatctccggaagcaagagcatcagcaatacccagaggaagaaagtcgctggcgaggctgcgtgtttcatattctgtctccgataggactttgttgtatgaaaatgaaatattgtattggttaaattgatcggtggcgcctttgtcaagttcaatagacgaaaagtttacagggtgcgcttcaacaatataaaccctgtggaccacctgatcttctgtgtccaattgttcaatgcaaatatcggttacaaaatcttcgtaataacccatcttggtggtaagaggatcgaagattaaatttttccatttgtccataacagacttttcataatagtcattggccaaaaggaatgagagttccaaatcaacgtttgatttgttgttcggcattttgatgtggttgccgttgttgttcataggcgtggtgtcgataccgacgccaggcaatgatgcaaccatacacatcatttgcagagagcgagaagtttggtttgtccctccaaagaatgcgtttacgatacgcgccgtagaacgaaataaatcaccaaacgaagatgtgtctgatttgtatgcctggctatcgttggctaatgtggcattcgagtcaaagatgcctgcaggcaaagggatagtcacctggaatctgttcttccttgacagaccgcgctgcaacatctgtgtaataaaattgcgatagtcttccacgatgaggactccacttaaataatagatctgaaggtatttataggagttgacaaatggcaaagaatgcgatgggtgaagaagatccgctgctgtttccagccgaaatggatgctcccgaattggtgaagcgctacattcgtaagtaccgccagcacttcggggccgaagccaagcgtaatattcgccgctcccacgtgtggttcatggaacgtgtgtccaaggatgccaacctaaccccacaacatatgatgaaagcgtttgctgaaaacaagcgccctgtacagggtgtccgctatatgatcggacgcatgttctatttcaaatatgacgccctgacaaaagaagagttgccatactgggatatgtatcctttggtatttttcttcaatttcaccaaaggggatgggattaattttggtgagcgcggcgtgacttatctgtgggggcttaaccttcactatctcccaccaaaacttcgccttttggtgtttgaagacctgattaaactcaggaacgagagagcgtatcggtccaagactcgtttgcgtttgacgtgggaagcgctgaaacggttcgccaatcatcctttgtacgaacattgtgtcaaattatacagggctgatcggttcagaacacagctttatgaaattgaaccacaatattgggaagttgtcctctttatgcgtactgcacgcttccaaaaacaaagtcaggccagcgtctggaaagatgcccgcatgcgtcataaacccaaaaagtgattagttctataacccgtttgcagcgataattcgcgaacgggttcccttcaacaatgaggctatacaatgtctactatctatcgtattttaggtattgaatttacacctgctcgtttagatgcaacacacccactttctaaagggaagactgggtttgaaatagggcgtgaatctttctataagaaagacaaagttccgccaacttttgcttccatgatccgcgatatgggtatcgaagaagattccgaagccgaatacgatatgaaggatcttttgcgcgtaggcgatagcacaacaatagatttcgtacaggactacatcacaggctggtctcattcccgtgatttgaagaataaggcgaacgacacattgggttgtttttcctatgtcgttgactatctctgttccagaaaacaaacagttgaattcttcagagacgatttgttgtcatccctcggcgattcagatttgaagttggtggattctaaaaaccgtgaatttaacctgcgtgacgcgattgaatccaatgaagtccatgtcgtaaaagaaggaaatatctttttcggtggggttcaggaatttaagatccaccctgacatcgtatacaccgacgatgtttgccgcaccatcacgaagttttttggcaaaatcaatgattcgttgtatgttgccatcgccttgattatgcaagaagaatattttgaatctaaagttcgccaaattcgtgaacatgtgattgccgggcgcggcttcagatcgaccgacccaagtgaaatgccgaatttcttcgatcagtaaaactaccacgcctggagatgtctatgagaaggtatttgagactcaatacagtcctagaatcgttgatagaattttatatcttacaacatctccgttcaggaaacgagcacgttgacgacttcctcttgtatgatcaccagataacgatccattcagttgaagtcgttgacgacgatctgctcctggccaacatagagcacagcctgtatgacaaccaggcgggtaaatattgtgctccggcattttcccaggtagagataacgccatgctggcctgccgaaaaagttttcaatatagacgacgtggtttatgatgaggcgaactctttcagatagagagttgtgaagaaagtttgtcatctgaatattctttttatagaaaatggtttacaatcttcaaaactacagtatagttgaaaacaagcgaaacggctgtgtcagccgaccgattttacaacatataggatctacactatgtcttacattctccatattgagtccggcctgaaatttgatattgaaggtaaaactgcgtctgacgtccagaccgaaatcaaagacgctgggctgctgatcggtaacgtaaccatccgccgtatgctcgacggcgttctgcaaagcgccaacgggtttgaactgatcgattccctttcccaggaagagcaggaagaaaccctggaagcactggaccgcgcgaaggccgaagaagtccagccgactgatgccgctggcgtgaaagaaggtgaaggcgatgccactccggtggttgacgctgaagaaaccgttgacccgcaggaagtagaagctgtggccaacgcagaagaagttcgtcgtcgtatcctgggtaccaacgtcgccgaagcgctgtccgaaggtagcaatgctgccgaagacgcttctctggctgcgaaatccaagctgactaacctgaccccggcggttgcaacggaagaccgcaaacgtcgccataacaaacgtgaagaaatggttgaagctgcacgttcttccaatttcggcgcgattctggctgcagtagaagcaggcgtcgtcccaggcgtttacctgagctatgtcaacccggatatgcgctggttccaattcccggtcactgacctggctgataaagaaaacccgcatgcgcggactaacacctacgtcgatctggcgccgatcacttccggcggctggggtttcagtctgtacgtgaaaggtaaatctttcaccaaacgacagaaaatcaaagagaccgatgcggaatctctggttaaagcaatcaacgaatggttgccgggcgttctggaagaagccaaaaacgcaggctgattttaaatcagattacgttcaatagatgaaggggctgctataatagcagcctcttttgtttattggggctttgtatgtcttatacaatcaaaggtctcttaaaaaggcctgttcatttgttccataaaccgcctgccgttgtcggggaatatccggcaagaggagagctttattatgttaaaggctccaatggtagtggaaagtctaccgttccgtcctggatggcggagaatgatcctcaggcatatgtcgtgacctataatggcaaggtaatgctgacagtttgcccatcctttaatatcatctgtgttggtaagtatgacaaatcgaaatccaaaggagttgactccctaaaggataccgaacagatgttattcgctgtgtcaattactgagcagcctgaatatatcgggtatgatgtgatctttgaaggtattatccccgccaccttactcaatacgtgggtcgaacgtctaaaccgcccgagccgccgtctcgtggttctgttcttggatacccccaaggaagtatgcctggcgcgtgtgagttcacgcaacggtggtgaagatttcaaacacgatctcgtcctggagaaatggaagcgtgtgaactctcaccgagagcggcataaagagttgttccctaacattcctgcaggtatgatgaagtctaatggcctgacagttgatcaggctgtctctgcgtttctcaatcgtgattttgggagtattgattgatggaaatctttgctttaaacaacaacgacatgctgaagaaagctgtcctggctatccgtgaacacgggattgaatccgatcccggtaatgcggagattaatacagacggcacccggttccttgatggtgtatccataaccgtatcagatatccgtgaccgctggctttctgttgaaggtcgcaattcatctgcgctggctgctatcggtgagaccttctgggttctttcaggccgcaatgacatccgtttcctttcacgagtactcccccgcgcggctaacttttccgacgatggtgtaacctggcgcggcgcgtatggcccgcgtctgtacaatcacgggcaactggatagtgttatcagccgtctgcgcaagaatccaaacacccgtcaggcatatctgaccatctatgacccggcgctggactcggatgaggggttggctgctcataatgaaacaggcgaagccaagactaaggatatgatctgtaatctggctctcctgttctctattacggatggtcgtttgaacatgactgtcatcaaccgcagccaggacgttctatggggtatgagttcaattaattttattgagttctctattctccaggaagtgctggccaatgttctgaaagttgatgtcgggcaatacaaattgttctctaacaatcttcattactataacaatgaagtaagccaaaaacagctgagtaagatcacggcggataccgtcgtggtggaagaaggaatgttcaaagacaagatcattttcagtaatgaaattgttgaagaacagaacggaatcttgtatatgttccgtgatgtgttggaagcgtgtgaaagtggattatcctggccttctgtattggggatgttggaacgctatggcgcggacaggggattattaatgcaaatggcgtattgtttgtggtgccgtttaaatggtcatcctatcaatcatatgtatattgccgatgatgggttactgaatgctctccgtcattctccaattgatcgcaaatatatgaatcctcgttctttgggtggtgacaaatgatgtatcctaatctggaatttttcacggggcgcaagcgctccggtaaagacttctgccttgaatctttgattagctttaatgaaattcagggtgaaactgaaatccgtcggctttctttctccgacgaactgcgccgggtagccaattacatctacccctggttgccagtggacgtagacgacgctatcaaggacgttccgtttgttcacccagataaccatcatgggttaaccccaaggcagatctggctccatctcggtggcgctactggcttgcgttatgtgcagcctgatttattcctggcgttttttaagcgttaccaattgccccttgtcgaggccaacccacacatccattatattgtgagcgatctgcgcaccccccaggaatatgaatgggcgctgagcactaaatgccctatcacgcgcatttcaaaggcagaccgcgccggtatcatagaggatgatatagaggctttcattgatgagatgaaggtcaactacgaatttgtcaatccgtttgatgggtgggcaccatttgtcaaattctataaggaaaggaaatgataacagcagatcatattaaaaatctgctccaactccaggaggccactaatgtggcctattttggggaagagtgggaaaagtattggactcatgttgccgtaacgaactcaatttatcgtgaatgggctgagtttttagatgaaaccacccaggattggaagatttatgggaacggcatccatttcaatagaacggatgccgtctacgagttggttgatgtggtccattttatgctgtcctctattttgtcagggtatggctccgcgtttccgttagaaatgcaaatcgatcttttcttaaaggaaggcgtgttaataaaagaatcgggtaatctggcatctgtcacagaacggttcacgtcgtttatggggcaacccgatatcatccggtttgttcggttcttggcgtgcgcctgtggttatctggggctagacgccgagacctacatgttggcacacaaacgcaaaaacgatcgtaatcggctgcgcgcggcgggcggtgctgactatgacaaatccaaagaaacccctctgaccctggagttctaatgtttacgattaacatctccatttcagccgataatcttgagtcatcggttagcaattttatagagtacatgaagcctttcggccatttgatattcaactgcaagttagacgttgaaggcggggttgcggagatgttattcacgacaccttccccaacagaagcattcgttttaattgagcgtttgacttctgaagacattcctgtcccagagccattgcaggacatctatttcagcgagacgatttattcgttgcataccatacccccggacgtgagccaggaggatatcgtccgccttattaaccacaatattaactttggttgtattgtccggcgcgataactatcgtttgcgcaaccatatgctgaatatgaacgcgccggaagtgccggatatttccccgcgatcactgcgttctatccaggaagcaataaacattttatctaacaaggttctgggtacagaattattaaccatgattaacaaacaagaggaagtaaaatggccagttcattaatggatcgtatgctgaaagttgccaagaagcatgacgatcaggcttcggtattatcccagtcagatgcgctggaaccgacggtcatctgctcaactggtattcccctgattgacatcgcctggtctgggcgtgttgatggtggccttatctccggcatcaaaatgatggtcggtgattcccgtacattcaaaacaatgttcggcctggtggacgtcaaagcgtacatggataaattcccggacgcgatctgcgtattcgccgattctgaaaaaggcgccaacgcggactactggacatccatgggtattgacatggatcgcgtcctgtatgttccgatcgataacgttgaacagaccaagatccgcctgttacagatccttcaggaagtgaagaaaggcgataaagtgattgtgttcatcgactctatcagccagttaccttccaccaaagaagtagaagacgccatcgctggtaaagacacccaggacatgacccgcgcccgcgccctgaacagcttctggcgcgttattacgcctgagatcaacagcaaagatctggtgttggtctggatcaactcgtattatgatgaaatcggaaaccaatatgctgagcctaacatcaaaggcggcaagcagggattcctgtcatccaacctgatctggttcatcacccgttctcaggtgaaagaagacaaagacctgctgggatggaacttcaacatcggcatcatgaaaggtcgccatgttaaagagaaagccaaactccctgttacagttctgtatgacggtggtattgaccgttggtctggtctgctggaaatttcccgtgcgctgggatacgttgacatgccttcgtctggttggtatgtgcgtacagccaaaggcggatttgatccagaaaaagagaagaaatatcagaagcgtcaaatggatgatgatttctggtatccgcttctggaaaatccggacttcgccgatgatgttaaaaagatgttcggcgtttccaacggcactgttatgcctgctaacatgctggagcagatggaccatgttatcaacaccagtgaataacaatggagggggaggtgactcccccgttaattacgaactcatcgaccccggtgaaggccaaatatccatcgtccacattttggagggccaattccgtggtgtcaaattccgtattggaaaagtatcctgggaatggtctgatgacgcaccccggcttatttttaccacggatattttgaagaaaccttggcgtcttttctttaatgatttgaaaaataacgacttgttcactgaagtgtcgggccgtatcttattagacttaatgcagaagaacgctcaggaatacaacaaaattttggtggggtagttgccaatgttactcgaatctgtcgtgctttcccaattgatttacaatgaagaataccaaagaaagatattgccttacctgaaagccgattatttcgaaaatgaaggcgagaagattatattcggattaattgacgattattcgtcagaatataatgctcgcccttcggttgatgctctgtctattatgctggagaagactccgctcaacgagcatgtgtttgaacaatcaatagctgctctttctaatatcaatgacaatacattcaatcaggaatggttggtaaaagaaactgagcagtgggcgcgcaacaaggctgtacacaatgcgataaaaacagctgttaacatctatggtgataacaagcggcaggaggagatgaataacatccccaccatcttgcaagaagcgctgtctatcagttttgattcatatctcggtcatatctattgggaaatggctgcagagcaatatgaccatatgaattcatctgaggcgaagattccattcgcagtagagatattcaacaaagctacgcgcggcggtgtaggcaaaaagaccctgaacattgtcacgggtgccatcaacgcaggtaagaccacaaccctgatagatctggcggcgggttattcagagcaggggctgaatgttttcgtctttactctggaagttgctgagaacatttggcgccatcgtcttgatgcccgtattatgcgacgggactttgaagttgttgaaaagatgactcgcgaagagtatatcgcgactatccagaagctgaggacaagagacaacggatctttgaaaggtgatatcgtcatcaaagaatacccatcgggagcagggcatactggattgtatcgtcgggatattctggagtatatctcctccacaggtatttcacctgacgttatcattatcgactatttgggtgaatcagcatcttcgcgactaccggctcaccttatgaacaacaccaacgtgtactatacatcggttgctcgtgaattccgtgcgcttggattcgaatttgattgtccggtttggactggtatgcagttcaatcgtgaaaaacaatcagccacagacggggatatcagtgacctggcggacgctatcggtatcccaaaggttgctgactttatcatggcattctatgctcctgacgagttggctgcggtcaaaaaggcccgcgccagtatcctcaaaaaccgttatgccaacaaacagaaattgaaatcattcttgttcggtatggatcaggataagcagattttgtttgatcttgactggaatgaagtcaagcgagatcttactgaagaagaagccaaatatgttgagaatgtccatatcaaacatgatatgaacaaaacagggaacgttgtggctgacgcgaagaaagcggaaacggtcaacaactggaactttggctgatttcaataaacggatcatgaggtataatcttcatgatctgaatataaacccaggagcacatcatgttgcacaataatttcatggcggatctgctacgcgccgttgagcaggtgtgccacaccgagaaggatacgatcaatctagacttcgatcagactatcgaattctttaaatcacgccgcgcttggaaagattataacgtgaaagtcgtggcgaaagaaggggaattggttgatctcgacttgccatcattccccttacccgtgcagaccgaaactcaggaacaatacgaaatagaaggtgttcgcattattcctaagtttggttatcatagtatcgtttacttcttcctgagccggattggggcaaatatcatcccgaccggaatgcgtatctaatagagggcttaacatgtctgtagaacaaattggtttttatgaaatcccgaacgacccggcgctgcgcaagaaactgtttgacactatcgaaaactgccgcgccgcccaagtccgtatcaaatcagaacagacgtacatcactgatgcactgtctgaaattggtaaggcgacaggcatcaaagcagctgatctgcgtaaagtcgtgtcagaccgcgccgctggtacttacaccaagacaatcgaaaccagcgccaaataccaggatctctacgaatccctgttcccgaacgccgcgccggatcgtgatccgaatacttccggtgaatgaccgaccccaaaggcccaacgttcgttgggctttcttactttcaaaacctttacttcaataaacatccgcgctatatttcattttattgaattgttgtttctaaatcatgaggtgaaagatggacgccaaaacctaccagatcccgctcgacaatgtcgtaattgtccaggaacgcctgcaaaaactggagcgcacggcaaatcgactggggctggtattcccgacggtgaccatcagtgaaccatacagaacccaacacaaagattctacgtctggcgaaattttctatcgttggtggcgggacatttctcttgaaggtgaaggcattgaccgcccggtttcatacggcggctggtctatcatcggccagttcaatcatcaatacccaaaggtcattctcaacaaactgaccgacgacatcgtcccgcatttcattcaacggttcgaggcagaaaacgtctcgtggtgtgagcattgcaataaatcagttcgccgcaataacacatatgtggttcgtaatgaaaccagcggagcgcaaatgctcgtcggtagcagctgcatgcatcattacgtgcctcaccagaagtccctggatgccgtaatgggttattacctgtccattcacgagctgtttaataaccaggacgaggatggaatctacgggagccatatcccgactaccgccgatacccggagctatctgcgtctggtgttccagatcttactgaccggagtcagcatcaagtctaatttgtattctgttgtcatgggttgctttgtagcaggtgaagctccgaaggacaaatcatctgaagcatgggagatttatcagaaggcaaaggggttctactttgatgccctaagtgagatggatcatatgatggaattcattgcatcgctgcctcagaccaatgacttcaatgttcgcctgacccgtatgtgtgaagctgggtatcatctgatcaaggattctaccactgttcgctggggtgccgtcaaatattacgaatacctccaccgcgaatgttcacgtaccaataaggcagaaacaagttgggtgggtgaagtcggggagatgattgagaagaccgtcacctacgttgaccgcaagttcctctacagcggggattggggcgattcctatctgtatatcttcaaaaccgaagaaggtagtacgattacatggaagacttcctatattgatgcggacctggaaggacagatggttatccggggccgggtgaaagaactgactgagtatgaagatgtcaaacagactcagattaccagagcaaagttgaggacgttatgacattattagaaatgaatgctgcggtgctaaccaaattcatcgcaggtgaactcaagatcggactcgccgtatttggtatcactaccgttgccttggccatatgggttctgatctatctgattaagaggaaagattgatggaatgttcatgtggagggcaggggacgagttcttacacccgttaccccaccgtgaaggaagccgaagctgctggattccgcgtagaaaaggctccctgtgtaatcgccttgaaagactgtccggtctgtaagaggcactctcaggacgtctggtatgagccaggcgctcaaccaaagacagtcaatttgctgtccatgatggggaaataaaatgaaagacgttactgatgaccaattgaaggagatgtggaaacagacacaaatcctcgctcaaaagaaaacaggtgatatcagaaatttaaaagaagaactttctggtttgtctgaccattccatgcaacttgaaatcgaattggttaagcgtggctatcgtatcacaaaacgtatttggagctattgatgactaccattgtagaaacattattcccagggtgcacccttgggcgcggcggcagcgaagccaacgggctggcaattgatgtagagcctcagaactgtaccatcattgacaaatatcatgacaaccactatccactgagcgaacgtcgcgaccattatctggtttccgtgaacgaaaccctgattcatctgcgtatttgtaaggctatgccgggttacaactatgaggcgtttgccgtcatccatgatgtttccaatggggagctggggaaagatgccctgttagcaacatttaagcgctggaaggagtctttcacttcttgtgaaccgcccaagaaataatctattgatgtctccaggggtataatacaaagaaccatacccctggagacaaaagatgattcctctgttagaagcaattcacactcttcgtgaaaccaaaggcaccaatgccaagaaagaagtcctgacccaaatcctgaaagataatccggatatggtggactttcttcaatacgtttatgaccctcttcggtcatattatcgtaccaagttcctcccaaacgccttccctcgcatgcaggcgctttgtttcttgaaacaaatactgagtgaattgccagaatcagaattcatggaagcccgtgaattcttgaaaactgccccgatccctggtgaagaaatccttcgtcaaagattggaagaaatagctgtcccggaaatatatgcagagttgtaccgtttacgtgaagaaataaaagggccagatggttttgagacctggaaagacgctgctttggaagaaaagaagaccaggattgagctacaaagaaatataatccaatcaggtaaggatatcgattatcttactgccatggcagctttccattcagacaaatggcataaaatggaccccatcacagggtatatgaatggctggaatgcacgtggattgttagccaaacgtgaggtgatctgatggatacgctattcaccctgatgtgtacaatgactttcgcgctgtctctggttatcagctcgttgtgtgccctgctggtgtggatagcgttgcctgatgtcgccaaatacaaagtcctcatgtttttggctattattgtcatgagttttgttttaacaattcactatgccaaacaggattataatcctgacaaacgttatgcgtcattggcggagagatatcatggcttcgaatttaaagacattaccagaaaatgattctgagtatttgcgtcgcgtcgttttggaattgggcgtgaactatagcggaatggccagattgttggattgttccaacgcagtcggattctggaagaaaggttatcgtcggatacccaaagcattccgccgggcgatcttgatgctgaaatttataaaccaaaaaggcctcatgtctgagttcttgagatatgtgggtgaacaggagaaacaaaatggtaactgaatgggaaaagatggaatatgaacgggcatttaacgtttattgtatctttatggccatcaaactccatttcacgaccaaggattatgattacggcctgtatggcccgatgagcaattacaaattcgaaacgttctttgccaaagaaggtatgcggaaacaattcgctcgattggcccggcggtttgagacttctcaaggcgaagtcgttgagaattatatcattgcaaatttcataaagtcgcccaagacctgggtgacaacattgttgaccagacaggcccaagagaattataatgaatatcggaagttgtatgacaactttacatatcacttccttgacttttttgaaaagaatatgattccggaaattaccgggcgcggtctgactttcctggattaccttaaaggtgatggacaaacccatccggcattattgactgatattatcatgaagaaatatccaatttggtttttggtcggactgaacaaaataacaggattcatcgcattttacgataagttgttgaaagacgatatctattggaattcagaggcattcttgctgaagaagactgatgcggttgtccctaacgaggatacagattacgccaaaaataaattccgtgagatgatcctttcccacggaatttaatgttaccaatcccaaaggatacgggatttatcggtttgattcgacggttccaaattcgtactgttgaaattgttcgtcgtgctgacctttttggagttatcgacattctgctgaataggggctatcacagaagtcggcggctggctatacactgattgtattttaccaatgttgtcagccgcccgtccttgcgtcggcaatgcgccgcccaaagtcccaccaccgattgatccataagcatctttcagctgggtattacggtcagtcacattggttgcatcggacgttacaccctggggaataggcgtaagtgtctgggcatcctgatttaaaccgccttgggtgggctgttgatcagattgtggagcaggagaatttgtcggttcttccgttcctatcatcatagactgtcgggcttctgccattttctgtcttgccgtttcgccgcccaatgcgtcggggataatgctgacgaatttatcgacgatgtcaaacatggcattgacgatggcgttaatcatgttgaagaacggctttttgacattctctgagaatcctttcttgatgctgtccagcgttttactcgcggccgcaattccgtcatcaataaacgaactgatcccaccagtgacccaatccaccagtttcataagttcgctctggagattatccgccagcttaccagggatttcagtcaatgatgtgttcctggttatcccgccaaacagatcattagatatccaatccatgatagagtttagccattgggcaggtttctcagatatccagagggtgaactgccggaattttttacccatgtctgtgtcgaatccgaatatcttggatacccaatcgaacaagtcaccgaaactgccgaccaattctgttatcccggcccgcacccggtcgacaatagtcacggatgctttccctaaaatctctttggcattaatgaatcctttaccgaattcaaatacagaagagatcaatgccagggggccaaccttcaaaaacttcaaaactttaccaaacgggccgagtagcttaacgatcccctccccaattttggagaacataccgatgaacacacccacagcccaaccaattgccttgaacggtttcaggaggaaccctttgagggcattgaggcctaacatcgctgctatggcagcgcctattccagatgagttctcatctttctgatcatcatctttgggaataatagatgtcgcctgaggagtatgtttcccttcttttccttcctcaccccggcgcatttcttctttttcacgccatttttcattgctgtcaaatatgcgcaaaagggtgttaacgatatgaccgccagtcttccctattttcttttcaatagaagacaaccgcacgagttgttctgaagaattcttgtctataccttctgtattccatcttacttcatccaggctgtcaccaatacgatttaaatccgaactgatgccgacaagagttccttcttgattatccaaccgcttgaggctgtcatcattggctgctttcaactgatctgatatcagattcagatattcagtattggtatcatcagcgggctggcggataaggtccccaaggcggtcaaccttctcgccgattttcatcaactcttcgttgccgtcaacagcaacatcaacggtatctttcatccaaatgccatagtctcgagtgaatatcggactcactcgagcgaagccattgacgaagtcgttgaccgaagggattttgaactgaaattctgggacatctttctgcttttcagcagcctgtagtttttccagatttttgttcatctttaccaactgcttgttggtctcattttgagcacggagttgtttcctctccatgatctctttcttgatcttgtcaagaacttgagcaacttcagtctgggatgtttgtgctggctcagccatggctcacctcttacaccttctgtgattgtcctttgtcaacagggactggcgtcggttgagatgcaacagcctgatttgtctgaggaggcagaaccttctcaatcatgctgtctttagcgatctcagcaacacattgataatcgttagtcaggcgtgaaattttatgacgaattttcgttatgatataatggcctgatgataacttacttaactcagccaggttttcattttgtttcggtctgtttgataggtcttcaatataatatacctggccaacattcagacggttgtcaccaaccaaaagtaaacgcatgactgtagacgccagactgaatttgataacacgttttgcataatcaacttgctcagcaccgtctggttgcgcttcgagataacgaacgttttcacgattaaattcgtcagagaacaacggatacggatccagatgggctgtgtccgcaaaccattccgtgtacacacgagaggtaggcgtgaccgttttcgttctgaaatcgtacactctttcgtctacagccagaacatcatgatagttcgccataaattggtcacgggccaatttcttttctgctttgattatcgtcctcatgaaacgctcagagttgaagttgttgttctgcaacaacggggcgtcctggggatcacggaagaatttcttttcaagagcggcttcttgtttttcttcagccgtcatagtctgattaccttgattgaataaagtggtcagacttttgaaatggtatcctgtgaaatcttcgtagaaaacaaagggcatgaatatttcatcataagaccgccgggccatgtaatcaatgctcttgagtacaggccaaagcggtgttgcaaatcgttcttggataccataagtcggatcgatgtcttcaaatttagtgcgtgactcgagcatctcaaatatcttcgccgccatatcggaatatgatccttgaagcccaaccgatttacgcagcatgctgtctttatatgcatcagtggtcaccaggtgtaaccagaacgctttcttggctgaggaatttgactcatcagcaacacgtccaacccggctgacccggaaagataatgcagtgtaatctgtagccgccggggatttgaatgatatcacgacttcttcgccaccaaggattggcatcgtgtccagaatatcccagccttccttgatcaacacattggcggtcaacgatggcgacacgttctcttccaaacccaaatcttgatagatgttgaattcttggaataatgaagtcagatcatacggcgttggggttcctccttccggggtatgaggaaggatggccatatatttcaaatcaaacgtcgtggacggggttaaaataccgtcttgtgactctttgttctcaatcatttactcagctcctgttccagctggctgacaaacatggaaacataatcgggatcaagcacttgaattgcgcgtttcgcctggtttttgttgatggcatcgtcgtgatatgatactccggtaaggccataatttgcaatgatttgggaatcatccataccgttgagaccataagccatacggatagccctggcatcggtctcatgcccaaactggtcgacatagtatttgatgtcccacataccatccaaaccgtattgagcgatcaattcttcaacgatccgttgctctggttttggccagtcgttattgatatccataatgctgttgatcatacatggtatccaaaacagctcgaaggacccgtagacacgttctgcaaaggaccggggcgtttccccgtcatagatgttataaggcaggagaagcccttcgatgtccttaattttctgtataatcatcacgcggtgcgataggttctgtaatagaacctgatcatcctgttggcaatcaattaactgatgccagacgagggggaatttctcaaagaatttcataatcgtctcctggattagaagctgtcgccttcggtgtcaaagcgacctttgtgcagaggttccagttcgataaatgtcatgtcaatttgggtagacacgatgctatcatctttgtggactgcatacgacgaatccggggtttcgttgacgaacatgtttgacagaacgcatgtcgaaatccggtgcaaccatttgttgcgttcaccttgcaccatgaatgtaatatcaaatgtcgacgggtgcaggtaaaacgcgctggagttcttgttgtatttgtattcaggatacatatgcatcttgaacagacgaatgatctctctgaccattttggcttctttctgagagcgcggtgtgaatttgaaagtgaatgggatttcacggtttcgcactccctggaagatcatttccacgtatggattcgtcatagtgccagtgaacaactccagagtgtcatgagcgttaatcgtcggaaggaacgggatagactctgaagccgattggatagccttcgtcgcggcaaaccgacccatttccttaccaacattgagagcatcaccaagtttgaactggctcatatcctgggcagcgcgggaaaggaattgggcacccataccagcgagacccaactcagagccgttccagccaacgccatagttggtagtgatggattcgggcatacacaggacaatggactcgttagaacgcacgtgacgcgcccaggcatatttgctgatggaccctgatttggtaccatacacaacaggggtattacccagcgggttctggatagggttctgaaccgtctgtgttgcggtgcttccgtaagaagaaccagagatcctgttgatgttgaacagaacataatggccaagggttttacccccggtgatatccagcggatagaccaattgtttctgggcctgtgtcaagcctttggtgttcagaactttgatcttatccagggtagacttgaaattcgccatggtcttcagcccttaattagaaatagaatgttgacactatttaggactcaattatggctatgtatcttcaggggaaatatgcccccgtaaatcccaagaaatacaaaggtgacattcataaaattgttttccggtcttctctagaactggtggcattcaaattttgtgatacaaacccggctattgtctattggtcatccgaagaaactgtcatcccttatatttcaccagttgatggtcgaccgcatcgctattttatggatttgaaagtatggaccagatcagccaatagtgaagaactcaaagtcacattgattgagatcaagcccaaagaccaaatcaaggaaccgaagaaaacgaagacaatgaaggaatcaaccttcaataattctatgcggacttatctggtcaatcaggctaaatggacagcaacccgagagcattgtgcaaagatgggatggtcatttattatctggacagaagagcacctcgttcctggggaagatcctgatgtcaagaagcaatttgctctcagatctaaaatgaaaagagaaaaggaaatacaagatcggcggcgggaagagaacatcagggctctgaaagaacaaatgaaaaagaccatcaaatcgaacgaaccaaaggaacgtgatgatggtctcttgttgccttaacttatgatcagctatgcccgggagctatgcattttaatttatcgcgactgatataccaaccatccttccgggcttctttagcacattcagcatatgtctcacccgcatatattttgggatacgacgtgctgtattgggaagatctgtattgagtgcagtcagaacaatcgcaataaagttccaatgaataaccagacacgatcataatcagttatccagatggtcgtaaattacgcgacggaaatcattgcccttggcacagcccttggcaacaagacgagtgccgccagtaccaatgacgctgatcgttgaaaaccgcaggacgcgcccggtgatggactggtcgacctttacggtttcaactttacccaaacggagttcatctgcatcacgacggataaaccctgttttgaagataacgcgcttgttggtgacggcaaattcagtcgtcaggttccgaatgaccgtgggaatcaggaaaaacaggctgataccaaaagtcggaacgaggaatacaaccacccagaaatagacccaaaatccactccaccaggtcgggcgggtaaagccaatcacgtgttcgttctggccgagcatacgatctacataacgcattttgttttccttatttgtcggggtttacgcaaaagggagttgtggtcagctcgcctttatcattaaaactatatttcagaatggcaaattggtcaaccatacgatagacttcaatgccggcattcatcatttctacgataccagtggtgatcctgtacggttcacagtagatcactttatcgatcttgccgctggcaataatacgtttggtgcactcagggcaaggactgtgagtgacgaacataaccaggccacaccaatctgccgcatgttgaggtaaacggttcagagcattttcttcggcatgaataacaccatcagataccagctggccgtctacttctatttcgcacacattaggagcgccgggtgcggtgccattccagccaatagccaacggctgatcaacccgaggatctacgataacacatccaacctggagacggcgggcataactggttttgccatatgcctgggctgctctcatatgggcaaacatcatccttggcttaatcatggacattgacctcttgtgagaacatgaagatcaaatcctcaccatcaaacttacatgaaaccgccagggaagcaacccaactatgaacgatattgctgatgacggttcgcatttcgtctttcagtgtatcattgacttcgcggcctgcgaatttctcaagcgcggtggttatgacattatcagcatgaggataatgattgacataacgcatcagatatttctcacgcagaacgattttgtccgtaaggtcagacaactccgcagcttcttctgaataaaggcgttctttggccttcaattctaacacacgttcatacaactcttttagcggcatcataatggcatctcctaatgaattaaggagagtatatactctcctttttcaatacgctttcaaatttagttcaggcagatttctcgccccagcgcagtcaggcgatagaattggatcactttcccacgagcatagcggtaattgccgtcaggggcgtcatgaccgccatcatgggttacagtaaaccaaggctcaatcaaccctttcttgagcagagactccccggtttgggtatcccaaggatcacccaggacgttggtcagatgccggctcggggtaaaattccaaacgcggacacccttttcgttcttccaggacttgacacagcgtttttcatgacggccatgacgagtgaggcgaacgccgtcctcaaaattacgcatacccagcatataattcaattgatgagccgtatagcgaggccacttttgagttttcacaacagtatctttcgctttcataatattctcgctctttcaaggatgatttcaacttcaccccaatccacgaaggggcgcttagacattgggtcataactcagaggacaaccaagagcggcatcgtcaatatacaattgcgcatatgcttttggtgaatttgtccattcatgctgtgtcggattcttgttgataccatacagcgggatatcaaatgactggaaccaatcaaccgcttcttcaagttgtttcccgctgcgcatggtgaacagaatcagaagatgatttttatccaccaacttttttagaacctctacagcaccaatatggcgtccgatgagaggatattcatgggtaacacatgtcccatcaaaatcgataccgattatcatgattttgtctcatattcaggaattattttaaccgttttgacaccagatacattttttacggattcagcatgccaagccatttgtttcataaatgaatcaaccgctcggacaaggcgcatgttgatagattcaaccaggattaatttggccttttccaaatctgaggaaaagcaatatacacagcccgaactgatatcatttcggatgccaggtatgaatttcattagatcggcgctgcgaatatttctattgggatagcggtcgccccagcggtcgcaaacaaagacgatatcctttatcatcttttcagttttcttataatcagtggtggaatcatatgcgatagtctcacccttaccgacataaactttcaaaaaggcttcttgtgtcataatgattccccattgtgcagctgtaacagttcttcaaacgtagccgggcggcgtaaatgatcccagcttgaattcaggtaatccgggttccctactttgcgggaatgccaatgtccgtgaacattatattcccaacgatccaggagtacgggcacatgagtgacaatcactttggagatgctgccgtcactccgagccatcttgtattcaaacagagagcaaaacttgctgatccattcactaaggaataactgcatcagcattgaaaagctgtcgtgattcccctgggttactttgatgttgaagttgggacgccaatcatcaggaaccttgccatgcatctttggtaggttacgcgccgcgccttctctcatcagtttgatgaaagcatccgggccaccgaagcatgtgtcgcccgtaatgatcaaggaatcatcccgtccacacgtttggaatatgctgtcgataactgcgatgtcgtgttcatcaactgtttcaaatccacgtgatttggggatctttttatgtttcaggtggggatcacccaaaaagaaaactttacccgccatattcttttcctatgagatcgttatagaaattgattaacataccgtcaatgattacaccctaatcattccgagtgccttcgcaatatagccttcggcccctttcaaagaatccttaatgattttatgaaattcttcgtatgacacgacatggccgtcagccatatatgtgttagtcgtcatgccgtgagaatcacgggcataataatggtataattctacaccaccaacattgaatgtgacagttctggtacgggatatgctcatgatttgtctcgggttagatagatatatcacaataatacgttatttcgtatatagaaaagccccttacggggcttcatctttatcagatttataaacttcccatcggcctattccacgccattcaccaagatcgttccaggtgcgagtccctacccagccaccaacttcataataatgacatatacatgcccagaagtctttgaaagttacttcccgagttggtttcacacatgcgatttgccagcgggttaagctgattgcctggaacaatggatggatataattgctatagatcaaatataacgcgatgagcacaatgcatcccacaaatatcataccgatagcagtgaaaacaaacattattccacctttaatcccatcagatcttccatggttttctggatgcggagccaatccagcgcagcatcataacgaggatcatggtataccatgccttccagttcccatgccttgatgccggcatagcgatccatctggccaacgcctttcagccagctgacgatatcaaatgtgtggtgataatcccacggctcattggagtattgcccgcaagtcacttcaatgatatgctgggctttacgcaggtcgaatagatttcgatcacaccagtcaaccgacctgggatcaacccccaggcgatgacaccctttgcgaatttcgtcggccagctgatagatggagatatcgtcttcctttggatacaggctgacttcacgggcggcatcacatggattatatttcccgtttcccagccaccagtctacagtcactttctctttgacacgaccgaggtcgatttgctctttgacattcaatttaatgaatgtggtacgttcttcgactagttgttggagagtataacgtttggtcaaatcagctactgtctgcgcccaggataacataacagcatcatcccagcggcccagggtttcactatcggcgaccgccaaaatatttgatttatacatttttaccctccacccggataatttcttcttcagaatcgacgacgttgatgtcatcatccagcgcgttcagattttccatgtcttccgcaaacttgtctacttccatgatgtagaacacggggacaacccggcggcgagtgtcttcgtacagggtttctgccagcgcttccacctggcggacaacgtcataaagattaagaccgccaataccacagccgatagctggcaggccgatatagaccgtttcagaatccttcgcttccacaatctcgtgaagttgttcaaacatcacttgtacagaactgataacggaaggcatacgagcatttgggcctgtatagaattgagtatacaggttgaagccccaaacacccgtgtcacggtcaaaggcataagacatgccaccgagacgctgctccggcccgcgctcatcgttctggtctgcgcgccagacatcaggaaaccccagccgaacgaaattggcgatacccgcgcccatcaccgaccagcaattggcgccatgggcgaatccgttaataagattgaaacttttcgcggcttccaacaaattcccaccacgaacgatatacgttgtcatataattcttctccaggtaatgttgatgtcatcaataaattcaaggcaaaaaacgccgccatgtccttcactattgttgatggacatgatagatgttctctcgtcggtggcgataagattaaccccaaaccctttggacatcaaacggaaagcgatttcttttacgatccgattgagatacgcaggggtggttgccggatcaaaatatttttcgaactcaggcatcaccaattccccttcatcacgctttccattgcgttttcagaaatatattcgatgaaatcattgtcggacgccatcttcaacaactcgaataattcgttaccgacggcgcacccaaacatcccttctaacattcccttcacgttttcatcgatttcttctgggtttaattcatataatttcaagcgacgtgaaatagcccgaaattgcgcgatatcaccgggttcaaatttggccatggtcatttaccagttatgggattaggcggtaataataccgcctttttattcaataaaggtcttcggagaaaagctgattgaaaggagtattcttcagacgaacttggttgacttgcccggcttctttagcgacgatcgctgcctcttcacgagttaagaaattgccttggttgtcgatgaaaccctgttcacgggtatgggttgtggtaatgaccccagcttcttttagaattcttaactgggaattcatcaataggctgtggtgacgatcagcaaccacgatcacgtcaccatatttgttggctgcggccacgacacggcgctgccattccccttccttgggtaggtcacgagcgtacagggcaaccattgtaccatccggggttcctttgacctcagagaacaatcgtccagtaccaccagggagttcacggaaataaccaagtagtttcataatctattcaatccatatttcaggttcaggaatatcgaccatatccacagtctggtttttcagatcgtgaaaacagtcgccaagaaattgtattttgccatttgtcaagaacaaatgacagcgtgagcctgggcgatctttaaacaccaatagacttggagtgaaagtgggtgcaacaacatcattgttccactcccagatcgggccttgttctggagaacccttcacgcgatatgggtgaagcatattacaaccaggacattgaaaatataaagaatcacccatagacaataattttgaactcaggaatctgctcatcagctgtccatctcctcatatggattgtaagggcgcaattccccgataagtttaggcaacaaggcgaagccgaacagattgaaggaacgcatagtgcctaccatgacaacatcatcgtcttcgtcagtgatatctttcaaagaacatatggggacataggcatcgaagtcttctccttccccttcttctacaagggcgaatgcgacttcttctgatatgaagcgagggatgcatatgtcaagcacccaggcaaggaatacaagaacggaaatgctgcggaaatagaacatattaaagccctcgcaggtggcgggggcttttggccccctgtattatagatcgagcagagtttccaactcgtctagatcttcattgtaaagatctatgtcctgtttcttatttaactcgtcccgttgaatttccagattcttaatctggttcaacaggcgctcgcgggcgtccaatgtaatcgaggacaatgacatcttgaataaatcgtcaaggtcaccgtcaaagtccgggtaatccgtctgaaatagcgctttcaattcagttagactacggcgcagatctgttataactgcccacccgataaacaaagcacgattgttcattttgtggatacgggcgttgagatcattcaataggtattggcgacggtcttcatagcgttccaggcggtagttgaagaatgcatacagcatatctttccaaccattgaagcgttggataataccgctttcgttccaggatgtccaggtcggcatttcagctgagtacagccggaacatctgttcaactttggcgtcatctagtttagacaattcaccacgtttgaacacaacagtgatatcccaaccgtcttctgtggaatcgttggaatactccgtgagaatccctgatttatacagcggaagaataatcttggtctcataatccttggcgaaccagcccaccggaacttcagttatgcgcagggtagtggcattgagacgttcatacacaccgcgacagtacactcgaccttcctcagtgtaccctgtttcccccttgtaaccattccaatacggtttcaagtcatttgggtcttcgccacggagaagcgctctcagggcatccaggacagactttatgctatggcatggggttttggtagcatagccgctaccgataccgttcagaccattcacgaggaacattgggataaccggcaggaaaaactttggttccagcctttcctcaccaagataattgtattccaggatgccttcatcttctttccgatagatcttacgaatcacgccggatactgccacagaaatatatcgcggtgatgacgcttctttacccatgattgatccgaactgaccatcacgatcaaaatacgggatattgttcgtccctgggaaagcctgtgccatattgacgatagtgttgctcatgttctcaccaccagatttgtaattggtacgggcggcggcgaacatacccaggcgatcaacaatctcttccttaccgtattccaacgcagcaaacaaaatttttcgctggctgggcttgaggctgtcaattaacagaggaatttggcgaacgctgttaacaaccgaaaattccttatgatcggtgttaacaaatgatgtcacagtaatgcttttggcaaccatcttattcatcctctgtttcaaataagcaaacgtcactaaaccaggtcttgcggtaatccgacgccttatcaccgaacccatcattcaatgaattcttgtaggcatcatccagaacgaccgtcgtagtatacgcatccagattgtttagaatacgtttgaaatcttcggtgctgttaccgcccagaccttttagatatttcttctttgtgatctttttagattctggggtcttcatgaactcttcatattcggcgttgttcatgaactcatgcatttctttaccgcaccacacacgcatgtacggggagcgcagaagtttaagacgcccctggcgcacatattccggccagaacgtacagtacatggtaatcaacaggccacggatatgaatgccgtcatcgtccgcgtccgtagcgacaaccgtgcaaggataacggctggtgtcaatcggttgccccggtactgcgccgccgtggatagtacacaggttcttgaattcttcattggccattaccttggcgcgtgaagcattcaggcagttgatgaatttaccacgcaaagggaacaagccgatcttcttggtgtcacgggcattgaggatagggttagatgcactatccccttctgtcaacaccagtacgcagcctgaacgatcaccacgagccgtcgcgggataatacttttcaatctcacgataatcccgtttggtaatttcctttttggccttttcaaactcggcgtcatcctgatcattacgcagagccgccagttccttacccagaccgatggtaacatattccagcgccttacgaatcaagcggtcagacggtttgtatgttgtcccaaattggctgacgggtgtggtcatgcgctctttggtctggctatcgaaccggggattgtcaatgtccgccgatatgaagagcatcatgtggtttttaatcatcgctggcttcaattctgtcttgaacttcttggacagaggggtacgaattgcagcgacgatctggtcggcaacatagtcaacatgtgggccgccgacgtgagtagcgatactattgacatatgacgcatgcatgaacgtgccattggacggcgcgatagcaacagaccaatcacccgattcgtctacagatgaaccctggcaaaagtaatctacgaaatgaccaaagcgatcaatccggataggcttgccattgaggacaatcttcagacgagggttacacgccgctacttcaaatgcccggcgataaatcatgagaagattgttgttatccagacctttgatacccaaacgttcataatccggaatccaggcgatagtcgtacccggcgcgttcaggttactgatcgttggctctgaacgtttgctcatgttgttctcaaacgtctgaagataagacttcttgccgtcgttggtagatacccggaaccattttgagaacacgtttacgagagaagcgccttcgccgttctggccaccagatttcttgttgttgtactcttcgtcatcatcgttgaagttactaccagcatacagggagccgaagagcatctccgggagccattctttggtctcaccgtgttttaccacagggatgccgccgttgtcagcaacgatgatctggccgttcatcgccattaccgtaacagtgatctcgttgaggcgtttcccctcaggagttttgctatggtcaacgcagttcgtgataatttcatcgaactgtttgatcagcgccggggaatatgtaaagttgtccttgaacacaacctgatcttttaccgggtcataaacccaaaccgtcccggatgttgaacggatactacccagatggcgttctgggcgaaggaggatatgctctacatgggagagcttcttgtactttctttcaatgttaacgttactggtcatcttcctatcccgtcaatgtaaacacacaagattatgtatgggattggcttatagaccaaatttgccccgccacttttcgactttgtgctcaatagcgtgttccaccttgacaattgtgctgacatggttttgattgcagtcgcacgcaaattttgatgtatgcttgataatgctgttaatcagatcgaccattcgatcatttgaacgctggggctgattcagaagtcgagtgattcttcctttgaaatggttaatcatcgccagttgtttatcaacggggtcaacacccccgcaaaaccaataatcttctaacgtgtgctcagacaaatcacttgtgtgattagcctgggccaatgcatagatgatagaatcaaatatttcgtccttggtcatggaaccatattgctggacgtgttgatattcagtcacatacagcaaatccagcgctgatatgatgacgtctgctacttcgccattcaaaggctcagacgcggcgataccatagaacacgtctgataattcacacgtttcttctacaagtttactgaatacaaatactgaagaacgagagggattcatcgtagtgcaatcatacgatgtgtttaaaatattacgcagaaatttcatttcaaatatccttctagacggaagcggttgatgtgttgtatgataaagtccatagagttttgaaaactatattttccctgatgttcatatgcatgtatcaggggaaggcggctgtgggctaattggaaacgcagcttgggtggcatcgtcagcaatttttggcttgttgctgcaatgatgtcgtgtttaaatttggggtcattaggagacagaacgacaatctgcgacttggccagagtctgaccgaattgtttggcatcatttccataaaggctacgcaggtcatcgtgccgatatttgagccaataccagtagccttccatcgagttgaaaacaccatcgacagtatccatgggatggtatgcaaaatgagacaggaatctccccagctcggtgcggctccgactgtaaatgttgtaatgtgtcttgccttcatcatccggcgtcatacgatcttttggaacattgagtaataggaacatgatataggattctcaaatcaatatattgctgtgcgtagtagatttataatttcctgaacgcgatcaagaaactgacgacagataccgcaccaaacagcccagacaatataaatctgaccaaagggaattcaggggccgcaacaagactgactgcgttttccaggcatatcatgaatgatataccacaaagcattcccagggcgaactgattcggtttatgacgtaaacgtaccatttcacacctcctctggttgattaataggggctttgggccctattatctagccgagaacaacaactagtttcaaattagtaaaagccgagcgactatcttttaacattttatgtacagcatcaagacgtttgggatcgtgtaaagtatcagagaatacgataatatcagccttgtcaatcttggtgcctctataatgactagtcgtggtggtactgtctttcatatcaacatgcggtgcaggtgcgttataaggagaagaaggagaggaagaaaagaaagaatcacgctccctttcactgtgaaagacagccataatacgaacattattttctgtttggaaattgtaagacataagtttcttcagcgctgctgtatggcctgtctgcctgatcatacggtaatatagaatattacccggttcaataacatctaccaagctccgcgattcgcggtctttttggatttcgtacgcatccaatataagttgttgtatcatctcaacgtgagcattcaatgagatttctactctgcgttttaccatagattgcatttgtgtatcctcggttaagttccgctcatggggaactggtggattataccccgagtaacacataaagaaaaagaggccgaagcctcttttattcatcatacttgcctgtcctgaaattccatttcttggctttgctgaagtcaatatccttgaagatattaccgaagagtttcttgaactctgattcctcttcaagatccttcggtttcttcacgggttccttgaccataccgccttcgggtttccccacatcggcggtcgtggtggcaggaggagaagaatcttcaaggaaatccttgaaggtcttcatattagactacagccatttcgcaacgggtagaagtcactgaatggccatcggcgtcagaaacaacacaccaatattcgccttcgtcggcagcatccacagcagtcacaaccaggttagcggttgatgcagtcgcgttggtgccagagtcaataaccgaacctgcaccacccggcacatcagagaaataccacgcataagtgtacggggtagtgccgcccgcagcgacaacgctaaatgtcgcgtcttcaccacctgtcacgtctttagttgccgtcagatcggttgaaagagacaaagcgcccgcaacggtgatgacggttgaatcgacatggttgccttctacggtgacgccatagacggtaacggaaccggactgaagcagtttgaatttaccgccgccgatatggaccgctttagtcacgtcgccggaataccagttgacgcctttataggtcgcattcgccggggccaccgtcgccagaagttcaaccacctgcccaatttcaccattggcggttgccggggtgatagtcagaccagtagtcaggactgcgctgggatcgtgaatttcgtaagataccaggaagccaacgggcttcgaaggatcgattttggtcacgccgtctgcttccagattagacttggtcagcagtgcatcaagacctttacattcggtcagaatttcgtccgggtcttggttcagactggttttctgccagcccttggcaaccccggtaacaacatgaccacgttcggtctccggtttgttgcgtacaacatacggcgcgactaatacattgattgttggcatggtttcctccactcatccaaatcgttgttcagagccatcatcagctcgttatctggttcataagaaccggaacataaatcatctctccatacacctaacgtcaacaacgctgctttcagacgaggatgttgggacttgtcagttttcaacaccaacattcggcataccgcctcagtctcaaatgtgttgaaaagcgtaatcaattgattgataaggactcggggacttttcccggggacaaatcgtttcaatgattgattaattagcgaaattcgctgaatgtccaccatcaaatcatctcttgagacacaaggagtaatataatgcctcagagcgtattccattaaattgctttcatcaacaataggcatatagaataagttcagctgttgtacactggacttatttaatctggagtttttcgatcaatttggcgatcaatttgtcccgatcagtttctacaatccccagaggctcgcccaacacggatagatcgttgatatccagaagattcaaagtttccaccgtaatgtcagtgctgacgaccgtaccgggttctatcggtcggccgaatttgtcgcgaccataacgtttaagagtcccagcaagcccggttagctcctccaaaagctccttatcgccgtttttatgctcacacacccaaccgtagtcgccagcataaactgtcgcgccgtcgccaacgttcgggatgttatccaggacgcgctgcaggtatgatgggagtttctgttcttctactgcggtgattgggtcaacaacagcagtatctttaactttcggtgtcttggccatgttcagttctcctatagactttgatatatttaccacagcaattacattgatattcatgcatacagcgaccgtcgtcattaaaatcacatgccccacaacgacagaataattttacaaattggtttccttcaatattccttaccgggaaatgtttatatgaatattctctcatttcaccgtcaaattggaaagagtcgattaagaacttttcaattgttctataagacccaaatgtttgacgaccatatttgaaataaacatctctggtttccatgaattaactccaacaaaaaggggccgaagccccttattttacgctgtcgcgattaacgataaagcccttcaacgtcgatagatttgtgttgacggttgtactcagcggtgtaatcatccaacaccaggtattcacagcaacggattttgctggacttgaagtcatcagtgatagacacgatgtctttcgggttcagtttacaacgaacaacgcgctggcccagatggccgaagcattgcttcaaatatgccagcgagcagacatgcagcccataggagcacaggtctttgttgtcatcattgacgaaggaacgcgccatgcgtacaatcgtccccggcgtgttgtcgatagtaccagagtgcttgtccatgtaattgccacggaccgatttgtacagaatgatatcgccgtcttcggcaatctcgatatccgagtatgccataaactcataaatacggccagactgtaccagggacgaactcgggttctggaacatcttatccaggaagttcgtcaggcgctgcaggttattgtagtcgccacgcagcatcagcgtcaggatgcgtttggcgacgctcgtgccagtgatatcatgaccggaccaacgcacccgattttcgctaatatctaccaggccggaagcgaattttccaatcgcttcgcgcggcttcatcagagtatatgccagcttgatatcgcgagatttaatcgcttcaacgatgcggtcataggactgatggctggtcgtgatcgtttccggtttgccatcgattacgataacaacgctctccggcaggatcatgatctggtgttcattcaagaacacgctcagttccttatcaccgaattcagtcttggtctgtttatcggtcatttcttgcacttctttcagtttgactttgaaagtcaccgaagaaagagcgagacgcagggtgcgaccgaggatgctgtcgtaataaccgacccggcggcgggcgtccatagagccgcgcatcggatacgtgtcatcatcaggcaagacaactgtgatttcggacatttcacctttgtagccttcaaccaaggccgcagccacttcggccagcgcaacgattttatcgccatcttgtttagagtaaaactttttagaatcttctgaagccttcagctgatcgcgcggtatcatggctgctttgatcacgtcatagctgtcgtccgtataacgcaaacacagaaattgcccgtgattctccatgaatttgccgacataccactcttcgtcgtctttttcatagacagccacgccaccttccagcacttcgaattcttttgtggcgtccgatgttttaatcggagagatcaccgtgatgttgttggcttgcttcacgatacggaccatcagagcacgggcgatagttttggcgctgaccccataagccgctgccagggtagcattgctttccccggaattgctctgagattggatcatctcaatctgctcagtggtcagagatttcaaagaagccggatcaacacccagctcctggtcggacacacgctgtaccattgagcgaggaacgcccaattcgttagcgatagaattctggcttttgccatccttcaacatccgcaaaatacttttttcggtagcagtcatcttgtagttcccactttgtgttagacggggctattatgccccgaggatacgttttgaaatagcggcaaagaacccttctttatcttcttcaataggattctgagccacaggcgtatatgttgacatcaaatgtttcacaaggttatgacaatcaacacggtaacggttctttttcttttgggcctgtgaaatagaacgtgtcgggttgatttcacaataaccgttctctgacagtaattcattgatactggagaacaattgaatcacacgcacctgcccacggcggtgttggtcaaagttctctttgatactaacacggaaatttaatttctccatagccccgttaagatctttgacacctggtaaacctttcttgttcttactgatcgtcttcagataatcccattcactttccggtattaattcaatattattcttatccagctgggatatgttatccttcagataagcaaacttttctggaacgcctccgtgagatttggccagaagcgactccgcatacggaatacggtttatgatacaacgagattgctttcttaatgctaacagttcccgggcattcttagatttgaaagacggcatatggcgtttcagcaacatctcgaacacagcatcaatcgggacaaacacttccgggaatttcttcatcattgggacagatttccgacgggccagaataatccgcttgtgataattcatgaactcaaagattttagttccttcatcatccatcggtgtattgttcatacattcaagaagttcacgagcaacgtattcgttaacacgtttcccgcgaatatcatgaatactgtttgtgcctgagatctcaatatagacgatctgttttccagaatcaatgatattggagatatcttcagcagacagttcttcgtttttatagaaattaaaacggaaccctccaaatgggtacataccagggtctttttcgaccgggggctttacatactgcatttcatgcatgaagtaaacttcacttggtatgaggatttccgaaataacttcgtaaaacttatcggcaaataccaggttgtctatagtggtctcttgtttaccaacccaagattcaaaataggattgaagctcttcgtgattcttgtatgcgcctttatggttttgcaataaattgcgattcgtcagcagtgaatcattgggcttaacaacgatgacaacatcatgattattgcgtgctgtcttgattttcagattacgggcgcggctggagttatcgataatgatagcaacagatttcttctcaccaacccaaccataaacgtcattcagcatgagtgaatccctggattcaaaatacccggcatcccaatatatttcgagataataaggattcccggcagtacggaatggagcgtcaacatccatgttacgttctatatcaggggtgccgttgtaaacatatttccctttgtagaagcgggtgtcagccgggaagtcccgctccatcattttgcggaaaccgctaccgaacatgttagtgaattcgtctttcttcatatacaacgccagcgggcctttgctggccgccaggttgagttcggaaatcttttcctgcataattttattcgccactttcttgaactggcgattcagggtttcgcgagtgtactcatcgtaagacaagtcttcacgggatggtggcacattaagatcaccgagttcaaagaaggtataggacgtcgggaatttttccagaatcaaagaaacatcttgttccagttgttccagatcaatagggtatgacaccccgcccatgaccgcatagtgggtattccccgttcccttcggctggatataggtattccccacccggttgttaaaactgatgtcttcccaatcgaagttgtatgaatgattcgtgactttcgggcgctcgttgggcttcataactttgccaaggcgaatcaactcttcttcgaaggcgcggaagcgactgttcttgaccgggacttttacagacaaaccgttccattcatctgtgtcttccgggagaggctcacgtgtctccagatctttggtgaccaggtctacagtcgggatacggttgctgttcaaatacatcaggaagcgatagaccttcccttcatagcgggattcaacagtgaatgaatccgacacagagaaaggtgatttggaacccaggccgaacgcgccgatttgcccatcatcgtcttctttggtactgttgaacaatgtggtataaagcccaggggaacggatgatttcgccatcttcggttttaaagaccagttggccgccataatacgaagagaaatcaggcacacccaggacttcagaaccttccgggatttcgtcttctttcacgaccatgttgcccgccagaagcacttcatcttcacgggccaaaataggttcacccatgatctgttccagggaaagaccgataccccagtctttgatttccagccatggctcgtaatcgtccgggagatggacttctacgggaacgttagaaggcgccagatacttactatacagttggggcatcggggacagagaggcgtaatgagacggcatccggcgctgtaaacggtcacgcatgttatgagcgtcaatcgcattacaaacggtctcacgaagcgccgccgcttctttataacgataaaggctagagaacaacgtttcaaataacttatctgtcattttaacgttgaagacattacctgcaatagatgatgaagagcggacaaagtgctctgacttgcgcattttcataacgaagaagtcctatcagtttcaaagggattatattggtataatacttggaaatggttcaattgaaaaagcccctgagaaggggctttagttcatattatccgacaagtgatgctcggaagttaaaggtgggacgggtagcgcccggctctaacgtctcttccagataaccgacgtattgtttgacaacttcagtcggctcagcacgattaggtttagcggcactcaaatcgagcagactagatgtcacatcctctacaacggtgcgcttgatctcaaaatggtagcggctcccgaaggcggcgatctcgacttcatgaattttgaagtcagacaattcactgctgttcaacgtaccgatattcaattgtgagcgcagatgctcaacaatgttagaataaatgtactgcggtgtgatcagctgttcaatagaactcataatatatcctctaaatttcgggttcaggtttacttaatcgagcgagttcggctcgaagatacagaatttcatcagccatctgtttcccttcaccaaacatgacatgacactttaccttcctcggctccccttcagatatttcgaggagccgttcttctgttaaagtgtcatcactcatttactcttccttttgttctttccatgcgttttggctttcttcggtcgtttcaccgatgggcgaccatggcctggcgttcccggtccggaattgttggaataccaaatatcatcaccgcgatggcgtgattcctgataactacgcgccaatgcttgttctgcactgataacagcaccagccatagcaatggcgactaatgtctttttggaaaccattatacttctcctttggcggcataggacaacgcctggacgatcatcacagccaacttcatgaaatcatagtcaaaatcacgttccaccaatgctctgatttcatcacgagattggacttctggacaatttttactctgccgacgttcttcctgatcgatcagatctcgcagcatcagaccagtaaaagaatattcgtcaaagttttccagatacttctggatgttagaagcgacgggagttggttcttgtgctcctggttctttcagcgccgccacgatagcatcaatatcccacaaaggattcaacatcaacaacaggttgaccgtcttccctgactccgaagtcggattcttccccagtgcattgtacagggtcttcaaggttttgtcaaatgttagaaccacttgcacaagttcttcataagttggtttggtaggcattagcgtttgctccggcgtttgttattcattttagtagcctggcgtttgtgggcagcggctccacgaaggcgaggcggcttttggtaacgagcatctttcatcatctgacgctcgtctctggatgtttcaataaaatcattgtcatctaatttgcgccttgacttcaggctggtgataagctgtttcacatcagactcagaacagatttcatctagggtcacgatgtgcttgtcgttctcttcacgacgtgccagttcacgagccgacatatgatcttcaatggaaatttgctttatttcccattctggatgaagatcttgtaatgcggccttcatgataatactgtggcgaccacccccgatgataacgatctttttgggttctgacatgattttgctccaaagaaaagggatagagtaataataccctatccctgtttattgaagaattaaccctattcagcttgcgtgtaattcctgtcaccacgcagatcctggacaggggttccaccaaccgccatgatatagatggtgttgatggtttcgaaccacgtcagttctttaacgtctttggtgtatggcgtcaccggaatagaagttttgatttcattcttctcagccaccggatgcgcttcaactagagtaaggaaagcgcagcgcccagacggatggataataccttctttaaacaacacgatctttttgcgaggataggatgcttcccccaggcatacggcaagatggtggatcatttctggccgagttaatagagtgtcatccctgatgataccttgtttaacagctgagataacgatctcgtccagaatcgcctgttgttggtgaagactcatagattcggtaagttttacgctcatgatatcaccctttgaaattaatcggagcctgaacaccagattcaaaagctgcctgggtacggctatcgcttacaacctgacaggtcttttccagatccagacgcgggaaaccaaacattccagccacgatgttgcccgggaactgctggagtcgggtctcatacagctggcacgcatccagttttttggtctggctgatacggaattcatcgcggcccgcgctaatgacgatctggatttctttgtacagagacgaatcgaactggatgttctgttcttgaatccattgcatcaccgctttagaaccgtcggcgccatagcggccttcaaatgttcccttgatgacttccttcaacccgttcttgtacatgtccgggatttgcgccgtttcctgtaccttcagagtataagaactcagatagttctctgagtccttgttgaacttcttaacattgttctccagcgtgttgaagccgttgaacgtgctgataagaaacccggcgatgattgcgataaaaccaacaacagcaccgacggtgataagagcaggactgatactttttgacattttgtagcctcttgtttagaatgggaaacgacgatttagactaaaattatatggcccagcgccaagatagaataatacaccaaacggcacacaaccgagtaaagagacgaccagggcttcccaggtcttcaactcacgccatttcaggtaatccatttccttcatggacacccggttgtaacccttgctgatattggtagcgacttcttggaagactgctatccccattgggtgtcctgtaagagacaaaccgttgcgagaatgcaactccatattgttcataccatcagcgaacgaagtgctcttgccccaatttatcttcatgtccttggcgatatcagtaacgacgatgacatcgttcttcttaccgccagaccatgcatacaccagcccctggaaatattcaatgggctgaccagaagttatcacccagacgatattcacctgacgctcggcacccagagttttcagaacaccgttgagataatcattccagtaatcaacaggaagattcaaaccggacatattcaggactcggttgacacgataataatcatagacctttgggtatgccgggatgtggtctttgaacttctgagcgaattgttcgtctgaacgggagaataatgaatccctgttgcccagaacatagttctgatacggatgatcttgggccgctggttcccctatcttcacctgcgcccagcgcggcggctgacgcaaaccttgtcggtctatgcgtttaatggtcaggtcgccaacagtcgtgtgtacatcccagtcaacgtcgtaatcatgctcatcgcaatagatcgggacacaggactggttgcctttactatccgttgaacatgtctgaccacattgatactggtgctcacaggaaaccttttcccgagtcttgccagtcacgtaaccattaaggatttccacgtcagcagcactccccagggagaatgctgcgtatgcacccgcttgtatcaggcaagataaaccaaccccgataagagtggtatagactgtctccttgacgttgtggtcagcctggtgcctgacgatgaacgctaccgccatcgccaacggtaagatgaaaaagagatagatcataatacaccatccacgagttgggccttggtcatacccagcagttgttctttgtgtttttcatccgcgccattacacacaagaagctcccaacgttcttcatgatacttcggatccatggcctcatcaaatgatagatgatggcggaacatgattgaggccacagaatgaagattgtgtgcggtagctcgttgcagagtccgagttgttgtgatatacggtgtttcgtactcaatccccatgaggtgtaattcacgaataatacgggttggtgacaaatcacctttctcgtaaagttctttgaaaagcgatttcttaggatgtaattggccgtctgtttctttcatgaacagatcgtacaggtattcggtgtattcggtgcgagtcatgattttaatccttgaaaataaaagggaacgagccaaatataagcccattccctttattgaagaaagtaatattgctcagttatttcttcatcaatgacatcagattcacgcttttggggacgggaggactttctaatttcgccgtcagaatattgtgttctttcgcctcccagcgcgtacctttttgcaggtgccaaatatggagggggacgcctgtttcaaagaacaccggcatcttccacttctggacgcctgggacgtgccctgcgggagccttctcgcataacagggtatctggtagccagagtgaacgggcttcccagagtgcggcgcaggagtattccggccagatacgttccatgtagtcgatttcatcccaggtacgctcggcatcccacccgatgtaacgagtgttcttcagacggaagaatttcttcagccaacatgcaccggaggtctcaaagttcagacggttgatgaaagtcagttctccgaactcttctacgcattcacggaaagccttttccaaatcggcttccaggatatcgcattcttcatccgtgatcggacaaccgtcgatctttttcttcccgtgtttggtcacccaatcatcacggttagaaaggaacgccgcgccattgcggtttgattcactgccatcgcgatcacgcagcataaacccaggaacgtcaatctgccacatgttcccgaacaccatgttcagggcttccaggaagttccaggcgctcaggcggccgaagtatttccaggacattgccgtgtcccacaactcagtaaactggtcttctttcatggtgcattccagcatccaacggaaagaatccatctgagttttaccacccagccaatccacataggactgaacacatgggatcatcttcgacttgcggtagcgacaatcagtatcgaagcgcatgcgctcaaagttcaggttataccaatcacagaagcgctgcatttcttctttagtctgaggcggaaccggaaactcagaatagattgtccacgggccgatagcattatagcagcaaccccaaaggaacgacatccagatcttgcgctcgatcttttccagattggtgatgccttccgtgacttcaatagcataatccatcagacgcatctgctggttatgctcttcagtgtaggacagcgcttccacccaagccttgagcagatacatccggttttcaggcttgcgataatcaaccttcagatcgatgggatacttccattgctcaggggctttatacccctgcggcattttagataaatgggtcatacatcaatccttttcgccgacggaacttgaaagttcttcatctccaggatgaggctgaactggctccagctggatttgttccgcagtaaccgggccaagttctgagtgccaaatgtctacgaagcgcttatcagaagtcacaacccacatgcgcttggctttattggaacggtcggcaatgaatgcctgggcgttggcgttggtgcggacgaggccaacctggcgccactgaccgaaatctttagacgcggggttagtgttcagctgaaactgcgggataacccggttatcttccggataataacggacagcattgatcatcttggcatcgcccttataatcaatagcgatagccacggcatcgcggggaatcaaaattttcatctcatttccttaaaaataatttatagacaacaggtatcaagaacgataagaagccgaaccagtaaaccacattcatggttttcttttctgcttctgacagatcaatgaaaccataatgatatactatcatggttaataatgaggctaaacaagtgatcgccccgaccaataaaattgcatccaaccacttgttgttcatcttcatttcctcaacatcatagccagcacgttagaacttttggacagctgtttcttttcatcagccgtcttcttgacagtcgggcggcgggtagccttttccggtacacgatgcgccagcgggtctgaaccaccaacttcccgcgtcattggatggtcttcgcaatacttatagaattctttgaagacgaaccccgcgtcacggacttcattgatgatcatgtgatgaatggcattaccaatcacccacagcggtgcgtcgaatggcaattgggcaacttcgctgccaacgccgttctttttgtagaggacgtcctgaccgctgtatgaatctacaacgacatcccagcccgctgacgccatttcagatttagacttttcaaactctttctgataagactcgttgcgagtccagccggaatccccggcttctttaccagaacgccctcgtatccgggcgtcatactgataacgatccggataagtgaaatacaacagcgccaactgttcgatggggtaattggcaaacatccattctggacgccacttatcagacagcatcagcggttcaccctcacagaccagcgtataccccgcgctgagatgttctttgaccagttcgcgggcgatatcaccagaacccgtcgcggcatggatagcgtccatcgaggtccacgaggcaaggccggatttatttgacacggtgtactggccgacgaacatcagtttcagttcttcaaaggccagaccaaacaggcgcgttttatcgccgatggtataagtgacctctcgaggctccaggcgggtacgcagccattcgatgaactggacgacacgagttcctttgccgccacccgaggttcctttgattacgattaatttagccatttattattctccacccaagacatgttttagccctacctttcaacaggttcgttatattaccggaagggagaccatattgaagttccatatcacatcttcttaattcaacgatgcgaccatctttgtgttgccatttgtaaattgtttcatcacgaccaggaccaatatctatcagaccaagggcatgcaggcgttttcttgtttttcctccacaaatataagattctggtgatggcctaggaggttttggtatcttgccttctgacattaattggctcagaatctttccctttctaagttccgcttcaggtgtgagtctgggcggcggcttaatcttaccttctgctatcagacgtttgcgggttgcagcactctttgcggatgatgctggagtagccaaaggcggctttccgccaccgacaaccatattgtagcaccatccgctgtcgatcacttcttggcaaaccaattcagattctatttcaaggataaccgaatctttaccccgaaacagaacttcaaatctaaattgggtttcaccatatttcttaaacgcacgttgtaatgcgatgctaccctggccactcttatgctcggccaaccgcctatccggttcagaagtgacaccgatatagaatttatggttggcgaggttagtgataaggtagagcgacagcattagttgtcgtcctcaattcgccatgatacaccgccaagccaaggagaccaaaatacagcgacctgctggcgaccatcttcaacatatttgactttatactggtcatcaaagttatagaatatttcttcgtcatcaggagacattccattctcactcaggacgcgcttcagttctttagccgccccaacagaggatggattctcttgggaacggatgtagttgttgatatggatgatgacaccttccatatcactattccctgagagtttgacagggaattctaccactttcagcaattcgttagacacttcagactccttgacggacaaattggtaatgtgcaaccaggcggtcaacgacttctgtaaagttctcgcgcagataatcgaagtggttgcggccttctactggtttaacatatatcatatcttccgaattcgaaagatccagtttttcataattcccctgagggacgaatatgctgaaaacattgttccagatgcacgggtcgacatatttcgggttgtcgtcaatcaaaacatcgccagcgaccatatgcttttcatcagtgctgatgaagccattgaagatgttcgggaacttttcatacacaaactggcgtttgctgcgttcatgctcgggttcacatttggtgacagcaacaaattccaccatttcaaacttcatgagcagcgcatcacgcaagttgttcaggaactctaccgcgccgggtaacggctgcatacgagaatacagatcgggctggcgccagaagtccatcggatcccgtccgcttgggataaaatgttcttggctaccgatatggacatatgagtgagtccacgcccgatgcgcgcgttcacgcatgaggattgccagatccccagcatggttcatataacattgcttggtgataggctgaaatttagcagggccaacaatcccatccgggatactcgcttgggcttccaggtttccgtcattaaaccacttcacccaaggcgacaggctatcaaccattgtcaggtcaacatccaccaaaacccggtacagaccaccgacctttgaattcatatcgtaaaggcaagacagattgttcatttgtcttcctccactttgtcataacccgttgcattgcactgctctgcggtgcagtcggcatacagaacgacagaagcctgcttcacgtaagtggtgcagtgataggtctcgtcttcctgaatggaatcgtcatagttgcagacggtttgcaacgggcctggggtggcgttgtccagagcggtatgtgctttgatggtgtcttccatcttggctacagcttgttcattggtgaatgtcggcgcatccaggtccacagtagacgctacatccagcagggtagaacacgcagtggtagaaaatgccagagcacacaccaagaggatcttattgagtttcattttaaatcacctattctttgtcaaagggaaacaacaggggaattatatccccctgtcggttattgaatcaacttttcttacccatcatcgccaatagatttactcgacgtttatgagaccagccaacgaccgtcagtatagactgaatcggttcaatgaatgacttctcaaatgccgtgttgtagtctacccatttcgccatatctaattcttcagggaagaactcgggataggcgaaatagttctgaccgaaaggattcccggccttgagcagcacgatgttgaccttatcacctgattcaatcaatggtaaatcgagttcttcatgcttctctaccagacggttgtagccgacgcatgccttggcggcaaagtgtgcaccagagataaaggaaccatcaggagcgacgcacttctcaatatcagatacaccagaagccttcgcgatatcatcgacgctcagtttcatgtactcatctttatacgtcttaatgaggtcttggacttcactttcggtgcctaagagaatgcgctcatagcacttgatgagacgctcgcggcaccattcgggggttgttgatttgcgcgcttcaagccctttgaatttaatcttcggcttctcatacttgatcccttcactatcatagaccgccatgcaatacatcttcttggcacgccataccgcagccgacgcaatgacttcacgctcccaaaccatgcgttgttcgtagccattcatcgtattacacagcatctgcgcccattcattggttttaggctggtaattctctttgatccattggtcgatgttatcaacgagtttgtggtgatcagtttccccttcccacaatttcttgaccaggcgctcaatacagatatagttcgagtccgtgtcccccgcgataacatagtccaggccgctggtcccgcacaatccgttgaggtaatcatcagtgtaacgcttgttccacttgttaatcaactgacccgatgttgtaatcgcttctgcgatgttaaggttaaagtattctttaaaccagacgttagagatagcgccataacctgcgttcatcaagatcttgagaccttgctgtaatgtatcttgggcgacgccgaggtcttcccatttgtgcattacttcggacagatggtcaaggtcgatgttcttgtgctcttcataccaatcttggtcaaagtagcgggacttcatcgcagactcaaggtggaagtcacccttggacatttccttacaccagcccgcccactgctcatacttcagacccttggccttctctcctttacgatcagcgtaaatgccgcgcataatctcggacaggaaggacatcttctcattgctgaagaactgaacgttcggcgtaaacgaaacgttgtaacgcacaagggtttcaaaacggaattcacccaaggccaccagttcatccacaacctgcaggcgttcatcgatcgcgcggagcagtttgtcgtgtaggttcttcatatggcgacgtttgtgcatcggtgtcgtcatatcgttcatcttagcagcaagctcttcacacatggcttcaatgatttcacgacgggtatgtttatcgccgataatcgtttcagggccaaggttgtactgctgaatgatgtgtggatacagggagttcaagtcctctgagaagacccaataatagatccctggcgcgacctccatgacatacgcgccttcaaagtttgtcggcccatcatagacgcgctggactttggggacaatccccttttcgtacagcttgtaataacacatggccaaccatggtgctaccgtacccaagccgtcttcaaagttagacttggtgcgatatgccagaacaaacatcagctggataagacgcagtttttgttccagacgccacacgagtttgacgtccttgataccataccgggtatgcttacagtaatcattgaagtacagatcaaacagcgatttactctcactgtaatccatcttcttctcaccgagttcgcaatacgcaatccagtccagagaataccgctcgcgggttgtgtacgtgtgctttttgtaaacctgcaggtaatccaacataggacaaccgacgaactgatacgtcgtgatgtcgcccttcttatcccggatgatacgcttcttgatcttaccccagggactcaggcgattggtgtcggcttcacccaatacttgcatacagcgttccaccaggtacgggctatcgaattgctcgatgttccagcctgtccagccgtcaaaggcccgcgcttcccagtaatcaacaaaggaccgcagaagatcttgttcggtggtgaactcttgatattctacttccagaccaccgatctcttcatcgtttgggtcatatttgaacttatgacgatccttagaacatggcatcccccagaccatatatttgttattggtcagatcctggagctgaatgagcgtaatagggaacgcagcattcatgttctgagtgatcttaccgtttgcgtcaatgatggggaactggtcggtcacgttgttggagataaaggagccggggaaatgctcgcggacgaatgcatggttggccaggatacgtttatggaattgacggacacgcgccgcgctccctttgaacgtctggagttctatcgtcgggtgcgggaatgggcctttagtcatctgcccatcaacccaccctgccgagaacacttcgatatcaagattagcgatatggatgttgttataatctggttggattgtaccggggaaactgtgggcgatgaattgataggcatagtcggtctgaccatatatcgccgcgccttctacatccttgtattcctccatatagttgtcggcgtcacgcatagacgcaaacttcttagaaatcagaggttcgttcaacaggccgactttttcaacattagaataatcagccgtgggtaaatacagagtgggttcgaatttctttttgagcatgcggcggttgcccatgtcatctgcaattcgaactaacaggtcgttgccttgccgggcgacgttagtatagaaaacagtcattgtattctccaggttatccgtgccgttagcacgtccccataatttagccgaggagggttcattgaccaaggagtttatatggcaatccccttggtaagcatgattcctggtgcgttcaaacagctctggaatctgggcactgatttgattcaatataagcgggaaatagtaagcgccaagcatgatgtcaagatagaagcgatcaaatcgtcttctgactgggaactatctaagatcacagaagtcggtgggtcttggaaagatgagttctggactatcgttcttgcgatccccgcgatcctcgttatgttagctcctgttgtggaactgcttttgttccccggcgaatatcataaaggggatttcatcaaagcagtagtcggtggcatgcaagccttagataccgcacctgattggtatactgcttcattattgacagcaattagtgcatcattcggtatcaaaggctacaaccactttaaaagcaacagccgcaaggcgcaagctgtcgatgcccttaaacaattcggcgtcaaagtggttagcaaagatcccactgttgttactcagtcgggttctcccgatcttgagtctgctcccccagctgggtctactgcgacctctggtgcgtggcctgatctgaagaaataaggttcaaggggcttcggcccctttcttttggtgttaaggaatggatgtggtaaacaagagattgctcgtcacccagggcggggcgacgatagtaagaggccggatttatgaacaaactaaactcggatcacataagacccgattgaaagtcaaggcaccagatggtggttggcccacaaacgtgattgttcccgatggcctgatagaacgagggtttgcgacgtacagaggggcagagttcaaaatttattaaaatatttattgaaaaactttacttattcaataactggcgtatacttcaaattgtagtacgaacaaacaacaaactgaagagaaggaaatacatcatgggcatcgaaatcatcgttcaatcaaaatcaggcaaaacagtaatgtacggcactgaagaaggtcgctgcatcattaactacggcaccatcactggtgaagcgccagagaaaggcggtcgctatctggttgaatatggttcacgtgtcctgatggtgagcaaagtagatggccgtgaaattatgattccgcgtaaagaatactttgattctcgggttgaagccatgcaattcttcctgttccagcagcgccatgaacgctttgtagaagccaaagacgccgggctggacgatgcaactgccgaactgatcgccgaaggcaaaatgactcttgaagccgctctgggtgatatggacatggacgccgaagcgcactggattgaatactctgcgtatcagaacgaatgcgaagatgatccagaagatgacgggtttgacccagacctccacggcggtgaagacgacaatactccttctctggaaattctgatggcaggtggtcaggccgcttgggaatggcagaacgaaaagaatgcctggctggatagccgcctctaatatcaggtaaagcccctccgggggcttcctctcaaactttgaaacgaaggactatattatgacaatgcctaaaactgctgtgcgccttgcggtcgagcctctcttatcacaggctgaagacgccgctgtcatctcggcaaacaatattatcgccaaagtgatgacagatcttgaatcccatgggtgggacatcaacaaagctgctccctggccgtcttctgttgggatccgtttagggcatcccgattataataagatgaagtcaaagcatgctctatatcactccctgattcagcttgtgtcttcaacatatcaaccgggacaacctgagattgtcaaggcggatgaagaccgccaaaaacgtttcattgaagaagcccgccggaatgcggcgttgcaatatgagtctttcatctgtaaattagaagacaaaatcggtgggcatagcgctgctaccctagaaggttctcatgtctggggatattcaatactgacagtgacaaccccagagggaattcaacgctggaagacacagacgattgttaacgtctctgtcctgggcaaactcttcaaccaatatcctactcgtcgggtgaaataatgaaaaattttgcagaagaactccaaacaaccattgacgaatataacgcttgggcagcaaagaattttgttgagaaggcagtggatatttttgtccaagaggtaaaagaagacatgatatctcaggccaaacgtggtattcagattgatgacatggggattgtcgttggagggtatgactttgataaaatctattcagctttttatcaagtacaaagaaaagacgtatgtccaacagagaaacaacttaaaaagttcaaatcattattaagtgagaaaatgatgcaagatggcctaaaatttgaattccgtaaaagtaaaagaacggaattaattacgatggtgttcactgtctattcgaacgatatctaaaaagaaggggctttcgcccctttttcttattcccagaaatcatcgtcatcatcgacgtcagccaattcagtatccagatcttcatccgaatactccggcagtttaccattctgtttcaaatattcgatctcatcatcttcgagctgcaggtcggtggcgatataaagtgcatcgctttcttcgtcgtgctcaatgctgtacgacgtatattccatgccctgaacggtaatgatgatgctggtcggatcatcggggtcgacgtgtgcctcgaaaggaactccatcaatcggagcgtcttccaggaaagttgccagggcgatagcagcacgaacaacgtcggtgccttctacggacgcatagatctcttcggcgccagtttccccgcgctcaaaaaattctatggttgtgccgtcttgaacgccagtccagattggagcgtccagtattgactcagattcgaataaagtggagattgccatgtcagtgatcctcagtgtggattatggggtatttaggcttcccccgtccgcaccgcgataccagatttgtataacaccatctcaacaatcatcgtatcgtctagagaaacaacagagtcataacccatatccatcaaagcacgagcattttcatgaacagtacccggaggaatatctaattccctcatcttgtcttcccaaacggatacattattggaatgtaggaccagagttctccgaggattcaccctaaagacaagaacatgtggttcaccaaactggcgataacgagtagcattttccgcatactgaagagcgacttctggttttcctgtcagatagaaccccggccccattgtcccggcgtcagtctgtccaaacttcttaaagtcgaattcatcaaaaacaacattggatccatgatacaactccaaatttgtcatatctgggacggcatcatgataaaagaattccaaaaaggttttcataaaataccccacacggtttgtatggggtatttaggagggatcagttaccaccaggacagaacacgttcccgcagagaggaccaccatcattatctctgcgaccacaagtgctacagaaaccgccataattcggcttctgcttgagtggagaaacgtttttctgttgagggacgactttctttattttcattcaggtttaaactcattcacaggaacattttcagggataaccaactcaggacatgctgccttcatcggttctatatacggcttactaccaacgatccagaacagagagttctcgttcaacaactctggtttgtgttcttggatccacgtcattaccttgccttcatagcgaggatgaagttcgatgtcaccccattggtattccatcagatcgttgtaacgaacccaattggtggtgtgcaaatcccagtgatgaacattaaagcgcggagaaccagtccctctctccagttctttcgggtcgtaacgacctaacaggccaagcagtgaaacgctcttaggggaatgcggagcgtccttcttaccatacagataatccgggttgtcatgataatggcgagtgaagtccacaatgtgcggtaaattggcatattcaccaataatgcgcagacgactttcaatgaagtcaaggcgattaggaccgatgccgatcaggtacacatttttcagattcggtttcgggtgcatcgccaggcccgtcaagatactggtgcaagagttacatgaacctgccgggataatcagatcggtaatatgatccgggatgttggcaacttgctcgccaccgagcatatggaagccagcgatgcgctccggggaatgcaatttatggtccagagtgatcccatactccagataatacgcctttggattctgttgttcaatcagcttcttacagcgaggctgaatggtgctgttataaccagaaccgacgaaattgaagacgctaccgaaccatgccgacattgctaccatgtcatggttcatgcaagtggttggcttggttgcacccaggactgtagtcgtatgcccgccgaagtgccgagagactgccgtcgccataggggactgcggactaccaacgacagtaccatggatgatatcgggggagcctccggccttaatatgctcaaccatgagccagatagcctgacggagtttgctgccgttgataccctgttgtccgtttgcatagttggacagcggcgcgaagtaatcttcacgtttgaaccagacctgttggttggttacggggttggcaacgagttcacatggggtgtgtttatagagataatcttcccagtgcaccagatttcggtccagggatagggtgttgaatattgacttgttgtggtgttgggagatcacaccttcagtttgggtatcgttcattctatttctcctgtagacattggcatatcatagcgtatctacaggagtatagaaaaggagaatctcggttactttctgaagatatccaggaacttcagaatctgagacataaagcctccccgcttacgtccggctgaaatctttttagattcagaactgtcatgacgtaattgacgagacaaagaatcatcatctttgacgacacgagtttttggaggcacaggcggagctggcggcaccggaacttcacgactacgaaccatggtttcatagtcacgggcgatctcaatatatttccgacgctcagtgaagaaatcaactgccttcactttccggcggcgggcatgagaactttcttcgccatagtaatcgtaattgttacgaaccatccagttcactgcttgttcaaacgtattgaacaccagcatgggaatgccgtcgcctttctcaatacaatccagcgaagagtacccgacaatgacggtcatacctttctggaacaatttacacgggatgacgttaccgggagcattgcgatcgcgggggacgatatggtcttcgcggtgcacgaagttcggatataagaactcattgagagtccctttgtaacccttgtaagtgtacatacggacaaagggaggaacgtcggcgaccacgtcgttcagttcccagatagtaacattgcgcatcagtatttcctcagttcatattggacaataaattatagcgtgaatcggttatagattaacctatctgggattcagaattatacgcaaaaagaagcccggtatccttaccgggctttgttaaagacaacataaacgcagtttgctacacagattatagggagagtgcgccgggaatcgaacccagagtcatcagaacttagaaagctatgtgcatttcactgacggttctgtgatttattcttcctaaactccagattaagaaacaggggcatgcacaccttactgttcccgcaggaagtcgcacccataatttggaaggagcaccaggattcgaacctgagatcatgggatcaaagcccattgccttaccgcttggctatgctcctgcaatttggtgcccgttagaggagttgaacctcagcgccatggtgatcaacccacagcgtcttgcctcatccatttgataaccagttcagatcttgcaaaatctaagctgatcgtctacaaacagactgcttgaccgagcatatttggacgggcttctcacccgattgtgcatttgatctgccgtagcccaactccccgcgccgtaacgccgattggttaactggcaccagtgccttctggtgtgatcccttggaactttacaggcatcgcgcccgaccatttctggtagttgtggcatcgtttccgatgtagggttcccccatttttaacacagctggctgcaacgcttaccgtgtttgtatcagagtgtccggtgtagcctctccgtgaggtgcgcactactgtagcctctacactctgaatttgtatgatgccacaccacgtctggtttgttgaatccaggattcgaacctgggatacctgccttacaggcgagtcgctttgcctcagcgttattcaactggcatcaatttggtggatgctactttcgtcggtttcagattccgttcggctattggacgttgttccaaagaacttgtcggtcgcgtacttcgtgcttactcgctttcgtttcacacccattgtctggcgatggtggcaggactcgaacctgcgacatacgatttaacagaccgccgttctaccgactgaactacaccatcatcaatttggcggaagatacaggattcgaacctgtgcaacctttcggttgtacaccttagcagggtgctgcaataccgctctgccaatcttcctatttattcgcttctatggctcgaagttgcttttcagcgtcttctttggagtcatgggttcccaggactttcgtcttggtatgatcaagaacaacccaatgatcaccacgcttttcaacaaactcaacaatttctttgttgtcagtagccagaccatcccactcagtaagaaactcaccgaacgttttcatcatactcaccaattgcttattgaacaactggtttatttaggtgctcccgaggcggtatttaaatcccgcgatcccatctcgcctgccgtagaccagagcatgttggcagtccaacaatatttggcggggtctgaggcttttcacctcacctgctggattggcctccagctgttctctctggggactcgctgtccggacagctatcccttaaactatcgccccttaatatggtggtcctggttgggtttgaaccaacgaccaatgaattatgagttcactgctcttaccactgagctacaggaccttctgattctttaaattgtctagtacatgtggattagatttcaacatcttcttcatgttgtcctctttactcaacaactgcaaattccacagagcgcaattgtacttatcttcattaatatggtctatttcaaacccttcaggaacaggcccattaaacgctacccaaacaaaccattgtaaatattttctgagatattctcccatatattctactttgatttgcaaatatccagtcccgttatccaccccgaccagatacttttcaggaagtttttgttcatattccctaaactgatttttacggcgtatgaccaattctggctttttaatttttccatagttgctaacaaaaatgttaataccaagtttgtctaaatacaactctttccaaatctcttccatactgaccaacgcctcacaatttatgtgtgcccaaccaagggctgctagaccttttatcccgtttgcgcatgatcagttcatgcgagtcttatcaagcaccttacggcaactcttctggatgtcatcgccctgctgccaggctcatcccaggagtttatttttccagggctttccacttacaagtcttaaccagaccgggatacgggcttgtaagatcgggttggacacaactttgaggacactgacgacgtctactagtcacccataactgatattcggatgccagtatcctcaaagttgcaaccaatgtcgcaactcgcacctaagtgaaagtcaggcacttgtctattcgctagaccaggctgtttggtgtcgggtgcctcccgatgaccttaccacggaaaataaggccgggtgtgatgaaaccatcagactcaaggagatgagactattccgttccctcttgcgcttagcagaattcaccaaacatagcagcatctatacagaagcaacttgtcctctaacgctcggaccaaacgaggctggctggttgattcagagccgctggttgctccagcaagcatgggttgatagcccggcaacatagaatcacccaaagatgaagaacactcagtggtacaagccagggataccaattttcaggtccttcgcgagttctttaatgctcttcattttgtgaacttgagaatactacgcctgtctcaggtttccccttagttcggcctcccagtcctcgccgcgccgggtagctaaccctgatggctcgtctgctactgagttcttcttggtgcccaccagtgtccggaatgtgtaggcatcgcaatctgcaaggcatggtctttttcacccaatgctctctcaagttcacaaatcgaagtgccctgactcaacagttgtggcccaacatattgttatcgtctaccgggctggccgtccactttgtagatcaacctttgggtttaagataaattgtcagggcacttcgatttgggtgcccttcacctgccagggatcagggctgatagcaagacttcgctcacatctttcaagatactcgttagaataccttcaaagatgcggaggtcggacccaaatttaacaatccattcaactgataacttcaggggaccactctcatttccccacatttcgaccgcccgggacagtttagtggtacgtcacttggtctgttacacggtaggagccgattctccctcgaattacctcttgtttgtatgcctacaaacaatttcacagattgctgacaagttatcatgtgaatgaattgtcattttgtggtgaccggtgctgatctccggcgttcagtcaagctgtttgaccgagcaatttataatccatgctgtatggatagcgcatcagcctgcgcattcaccacaactaagagagtattggtcgcccggatggtattcgcgtctaccggttttcaccttgttcaatactctcttagttgtgtgcccattattaatcacaccgggccagtgcgccgaatttggtgatgagtaatcggaagacctcactggtgtatggctattaagctactgccaggaacgtattatcgtttgcatttatctttgtggtcagtttctaaaaacccgcaaagtcgcgcacaacgagaacgaaaacctgtttgagcacaagacgccatgtcctgggttcacatcgaagtgtttgtctaatgcccaaacagcttttcgttcagtgggttaactatactttgttaacccttattgacaaaactttttattttgttggcgaggatgtggaatcgaaccacatttgcgggagctaccccggcgtcaacctatgcaccacctcgccatcgatatgccggaacttacgcatccggcctcgtcctgttggcgctcctagaatccgggaagacagtaggaacaattatgttaccaacaggaaacctttgtgttgccctttgacgcaacattatgaaccctcgttagaagactcataatgttgtcggtgtgatgaggattaccagccctcgaccttcccatcatgcggtgtcgactcgccgccgggttgctctcgttcctctcctgtagatcgatccctgcatgaacgcataggcaaccaacagtggtaactttctgagctaatcacactttcaacagggagtttcgttctccgacggttggtgcgtccaccaacaccagcagggttactgcgctgcctctattcacacaagcccctgagactaggggttaactggtttcgggttcaagcctactcccactgtgttgtttcccttgaaattttatgatactgcaacacggctaatttgaaaagtcctctcctcttgagcaacaggacctgaaatcctgcggcgaacctctgctcaaaacccggtgcgctatcgaaggcgctttaccagagtaaacatcgggtgttcccaggagagtgaaggccatcccgatgatgaggataaggagtaacgctatgattgtcatactgttccctcccttccatgcaacttactttactgtaattctgtattgaataaagcgttattttaccacagaaaacttcacaaccttctctaggataaacacatattcctgagcagctgcattcgacatataatgcgtagacggaatagaatgtgaattcgttgtttcgcccagattaacacggtcacaccagccattgatggcattaccgtagaagccgatgatcgcaacgaagtagatgcgctggctttctggttccagaacatagttgatcgtgaacgcagtgtccgtgcggacggcttccagtttgatcccaatacgacattccggcatgttgggacgaacatataaatgacggaagcggtcgcggcgggcggtggaagattgttccagttcgttgcggaactcactcgtgacgtcgatgttaaatgaaaaggtgttgtgtttcatatcggaacgagcaagggaaaccgcattgtcgataacgcgacggaaatttacccctttatttgtcaggagtttaacttcctcagcaattgtcgtcaaagaaattttggtggcttgttgtccttcatatttttctaataaaggaatgatgtgtttcataactgcggtgttaatgtgcataataagatcctcttgtagaattgaaataaacgccatcattataatagaacgaatgttattgaatattggtctctaaattacaggagtgttttattaataggcagaaactacttttctaacacatctctagactgtatgctaacgctgtgcccttcgagttgtgagtgtcaacgaacaacgagaagcagcctccctggctgtggaagggtgccagcccgcacagggcggtcttacgagcgaagcgagttgattaatatatttgataataacgcgcgcgagaacaaattcctttctctgtcttcaacagctaaatatctccaacaccatattcaaacttgtgtgacggagatcaacatggctacacaaacagttccttcactcgacgtcagggctttcgaatacattatcaaacagcgtatgaaagctgatccgaccttcaaggattatgactttgaaggatctggtcttagcgctatcatccgtctgctcgcctctgacgcgaatgctatcggctttatgcaaaacatgctgaacggagaaagtcacctccaatcagcccaacaacgttctaatgttggcttgtcatctgcattcttgtcgtacacccctgagaactatcaggcggcgtacatgtatgcaaatgttaaagtcaccccctacgatgcgaccacagcaccaagcgaaatcatcatggatcgcaaggttatgtttgttggggccaaagatgggaagtcttacaacttcaccgttgaaaaacctgtgtccacaaccctgcgaccagaaggatattatctttttgagaatgtaaaactcattcagggtgattggctttacaaaacgtatgatgttgaaggtagcgcgatcagtacatacaagatcccatctactaatgtagatatcaaccatctggttgtcaacgtgcaggaatctgagacttctgatgtttcttacacgtttgatcgttacaacagtccgtttgatctgaatcaatacgctcgtctttatttcgtagaattgggccttgatggcttctacacttttgaattcggggatggttatatttgtcgtcgcgttgaagatgggaacgtcgtgttcttacagtatctggagacttccggcgcggatggcaacgatatcacttctgtttcatcggcgactgcgattgctgggaacaacctggtggatatcgaactcgtatctgagagaagtgtgggtggttctgacccagagtccattgaggacaccaagcgtctcgctcctctgagctatcaggcggacggcgcagcagtggctgaaacagattatgcctacctgacagagaaactcttctcgaacgttctacgcgctaaaggctatggtggtgatacccttaacccgccagaccctggttacgtctacatagcagtaatcccaaccgtgggggaaacactttctgacgcggagaaagctgacattgtgtctacccttgacaaatataatgtcggttctataaccccgaaggtcgtggatgctgaggtcacgtatatccaggttaacaccacgatattctgggaccctactgccacagcttatgctgaagacggtctgaaaactctcgtcaaaaaaggtgtcgtgacttggggaaccaacaatcttgacaattttgatgagttgtttgacaaagaagtgttgcaaaccgccataactgatatggagcgttccatcgtttccaatatcacttccgtcgcatacaagcgtcacttcaaaccggaatatggtgtcctcgacagcttcactttcaatttcgggcgatccatcaaatctggttcggttgttatcaatggattcaagccacttcctgctgaagttgacttcacttattacatccgggatgtaaatggtgttctcaatatgtacaaagtcagcacttctgatacgacgaaggaatatctggtgcaggctgttggtgtcgttgattacgcaaacggcgtcgttgaactccagcagatcacggtatccaattatgatgaaggcggcgcggctgttgtcgtatcccctgatggtttaaaccagaatattcaggttacatctaaccaggttcttcgtattggtgatgtggccgtagacgcggaggtccgctatgtccaaagatcttaataacggacatctgggcgtcaaatatgagacgccgttgttctaccagaacgatttccctctgttcatcgagttcatggatacgttcttcaattggctatatcgccaaaacggtttcactgaagaagaaatccttgcatatctggcggacaccagttggctgaacccggctagtgacgccagtccgctcatgcagctggtagacctcaagatacagaagacgccgggtactgctgcgcgggatatgcttcttgacaaatatttggtcaggacatttgagcaaatgatggcccttgatacagaagagttgttggattctgatgggcgtccgctcttttcccctgaggacaagaactcgagcattgatgcctggtataaagaatttgggtttcagcgcacagttgataaatcttttcctgaatttgggttctttgttccagaaggttctggtggtcttgttacggctgacggtaatcagttctccgtttacatcgaggggacgcgccgccgaacgctggatcatacccgttggctgaaattgttgaagcatatctataaaatacggggtacgcagaaagcgatagaattgttcttttggatttatttcggtgttcctgttactgtgtattatccaaaagaagatttggctggtctggatgctaactttgattgtgatggtgaagttggtcttcgtgatgattactattatgacgaatacacatatgtcataagaatacctggcgatgtagcagattttgaaggtgtattcgagcgcgtgttccgccaacacttccatccatctggtttcaaagtattcctcgaaagcactaggagttaagaaaatggctgattatctgagcaaatatacaggccagcagatagataatattctagatgcggtcgatggaaaattaaacaaaactgatgtcgtaaatgatatcacggtagatgacgatctgtccccggcgtcagcacatcttacgttcgtcttgaaatctgctattgatacaatgaacgatgttttgagcaacaaagtcgttcgaaccgatggacaagaacaaacgataaacgggaaaaagtcgtttgcatcagtgctgaatgcaaacggtggcatcttagttccgactcaacgttccataacgatcacggatgaacctgcggccaacacagatgcggtgaatctcagcatgttgaaaaaacacgggctgagcactgttgactccgttggtacggggtcgggtcttaaaatttcattgcttttgaacggatacaacaaattggaagttgatctttctaatcttgttgtaaggactgactcggcacttcctcagtctctggccgtgtactcgccaacgggtgggtctcaaatatggtctatgacaagtctgttcaacagcgtattcgcggacactcgtttcaacgattacgtgaaggttgcggattatgattcagatatgctgaacattgaaacgcaattcactagcgtcaacaaccgcataaatctgaaactggatacatccacttatacggcgaaaatgaccagtctggattctcagatagcgaatttacaatctgggaaagtggacaatacgacgtatacggcgaaaatgacgagccttgacagccaaatcagtggtctgtctacgaataaggtggataaatccacgtatgacaccaaaatggctagtttagacggtcaaatcagtgatctgtcttcaaacaaagtcgacgtgtcgacgtatactactgatatgaacgccgtgaatttggcactggcgggttcggtaaaattggccaaaaccaacaccaccagtacttctgtcccggcatctggtagcgcttcattgccagatttcactttggtgaatctgtgtcaaattttgattacggccaaatggggcacattggttgatacgttcttggttacaatgacgtatgacggtactcttcaggcgacatctttgacacaaaaaagtacggcagggactttgtcattcgcaggttctgttgtttcaggtaaactgcgtctgacaatgaccaacgctaatacaacaaccgcagcatctgttgattactcacttcgtgcttctttctaaatcttaaactaaatacccctagacgattacatgtgctaggggtattttcaaatggctaataaacccacgaaaccaaattttccgcttgggcttgaatcacaagaacaatccgtatttcaagaaggtattctgaataatggtgttgtagaacatggcccagatgcggtaatgactgtgccagaaacccctgatgcttctggggttccttctgctgtccgttacaacgaagacgacgatcaattcgaaggctattacaacgaaggcggctggttgccgcttggtgggggcaacggtgggcgctgggaactccttccgcatgccccttcatccttattacagattggccgtgcatatctggtggataacatcgacggtgcctctacggtggttttccctccccctaaacgggttggtgatagcatcactgtgtgtgacctttttggtaaattctcaacttatcctctgactgtcgacggcaacggtaaatcgatctatggctctgcggatagcatgacgatttctaccgataatgtcagtgcaactttcacatggactggtgaagcccgtggctgggttatcacatcgggtgtcggtctgggccaaggccgagtttacagccgcgaaatctatagccaaatcctgtcagcgacgacaccatctattaccctgagcacccaaccatctattgtagatgtgtatgttgacggaaaacgtttgaaagaatccttgtatactctcgacgggtatgaagtcaaattcgatccggcgttggcctctggttctgatgtgcagattattcagtatatcccaattcagcttggcgcgggcggcgggggttctggtggtactgtaatcacctgggaatacaacggtggttcagccatcggcggtgagacgcagatcgtattggacgtggtcgttgactcagtatctgagatctacatccgtggttctcgtcaacagatagggcgcgggttcacatttgatcctgccaccagtacgattactctggcggatgaactggaagccggggatgatgttgtcgtcgttattaatggcgacccaacggtttacaatcaaatcgatcgttcaccacaagaagtggcacgggccaataacgtcaaaaactctgaagttattctcagcactgaaacgaatacaattttagatggcaagaatattgtttatgacgtggtagctcaaactagttggagaatcccgacaggaataccagcgggtgcgaaaataaaccgtgttatcgggaatattttggtgtatacgccaggtaacgtcagcgtaacactgatagaaatcccttcggcttattctctaaaatctcaattaggttctgattacggatcttttttgctcaatgccaaaagaaaacctttgggtgaagctgtacttgcagtatctactgcaggcttgttatacagttcttcctgggttagtattatggaatatgcccatctggttaccaatcgcccagatccaaatgaccaaaccacttggatttgggacccagcagtacaagcatatttcgacgatactgttactttgattaatcaaacccctgtcaactccggtatgaaagctaaattcccgctggtgctaccgccaggggtattcaaaattgaaaatagttatttgctggaacggataggggctagtgcggggagtctcgccaccatctttatgatcgttggttcaggggtgacgtcgactattatccaaccgatgacagaagggcagacggcatttaccgcgcaggactgtaaaatcaacttcagggacatcggattccgttctggtgctgattatcagacatgtttggtgttgggaaacaaaactaactggaaaccagttttccattgtaacatgactcgcgtgggtgcgtctggattcggtcgggggttggtgatttacctcgcattcgattcaacctttgaggatatatttatacagaatatatctaaaatggatgttgcaggcactcaagtttcctatggtataaccatagaaaaatatgaggggccagctaatggcgggactactggtgatgggaccggtgatgattccaaccaattggtgtttattcgtcctactgttgaaactgcgaaagcagacaattctatattgtttaacgtagcggggcgttcaacttcattaccccaccatgctattaacttgtttggtgggcatttcgaaacgcataacttaaaagctaagttgctgaatcttgcatttggctataatgtcaacatgttcggtacagttttttcacaaaacggaccaactatcgattcagataataacccgataacaacggtttatcggggagtttacatcgagaactcgcagaacgtcaatatgttcggttgccggattggcacgactaacaggctggcatccgttggtgtttctgataccaagtttatcaaaatcacgggtacatcacaaaacgtgaatttggttaacacccatttgattgggccttacaatgatatatcttctgaacgtcataatattgacaatatcatagattattcagaagccaccaaagggttaaaatcgtttacagtacagggtgtcaccgccggggattataccagccgcccaataaccaaagatataagaatcagtagtatagacgggaagaaagaatattctttctatactgataactctgggattttacatttatcgtattcaacaaatatagcggattcaagtactcccacagatttaatgacgatggatacgagcggtaatatcctgaccgcagcggacttgactttaggtgcgttggcaggaactgcggctacaagaagattgtcgggtaatggcggctatatcgcctttgatacaattggtcgtgtgtatttcaacgctgtaagcaactcccaacaatgggtcatgggttcagcagcatttaacccgacgaccgataacgtattcactctgggacaatcagggtttaggatatctgccagttttgttgtaaaacgtcaatatactgcgacagtatacgattccgctggtaatggtagcccggaaggggtcgtaaccgctgggattgggtcgacttatcgtcggttagacggagcggcaggtacttgtttctatgtaaaagaatctggaaccggtaataccggttgggtggcgaaataatgaaaatgaaagttattcgggatagttctggtaaagttatcaatattggtgattgggattatatggaagagccagttgaagatccaatcactggtgaaatccatgttgtttctcataatcctattccagaagggtcaactgaaggtgaggaagaagtttcacaatctgaagacggtggtttatacgtgatgtaatatttcaactaaataccccatattggtaacgccttatggggtatttcaaatggccagaaacatagaagaaatcttcggtggggtagtcgttgcaccacaccaaatcccgttcacatacacttcaaccaacggcggggaaactttcatttctctgccgttttatcctatcacagggttcgttactatcaatggtggcgtgcaggtcccgcttgataattttgtaattgacgggaatacattgaaccttggtcgtgaattagaaccaagtgatgttgtattctgtttgttcgataaaataatgtctccacaggatgcgagcaacaatgcaatccgaatttataaattcatctcagtaggtggagaaactggatttactccagattttaccacttatggcgtccaatccctttatgtcaacgggaaataccaaattgcgggcgaagattacacatattccaaaacggatgggaaagtgtctttcacttccccattaattgctggggtatgggtcgctgctgagatgaatatcaagcaaaacatccctgctttagctggtaatgggggtgcatcagaaattggaacagcatctgggcaaaatgtacaagtagaacttgattcattccgtaatttgttcggagaatacgggtttagtatggtagggcagaccacataccaaggcctcaggaattaccatggtaattccaattatatgatggtatatggtagggcataccttttggacggagggcacggaatattcgaccaggttcccggcggggcggcgatgactatccctgatgatgattgtgtacacatccgagatacgttgggacggttgtggcgccgcagattcgaagacaatgttataagaatgagttgggcgggcgcaaaaaaccaattagaaacttcttcaccgcaagatgatgctttcagaaattgcctccttgcggcgaaatcgctgtctcctaccggttatccacaatcaattatcaaaggtttagatcgtggtgtggtttatcttgcagagcggcattatattcgttgtggtaattttcctgaatatatggcatggaagttgccccctactggcggtggtgaccgttttggactggatctgttgtgtgcattaggtgaaggcgcagggttttttatcgtccaagccaataatccattgttgcgcgtccgagtagacaacactggcattccatttaatgtttcgaattacactgatgcccaactcgtgagtatagttgagaacaattatattttacgtctggaatcaatggtaaatgccccagaatttgatgttcatccaggtaattatcccgggacagttttgtatagcacaggcaaaaaagattattcagcagttactgctcaatggcctgatttagttcaagttttaccttctatacagaacgtcggaagtgcggtgttcaacataaaaaattgcggtcgagattttatgctgacaaacaccggggctgggttagggcattttcattctgtttggtcacaaaataacagactccccggttacatatcgaactgctatgatttaacgatgacatatgaagattatgtaccgcacaatgaaacatctggtgggttgatatttagtgaatgtggtactctttcattagaaaatattttgattggtgcaggtgggataggacatttgtgtatatgggattgccgtaacgtccatatgaaccgtcatatttctatatgtggtaataccacttgggctgcatctaaccaagtagatgatctttatgctttagaaatttgtaactctgaagttcatatgagcggtgtacatgcccaaaactctggtaaatttgctcgggttgggtttaactcacaattaactgtggaccatcttactgcatgggatgtttcaaaattattcttgatgactaatgatttgactaaattgaaatatcgtggccagcgcaaggacgttacaggagatccgagtcgtatttttgtaacttcaggattcgctcaaaaccttaatgcgtctcaatttggttgggcctgcacgccagttatagaaatagacagtactgttaatggcgatttcaaattatattggaactgttggacaaacaacgttcacgcgggatatgggtctgaatctgaagcaaatcttgctatcgtcagtgtggcttctacaagttctactggtacggtatcattcggcgaggacgctaaattggaaggtaatacgacgaactatgttcttcgtctcgcgaacaaaaaccaattagggaaagttcgcactcgtcaaacttccttctgtcgtgtgcgttataccaatgacaactctcagtcgtcctttgccatgcgcgaagctgctcacgacaatggtactactgtgattcctattgatgggacgacatatagctatccgtaccgcagacctgctaaatatttcgtatctttgaacgtccctgctggaggtggttcctgttcagtgacattaaatggtatgacgattttccaaactacggtggttggcacacatggtatagttattgagatgaaataccaagaaacggtcgtatttacgtcatccaacgttactgtatcaaatgcgcagtggcgttatattttggaggaataagaatgattaaagctatcaaagggaatttctctgctgtaacttcagtaggagaaatttcataccaatacgccactgttcagactttccgtggagatattgggagtgtgactatagatgtatttctgtctgatcgctggattatccaacgggacggaatcaatgtggtagatgacactgcgcccggagttttcaaatctgtgcagtttacaccggattggcagagtaatttgaatatcatagatcaagcatatgaatatttgaaaacccttccagagttttcaaattctaccgaagttgtatagaaagataagggggtataacccccttatcttatttttctatttggacaacaattccattttctttcagaactgattccaattgatcaatgtgtgctttcagatttgaataaacagcgatcgcgattaaaacttcttcgcttaattcaacaggtgagtggagttcatttatgttaaaatttccacccgacgccaccactttaccatcttcaccaaatgtgtagacgcacgcatctggtttggttttcttaacttttattaatatttcttgtttactcatgatattatacccagctgtttgagattgaacacaaacatcatacctgaaactgttcgtctggaataatacactaaatacaagaatcaagtcacagaaaaacaacaggagattcatcatgaatccgcaatttagtcaggccggtggttccgtctctaaagacgtgaacaaacaatctatcgcacgtgtatacggcgttaaaatgagcgaagtggcttatttgaaagccgggttagtattgaatggttacaaggtgttgtttgataaaacaacccaaacttgttggtatcgcggggacgctacaggtacagtagttacttggtctgtgctgggaactcaaatgaccttagtgactagttctgggacatccatattgcaaataacttcaccatcagatgatttacgcaaagatcttaaaaatggtgtagatattacaaatataaaaaactcaaaaggcccttctatacttagatcattaacagacagatttcaagatgtatataatgttaaagactatggtgttgttggcgatggtattgttaatgacagcgtggcagcgcaaaatcttattgattatatcagttcaattggcggtggatgtttatattggccgaagggtatttataagttaaacataatcaacaaatccaatgtaagccatgtaggttgtacatttggatctgttagagggatcatatcatttggggccacaataaccaaatatgctactcaattcacaccagcagctccaggatggattgtggatacacccacgaacggtggggattgcgggggaattattggtatagatttcaaaggcggtgggttaaccataccgggaggtggtgttaacctccgtccaggttcaaatgattggattatatcttcttgtaaatgggattatttctctgatgaagctctagttacgaacggtttaataggaagattttctgatttgtcgggaacgaattgtcttcttaataggacccgtactagtaggaccggagtttttgtatttaatggcgcggataattttatagaacgtattcaaggtaatacgggaataacggctatccaatcttctaacctgtatttatgtggtatcgttataggtggggcaaataattatgctataaatcttgaaggggaactttctgaaattgggattgttgtgagtgcgacaggcgctatgcataaacttagcaactgtcgtgctgatttgaattttgggcatggattttatggttcggcgattatgagcaattgtcatgcgctaaacaattccaaaactggaactggtgggtatgttggtagtggagaatatagcgggtttgttcttgataaccgttcacaaatcagcaattgtcgagcagacgggacccacaagtacggtatagattggatctcttctgcagaccaatccgggatagatttaaaaccgagagtatcagctttccattctaccggacatacgatagcatctatatcagatggattgtttaatgggttcttacattcattgtttaatggcttccagcgcgggacaggaagtaccccaaacgtcgaaggattgtgtacatacatccctatagatacgacagcgactgatatcaccgatttattgaatggagtgaaaggccagcgtgtggttatatatggtaattccaatataactttagttcgtagttctacgttcgtagtgaaaggttgcacatcagatggcagaaaacaatgccgtcttgggggaacttacgaattttggagaggaaatggtatatggtatgaagttggagcacaaacccctgccataggacctagttcgttgagaccaacttcattttcttcgccgggggatcaatattttgatacaacattaaacaaaccgatatggaaaaattcagccaatactggttgggttgatgcgactggtgctgtagtataaacaaagccccttcgggggcttttcttttgaacaagctaaatagaaggatacactgttgtaaaccaatatgaggggaaacccatgaaaagtcagtttaatcaaccccaagggtcgactgctatagaagtaaatcgtcaaactttagcaagaatttggggatatccgattagatccacaatttatttgaacacatacatcaacgttacagggtcctctattatttttgaaccagagaccgggactatgtggtatacgggcaccgcacaaggaactccaatatcctgggtcgtaaattctaaatcgttgacacttaacacaaaccaaggtgtatttacttgttggcctgccattgctttatctcgagatattacatcagaaactcaatctatccgatctttcacagaacgagcagatgatattccttctattttagattgggattctgatagtgctaccgatgatagcaccagaataattcgtgctatagcagatggtatccgtactctctatgttccatcgaccagaacatttaatattggtgaaatcgatataacgactaatatgttaatttatggaaacggtatcagtggttatagacaagttggaggtaagtttgttgttgcggccgatgctgaatatggattcgcttttacgggttccggtaatggtggttccggtggtggtaccagggttatcggcggtggcctttctggattgagtattatcggcgcaaactcagcatgcgcagctgatatgattcgtgtcagccatgcctctagccatgaattcaggaacgtcgggttcaggttgactcagggtagtgcgtttacattagaagattttatggaaagccgaattgaggcttgctatatgaataatatcggggctgacaataaacctgtaatctatattaaagattacgtggatgctttaccttggaacgtcaataatttacatatccgtgaaaatacttttgggtcttgtagcggtaactggattcatatgtcagaccgatccaatgccgacttgatctggattcatgggaataaatttgagtgggattccactccgattagtccaaacacttcagcaaaatccgttatctatgccggtttagtcgaaaggatttctataaaagataatggatttgtgtatttctatcctgaccacaacatgtatgatacgattttagaactaggagcaaatgccaactatggggtcactttctcggataatatggcatggggttgcactaacgccaattattggaaaacggcaggcggtgctcttgcgggacacaataaccgtagcaacgcccctatggcgacggtaaacacaagttcttattctcaagatatagaagatccaataataaggaccagcacagggaacaaaccgacgtcgtatgctgctaagaagaatgacgtcgagttcatctctgttcacaaacttactggtgcaaatgatagcaataactttgtggccgatacggacgcggtgatgtacgggacttgtatgaacaccccagcatcttctgaatttcgtagggctttcatcccaaaagatatgctggcatccggtcggatgataaaagtttccctccggtgtaaaaatgtcaactcttcagatggacaacttcagttgttactgaacggaaatgctatcactgattcagtttcgggtcaatctacaggtttgaattatattacgatacctgctaattctggatggaaagaatattcatggtatttgaatgcttctcagttggcttctggtggcgcgttgatttttagaaacaatagttcggtcagatttctttttgatggagtaaggatagaatacgctcgttcggttagtattacaatcccctggtcagcaacttcgatgcctgcgaatactgtttccagtacaactttagctatggggagtagattggtgtcacatataaagggtgtcacttctgtttctgccaacggatcattgggtggtgcggtttcttcggcttatttgagggcaagtgataatactttagtggttcaattaatgactgcagcttcatccgctacggtggctgctacccgtttaacattatctttaatcctggagtaactcatgtatactatgaatgtcatctataaagggataaatgtggtagacgcaaatatttctataggtatcgttactataaatgcagaccataaatctatggtttataatgttttatttcgggcttcagatgatcaatcattagagccgttcgactctatatttctaactgcagattatgattcaagtggaccggatccgattacacaggcatatgataacttgaaaagtctagaaaaattctccactatgacagaaatcaaataagccccttcgggggctttattcttcatacgatgggttgtgtggtatactaaataatttcaagacaaaactctatagatggagtacaaaatgcaacaattgaatcttaaccgccgcccttattgggacgactggaatccagagaagcgtttcagccgcatcctgttccgcccgaatccaatcaaagtacagactcgtgagctgaaccagctgcagacaatcatgcaggaccagattgagaagattggtaatcatcttttcaaagatggctccatggtaatcccaggcggtttgactattaccaattcggctgtatccatgaagttccagctggcgggtgggagcgaattcaccgatcttgaaggaattcaagaactgtatgtgatcggcaaggataacaatgccaaggccagggtgctgtctctggagcgctacaccagcgaaccggacatgatgttctgtatcctggaaatgacagaatccggtactgccgatggattcagtcctaacgataatctgtacttcaacacttacgatgtgaatgataatttcatccgcatcggttatggcgttgctcagactgtcggcggttctattgttgctcgcatgaccaagggcgtttactttgttcgtggatttttcctcgacgtcgacgatgatatgttggtcgttaacaagtacgcaaacaacaccagccatcgcgtcgggttcaaagtcacggaagaaatcgttactgaagagcaagacagtagcctgttctctaatgcacagggtacaccaaacacgaaagcgccgggcgctcatcgcctgcgcctagatctgagtcttcaggcgttcgattatgacgcggaagttgaagacttcgttgaactggcaaagatcaaagacggtaaaatccagtccatggtcacgcagtcgacgtacaatatcatcgaagacactatggcccagcgcacttatgaacaagctggtgactataatgtgtctacccaccagatcgatcttcgtgaacacctgaaagaaaacaacaacggcggtgtctatactctggccgaaggcggtgatgaaagcaaactggttgcggtaatgaagccagggatttcttatgtccgtggtcgtcgtattgagaatgttggtgaagaactcgtcataatcgataaggcgcgtgataccgacctgttgaacaacacgccagttgctgtagcgacaggtaatttcctgacgaccaagaactctaaaggtgttccggttatcagccgcagcattcgctataaattgctgaacgcttctggtgttacccaagcgactgccctgtgtatctccgctgaccggaccgggacggaattccgtctgtatatgcgtgacctggtcgtcactggtgatatgagcacggtcaccaaagttgcttatgaagaaagcgggaccacgatgttttcagccgcgctggaaacaaaccagttctcacaaagttcatctatggacctcatatttgaactgcctgtatttggcgtgaaaactctggcaccgaccgggacgattgatatcaactacaccgtcttgcgatcttacaaaattacgctggacgcatcaggtaatggttctatctccgcgccgctgggatacagcttttctccggaattttctctgtattccggggctaaatctgatgggactgccgctcagatcgatatctccagtagcctgtctctgaccggaacaccagttgggtcggctcttcagatttccctgggttctggtaatgccctgcaatcgatcaacctgttggcgctgatggtacgcaccactgctatcatgaaaacgaaaaccgtcacgactgcgactgagactgtgaccttcaccaaccaggccagcatccagcttgcgaaccatgacggctacaaattgacttctgtcaaaaatgccaatggcgctgacgtgacctctaacttcactctggatggcgggcagcgtgatgcagcgtattacaagtccagtctgatatcggctactggagccatttcaggtgcgtatacggtggaatacacgtatttcgctcacagtactggtgacttctttacagctgattcgtatacttcgattgattacaaatcaatcccgagttatacgtcaagcacgtctggtacagtgtatggcctggctgacagtattgacttccgtcctaaaatcaccaacggggcgtctgatactgatatggtgcggccgaatacggctatcatcatggacgttgaatattatctgcctcggattgatgctgtgtacctggcagacaacggcgttttcaacgttgctcgtggtatcagttcgaacaacctggcggctccggctatcccggcaaacgccatgcgtttatacgaactgttgattcctccgtatactccggatattgacgatattcagatccgtactatcgacaaccgccgctacacgatgcgggacatcggtaagctggacacccgtatatcgaacgtcgagtactacacgacgctgtctcagctggaatcttcggctatgacccagcaagtgttcgatccggtaacaggcaacccacgctacaaaaatggtatcgccgccgacccgttcaaagacttccgtctgatcgacgatttgtcttccgactggatgggttctgtagatactgataatggtcgtctgcgcccgtttgtacaacaaaacgcgattgatctggttccagatggttggaacaaggttatggacggcatggttgtgtgtcaatacactccggaaatttctgtcaatcaggaatatgcgacgacgacgatcaacgtcaacccgtatgctgtgttcaactggacgggtttcctcaaactcaatccgacgacagattactggtttgaaaactactatgttgcgcctcgtgttatcaacgagacgatcaatacccgtggtgccgttcaagaaggtacggtttacggtacatggcggacagtttctgtttctgagcgggtatgggaaccgcatggcgcgggcggcgtttggtggggttatcgttatcggaccactgtgtctacgcgcgacgtttcgacttacacatacacggatactaccaccacttcactttctggtgaacagattgttgagacgcaggttattccgtacatgcgttcgatcgaaatcaactttgacgccagcggcttgcgtccgtttactcggatgtatgccttcttctccggtcgggacgtgaacctgtattgcaaaccgaacggcggggcatacggcgcagcgctgacaacagatgccaacggtaatttgaaaggtgtgttcaaagttccacagaataacaccattaagttcaatactggcgacaacgtcttccgtcttactgatagtccagtggatagtaagtctgctgatgatactttgacgaatgccgagattgttcataaatcattcggtaagaaacaaggtatccagaagacttatgttaacactcgtgttctgggttacactgtatcaactaaatctgaaacgacttcgtctgaagccgttgttggtcagtggcgagatcctatcgcacagtcattcatggtcgcaaccagcattggtggtgaatatgttgaaggcgtggaagtgttcttctcaaccaagtctcgagatgtgccagtaactctggaaatccgtgagatgagcaatggcctcccagcgagcacggtcatcacccggaaaactttgaatccatctgacgtcaaagtatcgaacgattcatccctcgggacgaaattcactttcgattatccggtgtatctgcaggcaggcacagagtttgctatcgtcctgctggcaaacacccaggattacaatgcttacatcgcagagatgggcaaaaagaacttgctgtcgaatgaatatatcgccaaacagccttatactggtgtattcttcacttcttcaaacggttcaacctggtctccaaaccaaatggcggatatgaaattccgtgtgtatcgttgtaattttgctgccgctgataacgtggtgacatttaccccgaacgccgggcctaaaattcgtcctctgggtctgaacgtcctgaactgcgtcaatggttctactgttgtgactgtttacgctcctggccatggtctggttgcgggtaactccgtgacgttgtcagaactgacaggcggctgcggctttacagcagagcaactgaataaagtccataccgtcacggatgcgagctatacttcattcaagattgacgttggagcagctgcggacagcgatggccagattggtggtgaagatggttctttcctgggcaattacctggtggatatgttctatgccagcgtaacgaactctgccctggaaggttctatattgaaactggaataccgttatcgtgattctacgtccaattctatgtctgattgggctgagtttgaatctgatactgatgttcctctgccgacagaagggatttatcgtcaggccggggacttccaggtaagagccaccatgactcgcagcgcgagcaatgcgtacacggcaccaatgattgatggtgatgacttaaccgtggttctcaactcgcatggcgtagatcctttcgaggacgttttccgctatgtgaccaaggacgtaagttttgacaacccgtgtacaactttgaaaatgtacttcggtgcaatgttgccttctcagtcaaccatgactgtacaggtcaaacttctgcgcccagggcaagaaatggattcgatcgaatgggaaacggttacaccgaattctcctctggtcaacgatggttccgcattctttgaatacgaatacgataagaccgtcgacagcagtaacccattctctgccttgaaagttcgagcattgattcgcggaagccggatagccccaccttcctgcaaagatttccgcttgatcgctctggcataaataaaattgaaatggcgggggattccccgccctattgaagaggatatgtgtatgcgtggaatgaaagtacaggggcacgcatcaatggtacgcagtagctcttgccccggagcaattatctgcacggatcatgtggctggtatggctgcacttcgatcccggcaaatcaatgagcagcgggaagccgttattgcacaacaggcctctcagatcgatcaattagaagcgaccgtgaagttgatggcggaaaaactcgggattacaatcccggacgggggcgaaaatgacaacgcagaataacagcgtgtttaatgttaaggaaatcttgactgccgccgtcgcatctctgttagtctcttctgcgacattcgtatggtttatgggtgggttagagaaccgtgtgaatgtcctggaaaaagactctgggaaagttgaccagattttggtcaaggttaatgatctcagtgaaaaaatggctgtcatgaataacgatatatcctacgttaaacaaaacatgactgaattgaaattaaacagtaacagcctttctgaagacgttagaacattgcgcctgactgtttcaggtatacagcgcaaggagggtgataatggccgtcaataagattcgggacaaagattcatttatgaattatgtccttcgcaaattgggtgcgcctgtcatccagatcaacctcgacaaaacacaagttgaagacgcggttgatgatgctttacagaagttttgggagtatcatcgcgacggtagccaagatgcattcttcctttaccaggtgaagcaggaagacatcgataaaggatatatcacctttccagaagatatcgatgacgttgtcgaagttatccaagggccaccaattgaatctatcggtaactgggcaaccccccagtggcagatggctcaggcgatgttagtgcccaaagctgctttggtatctatccgtcttatcgattatgtctctatgcagcagcgcctttccgatatcaccagcgtcctcaatgtccgcagggcattcgtctacaagaaattccagcgccgtttgtatcctcaattctcagctgttatcgatgaagtcctggcattcaaatgctatcagaacatcgatccaacggcggaagagaacacagaagcgtggaatgatatgtggctgaaggcttatgcgactgcattggtaaaacgccgttgggcggaagtgctcaaaaaggcccgaggtatccgtctccctggcggtatcgaactggatggtgatagtatgttcagcgaggccgaggccgagatagagcgcctggaggaagaactgcgtactggtcagcagtaccccatcgacttctttatgggataacaaaaagccgggggttcccggctttcttttagagtttaatatcccgagggccggggaaagtagtcgcctgaatatatccgtcgtgggtgttagtactgtcccaccattcaatgaaatcattcccgtcagattgttttaccaaaccgacgatatcataatcaccacctgagattttagcgtccacacagatgattcgcactcggctaccatcacgagtttctttgatatcttctacttgcattcatcaattcctcaatagaattaaacatcgactaaataccttcaaaattgagggtatagccatggccacttctcgttatttcaattacactaaccaccaaggaactcagaaattaattgatgacctcgtggtggaaatgatacaattgcgtgggatagacgtcaagtatattccacgcgccatctatgaaaaatacccgattttaaacgaagccgaacatcgtttcgaccaggcgtttgatattgaggtctatatgcaggattaccagggcttcaacacccaaatgtgggagaagttcggtggtattcaattgcaagatgaggtgacgttcactatcgcccgccgccgctttgcggaagtcattggtaacgggccaggactggaccaacaacctcaggaaggggatctcatttatcttccgatggcgaacaaaatattcaaggtcaacaaccctaacaacgacgaagacttcatgcaattcggtaaatggtacacgtattcattaccatgcaccttgttccagtatggcaacgaagacttcgacactggcgtccctgaaattgatgatattgataaacgtcttcaagatcttgaaggtgatggggtttatcaggatgctactcttcagactgacaatcagtttgctgatgaaattgaacaagatctggctcccaacaatgtcaaaatcgactttggagaataaccatgagaccttttgaaaattatttttaccatagttcactcctgaaatatatccatgtgttcaatgccattatgtccgatgttcaggtcaaaactgagcgcgggcttatgaaagttccgttacacatggctattggtcgtcgtaatgacctgaaccgaaataccccggcgaatgccttaccatttgcgactatgtctttcggtcaatttgaaatcaataaacaggtaacgaattcgtatcacaacaaattggcgactaataccgcaacatctaagcaacggattccgatcatcatcgactttgaatacaatgtccgtacgaagaagatgaatgagatgctgcagattctggaacagatttattctgtttacacaccttcaatagattgccagataaaggacaacgaaacgctcaagcaggatcaggttgtgaagatccaattggtgagccacacgatgtcagataactgggaaggtgacgcagctgaatctcctcatgtcgattgtaatttcatgtttcaacttcatggtgcgatctatggctgggattattgggtcgatgacggctccggtgctggtgatccgaacgttatcaaggaaataattatagaaatgtctactgatttgaatacgccgtggacggaattgcctctttggtttactgttgacaaagatggcgtccaccatccagaggataattgattatgtctaatatgtcggaacgtttgctgcagaccttagacgctgtctcagcacgagatgaggttgcccaagatgcgatgaagaaaaccgcattaaagcctggtgttgattatgacgaagaaaccggcgaatggttaggtgatcccccggaaggttatcagggctttgagatgcctccgtcattgtcggaggtagcatcaaaagaatcgaaagtccctgattatgaggatactgatgccacaactgactacaaacgcatccgtgacaccacatatgccatgcaggaagccacgatgttcatgatgggtaaggccgctgaactcgcagcttccacagaggctcctcgtgcattcagtgtcttccgtgagctgggtgaactcatgcgtggcctcaacaaagacctcatggaaaaccagaagactatcaaggacgttactcgcgacagagagccgccggggcagaccaccgttgaagtcactgaaggtgaggatggttccaccacagtcaaggttgggaagactgccagatcatccagagatctccttcagatgattgagaaagtacggcgcgacgctgaggctaatcgaaattcccgtgttaatcctgacgaagaagtaatcgacgttgcggaagaaccaaaaccggaagagaagtcagagggtgaggacaatggcgaatccgaagcgtgaagtcgaatatgccccggtcaagacggggtttaaaattgaagacgtcaaattgcgtatggaccaaacgttcatgcgcaaaccgactgtgcgtgctcctcgcgttgaattagtccttactgatgagcaggaagatgaatatgtcaagtgcgctatggacgcccactacttcgctgcgaactattacaagatcaccacaatcgaccatggcttcatcttgtttgatatgcacgattatcagaagcaattgttccatgattttcaggatcaccgcttcaatgctgttgtgcaggctcgtcagtcaggcaaatgtgtccggggtgattctaaagtccatgtgtacgataccctcagccaggaagagttctctatcaccatagaggagcttcacagccgcttcgaggacgttaaccatgcagagccgttgaataccattggcaaacacaacaagttcgtagacagccgtttcggcaaacgatactttgtgcagtccgatagtggttgggttccggtaattgctgcgcacaagacaaaagaatacgccgagtatgtggtcaagactgaaagtggccggacgattcatgtcgcggacgaacatctattcttcaatgaatataatcgtgaggtgttcgccaaagatctggaagccggggatgccatcatgacgcaagatggccttgaatgtatttctgaaatttgggaaaccggtgaatcccatcacatgtttgacctccaggtgaaatcatctgagcagcgttattacaccaatgggttcctgagtcataatacgactgtggtggcggcattccttctctggtatgcgatgttcaactctgataaagagattgcagtactggcgaacaaagagaaacaggctattgaaatcctggaccgtattcgtaaagcgtatcaggacatgccattcttcgttcagcaaggttgtgagaagttcggttcgactctgattgaattcgagaacggttcgaagatcttcgcatacgcgacttcttcggactccatccgtggtcgttctgtatctctcctgtatgtggacgaagtcgcgttcattgaaaacgactttgaattttgggaatcgactttcccggcgatcgcccaggcagagacttctaagtgtatcctcaccagtactcccaaaggtcagcgcgggctgttttacgacatcgtcacgaaggcgaacccagaacatcctcaatacaacgacttcaaactcacagaagttccttggtacagggttccggcgtacaccaaagacccgaattgggaatccaaacaacgcgccaaacttggtgatgcccgtttcgatcaggaattcggtatcaagttccgtggttctgtcggttcattaataccgtcgaaatgtctggacaagatgacatccaagctgtatcaggagccgaacgagttcaccaagatctacaaaccctttgacaaaaccagaacatatttcgggattgcggacacaggcaaaggggttgagggggactactctgtgctgaccatattggacatcacggaatatccgcatacgattgcagccaaataccggaacaacacgataccaccgatgatgtatgcatacacgattgctgatatgtgtactcaatacggtgaatgccctgtgcttgtagagactaacaatgatgttggtggccaggtgattacaatcctgtatcaagaaattgaatatccggaaatcgtgttcacatcaacagacaataagggaactggtaagaaaatcggcgggcgtcgtcctgaaccggggatcaacaccaacaagaaagttcgctctatcggttgtgctaacctgaaagcacttatcgaaagagagatgttggtaatcgaagaccaagatacgattgatgaactcagtacgttcgtgtttactggaacccgctatgaggccgatcagggttgtcacgacgactgcgttatgccacttgttctctattcatgggctgtaaaacaggaatggttcagtgacctgactgataccagcatttcgcaagatatgcgcggacgtatgaatgcgatggagcaacaccaagtccttccatttgggggcaaatttactggtgatactcctcatgaagtccagcatatgccgggcttcgggggtgtgaatgtatttgatgaacgttctgggatgttaatggaagagtggttcaagaactgatcactaaatatctttcaaattgagcgaaactctacagagaaggaataagattatggcaactacaagcttcagcgttgcgccgtccgtacagtggactgagcgcgatgccacgcttcagacgtctccgtccgttgttgttcagggcgcgtctgctggtaaattccaatggggcgaagttgaattgcctgtattggttactagcggtgagactggtctggtgaagaaattcttcaaaccgaatgatgataccgcaatcgactttctggtcattgctgactttatgtcgtacagttctgctgcatgggtgacccgtatcgtcggccctactgcaaagaacgccgtgactaaaggtcagagcgcaatcctcatcaaaaacaaattggattttgagaccgcaagtccgtcggcttctatcacctggactggtcgttatcccggttctctgggtaacgatatcgccgttaacatctgtgatgctgcgtcattcccgacctgggaattccgtaacaacttcgcatatgctcctcaggctggcgaattccacgttgtcgttgtggacaaagttggtcgtatcaccgattcttccggcgctgtcggccaggtcgatcgcatctctatttctggtactgctaccgccgctggcgccattacagtagcaggtgaatctgttgcatatctgcagacggatactccagcaactctggcggctaaaatcggcctggagatggaagcgctgactgatgtttattcgagcgttgttgtaaaatcgaataccgtcattctgacccacaaagctatcggcccgcagcccgtgactgccgtggttcctgatgctaatggcctgactggtactgcgatcatcaccactgttggcgcatccggcacgatcatcgagaaatatgaactgttgcagaacacccagggttctaaaaaatccgacggtgcgaacgcatatttcaaagatgttatcaacaacacttcgaattgggtttatactttcactaatgccctggctgctggtgtggttgaactcgaaggcggtgttgatgactacaatgtcaaccgtgtcgctgctatcgaagccctgaacaacgccgaagcatacgatgcgaaacctgtgtttgcatattgcgaagagctgattgaacagcaggcgatcatcgatctgtccactaaccgtaaagacacagtgtcgtttgtgtcaccgctgcgtgatgtggttgtcggcaaccgtgggcgtgaaatggatgatgtcgttgcctggcgtgaaagcctggtgcgcgattcttcctatttcttcatggatgacaactgggcatacgtgtacgacaagtacaacgacaaaatgcgctggatcccggtgtgtggcggtactgcaggtctgtgggcgcgtactattgagattgctggtatctataagtccccggcgttccataaccgtggcaaatacaacaactacaatcgtatggcgtggtctgcgtcttctgatgaacgtgctgtgctgtatcgcaatcagatcaacagtatcgtcaccttctctaccgaaggcatcgtcctgtacggtgataagactggcctgacccgaccgtctgcattcgaccgcattaacgttcgtggcctgtttatcatggccgaacagaacattgctgccatcgccaaatactatcttggtgaaaacaacgatgcgttcacccgcagcctgttcagcaacgcggttcgtccgtatatccgtcagctggccaacatgggcgcgatctatgacggtaaggtcaagtgcgacgaagacaacaacccggcagaagttatcgcggcaaaccagatggttgctggtatctggttgaaaccggaatacagcattaattggatctacttggattttgctgccgttcgtccggacatggaattctcggaaatcgaatccgggggcggcatcgtcgcggcgtcctaataaatataagacacatgccctcttcggagggcatttcaatgatctttatgatagagaacatcgaaatgatcggaagtgtctacaaaatcacaaatctcgccaaccagaaagcctatatcgggatcaccacgcgcgacccaatagacaggtggtgggagcattgcaacagcgctcagaatggttctgattattttattcaccaagcaatccgcaaacacggcgaagaatcgttctcagttcaggtaatcgcgcagaccaattccatagaagacctcaaagaattagagatcatattgataaagcaacatggcacccatatgtccacacagaaaggttacaacaagacttggggcggtgacggcgcaacgtcttcagggaaagcgggggcaatagacgttaatactggtgaacgtttaggattaatagattgttcagaccctcgttgggatacgggagagattattagttgcagacatggagtcaaacataaagataatacccggttgtccaactatgccaaaactcggactggtattaagaaccccaatgccaaaagattcaaactgatttctccatccggcgaagaacatgagatacacggcaactgtaaagaatacgtggaacgccttgggttgaaatattcagctctttatgattatattgagaaagacatccctgttccaccaccttctgtattccatcagaagaatgcttcacaagaacgattgaacactgttgggtggagactcgaaagaatatgatatttgcatacaaaattgaaatgatatccaacaacaaggtctacatcggtgtgaccaatgacccgcaaaggcgatatgaacaacatttagccaatgcatttcaatataatgttgaaagtgaattgtatgatgccatgcgcaaatatgggccttccgcttttactttcatggttattgctcaaaccgatgaagtccacaaatgggaattagaaaagcaattaattgctcaatatgattcttatgaattgggctacaacatgaataaaggcggtaacgatggaagtcatctggttggtaaagctgctgctaaattgacctccactggagaacatattggtatggtctcattaattgatccacgttgggatctctgtgagattgaaccagtacggaacaatgttgatcatggctttgatctcagtaaattgacgatcaaaagattaacagactaattagaattgtgtaactctttttggagaatgtataatggctacagtaaatgaatttcgcgcggccatgtcacgtgggggcggcgttcaacgtcagcaccgctggcgtgtgactgtaaacttcccggcattcgtagcgggttctgacaccattcgtgacgtatctctgttggctgtaacaaccaacaccccgacaggtcagctgggtgagattctcgttccgtggggtggccgtgaactgccgttccctggcgaccgtcgttttgaggctctgcctgtaacgtttatcaacgttgtagacaacgccccgtacaacgcatttgaaatctggcagcagtatatcaacggcagcaacaacaaccgtgcgtctgctaacccagatgattatttccgtgacatcatcatggaactgctggatgctaacgacaacgtcaccaagacctggacgctgcagggcggctggcctcagaacctcggtcagctggaactggatatgtctgctatggactcctatactcagttcactgttgacctgcgttacttccaggccatttcggacaagtctctctaacgttacacgtggtgggggaatttatttccccaccactaattacaagaaaacgttgaggacatataatcatggcatacggcaaaggtttctttggtctgttcagcggcggcggtttagttgacgccaaagttgacacggacaaatatgtccagagtcaagaagagaagctgctttcaaaagcgactgttgtagctctggacgacgctcaggatggttcagtcatcctccagggcggcgccaacacttacaactatgttggtgttgagagcgagctgcttaacgtcaaacagcttgttgaagaatatcagtccatggcccagcagcctgagatccgcaaagcggtggacatcattatcaacgacgttgtcacctgcgaagaagatgagacgcccgttactatcaatcttgataaagttgaaggcatcagtgaagatttgaaagaacaaatcactgaatgcttcaaagagatcatgaatttgctggactttgacgacactgcgtatcagaagatgcgcaaatggtatgttgaaggccgtcaagcatatcatgttgtaactgaccctaccaagccaggtaacggcattcagaagctggttatgcttgattctcgttgcatccgcccagtatacgtcgttgagaaaacgatgagagaaggcggtatcgaggcaatcgagaaggtcactctcaagtattactacaacccgaactacaaccgcaaccaattcactggtcaatccggtacgtcgcagaacttccagccctctcaacaggaactggtatttgacgaagaaagtatcgtctatgttgacagcggcgaagatcctttggctaatggtgttgttcctggcctgctgaaccctgcgattcgtcctctgaacaacctggttacagttgaggatgcgacagtaatttacgccatcactcgtgctccggaaaaacgtgcattctatctggacgtcggtactctcggtaagaaatctgccgaagaatacatgactatgatgatgggtaaattcaaaaaccgtctggcgtttgaccgcagtactggtaagatcacaggtaacagccatttaatggggattgctgaggactactggttgcctcgtcgtgaaggtcagaatgccactgagattgcgacagtcgggggtggtgaccaattaggacagatggatcacgtgaattacttccttgaaaaactgtatagctctctgtttattccaaagagtcgtatccaggaagaaggaagtatcaatatcggcggttctaatttggcggagattacccaggaagaactgcgtttcaacaaattctgcgcgggcctgcgtcgtcgttattctaaattcttctctgaattccttcgtcgccagcttgtattgaaaaagattactgatgaacaagattgggttgaaaagattcaaccgttcattacatttgaattcacctcagacagttttattcgtgaacagcaagaaaatgaaatgcttgctggtcgcctgagtgccctgactggggttgagccttatatcggaacattcttctcaattgattacgctatgcggaacattatgcgtatgtctgatgaagaaattaaggctcagcaagagaagatcaaagaagaaaaagataaaggtatgtatccgaaggttcaggctgatgaaagcggtggatttagcggacaagatgttagcccgctgaaatggcgccctgaagtcgttcctttccagggtacacccggtggggaagaagagtaaaaatttatcaactaaatatagaaaattaacttcggagatacaatcatgagcgcgatcgatattgttcgagccgtactggatggtgacatcgaaaatgccacggcagaatgtggtatggaacttgacgcccgccgtgaagaactgatcgcccaaggtacagaatacgttctgaattccctgggtgacgacctcagcactggcgcggaataggtgattattatggaaatcaaagaaattgctacgttcgctgatttcctggcttcccgcatggacgaacagaaagtcatcgataaagtgaacgcaaaaggtaaacgccgtcgtcgtttaaaatgcgctcccggattcaaactttccgctgatggttctcgttgtgaagtcatgaacgccagcgagcgccgtacccgtaaactgggcaaccggaaagccatacgcgccaaaaaacgtatgggtctggggtatgaacgcaaagtcgagcggcgtaaaaagaaagccatgaagttccgtaaaatgatgggactgagtaagtaaggagcaaatgatgaaactgttgcgtgagatcacggcgataggaaaggaacttcagatcggggaagcgcaaacttccactggtgggaaggccatgttcatcgaaggtccgttcgtgatgtgtaaccaggttaatcgcaacgggcgcaactacgaccttgaaaaagtcggacgccctgctgtggaagcatatgaccgggaatacattcaagatcgtcgcgcaatcggtgaactcaagcatcctgactatccattccctgatatcgaacatgctgccctcaaaaccgagtcactcgtgtggcaaggcaacaatgcaatcggtcgggcgcgtattttaaacacccccaaaggtcagatcatccgtgctctggctgatgcggatttcaacctggctgtctctacacgtggcctgggtgagacagtagaagttaatggctatgacgatgtcaagccgggcttcatgcttaccgctgttgatgctgtcgaccgtccttctggacaagtttgttatgtaaaagcggttcacgaatctgtagactggcaacttgatgaatcttctggtatctggatgcctcgagacatcaaaggtcaggttgtagacaatctggttaaacacaatagccagcttgaagacgacttcctgcgccgtcttgatttagctcttaagaaattgggttgatttcagctcactaaatactgaaaaatcgttcagaaggaaattatcatgaaacctgaattacaaaaactgtttgagggcgttaatggcctcagcaccgagttcctggacaaagtgagcggtctgatggaggctaaagtcggcgaagcccgccttcaggctatccaagagaccgagcaggttgcccaccaggaacgcctgaaactggtagaagcgcatcagcaggaaattgccaacctgaaagaaacccatattcaggaagtggcgaccaaagttgacgcatttctcaacgccgtggttgaagaatgggcgaacaaaaatgctccggctattgacgccaccatcaaaaccgaagcggctgaaaaattcctgtctggtatggtcaacgtgctgaaagaagccaatgttgaatttactgttgacaccgacggacagatcgctgccctgacccatcggctggcggaagcagaaaaacgtgcaaacgtttctgaatccgagctgaaacagatccgtgaacaagaaagtatccgccagcgcaataacgtcattgacgaaatttgcgaaggcatggtcagtaccaaaaaagaagtcgttgttggccttctggaaggtattcaattttctgacgcctcttccttcggcgctcgcgttcgcaccttccgcaacctggtagaaggtaacaaagacgactttactgacaaagtcggtaaagacaacgaaggcggtaaatcttctgatgatcaggaaaaagacatcaaagaaggtaaaaaacagaaaaaagaaggcgacgacgaagacgatgacgacaacgacgacgatcctgatgaaaccgacaaagaactgaaagagtcggtcagccgtcagctggaagaataccgtcgtatgcgtggtctgaaaggctaaattttgcagccacagccctctataaaagggggcttgattttgaacgactaagtaatttcaacttaactgaatatcaatgtaaggaatgagcatcatggctaagaaacttgttactgaacaaatgcgcgaaacgtggctgccggttctgaatgaagaatccaaatctattcagccgctgtctgccgaaaacgtcgcggttcgcctgctgcagaaccaggccgaatggaacgccaaaaacctgggcgaatccgaagcgccgggttctctgaacaccactgtcggtaaatggcaaccggttctgatcgatatggcaaaacgtctggcgccgatcaacatcgcgatggacttcttcggcgttcagccgctgtctggtccggacggtcagatcttcgcactgcgtgctcgccagggcgttgctgacggttctaacacccagcagtcccgtaaagaactgttcatgcaggaagccgattccggttattctggtgacggtactgtacaggctggcgacccgtctggcttcacccaggctgagatcgaaggttccggcgctggcaccaccaccatcggtaaaggtatgccgtcgaccgacgctgaactgctgggctctccgtccaatccgtgggcgcgtgttggtatcaccgttcaaaaagcgaccgttactgcgaaatctcgcggcctgtacgctgattacagtcacgaactgcgccaggacatgatggcgattcacggcgaagacgtggacaacattctgtccgacgtgatggtaactgaaattcaggcggaaatgaaccgcgaattcatccgcaccatgaacttcagcgcagtacgtttcaaaaaattcggcaccaacggtatcgtagatatcgctcaggatatctccggtcgttgggcgctggaaaaatggaaattcctgaccttcatcctggaagttgaagcgaacggtatcggcgttgacacccgtcgtggtaaaggcaaccgtgtcctgtgttccccgaacgtagcatccgcgctggcaatgtccggcatgctggattacgctccggttctgcaggaaaacaccaagctggcggttgacccgactggtcagacctttgcgggcgttctgtccaacggtatgcgcgtctatatcgacccgtatgcagtagcagaatatatcaccctggcgtacaaaggcgcaactgcgctggatgctggtatcttcttcgcaccttacgtgccgctggaaatgtaccgcacccagggcgaaagcaccttcgcaccgcgtatggcgttcaaaacccgttacggtatctgcgcgaacccgttcgtacagatcccggctacccaagacccgcaagtatacgttacctccgacggcatcgcccaggacagtaacccgtacttcaggaagggcttaatcaagtcgcttttctaatagaaacaacgacttacaaaccccgcttcggcggggtttttatttcagaagtatggggttataatgtcctgaaagggggaattatgagccaaccatacgtttacaaaatagaatcaaaagatggacacatctattatggatgtcgtcacgcaaagaactgtcaccccaaagaactttgggtaaaatatttcacgtcctcgaaagtcgtccaatcccttatatcacaacatggaccagattacttcacccatgaagtaataatgctatgtcgggatggagaggaagctctccaagttgaagcacaattgatcgaatccattcacaccaaccctctttgtttaaatcgtttccatgttaagaaagatggttccctcgtttattttggaaggactgggccactcagcgaggaagcaaaggcgcatttgtctaatgtaaacagagggaagaacaaaccaattggattttcggaaacatcacggcaagcccagatcaaatggcagaatgaaatcaggatatggaagcgtccaagggcaactaaatgccaacacgtttgggctatggctgaccaattctatcaattatggaagaatgaaggttgggggcatgaacgattttgtaaccggatgaacgacgggaataatattcgagtattctacaacatgtataaaatgttcaaatacgaaaattgggttcctatggaagaccctgaatgggtaaaagatttcatgtagtttttctttatacaccctcagtgctattatattatggtctatcactgaggaaacaaaacatgaacacaaccaacattcaattaactctgtcttccctgatcccggcgttcggcagcaatctggaacaaatcaatttcatccgtaatcgcctggaagatgtggcggtccaattggggtatgtcgaaccccctcgggaagtaaaagaagcggaggatgctgcggcaccctctaacctcatcgatgtgtatgatgaaatcgggcgtaaaacgaacgctaccatacagcaaatctttgaatatattgggttcatagaaaatgcattgggccagtcttatcatccccaatcagaatctgggaaggaaatctctcccagcaacggttatcggtccatctaatggtattctgtaaaagcgggcgcggttgcgcccttttatttgggggtttgtatgtattcaaatatctcaaattctgaagcgatgtctttggctaaacgataccactgcttcaagtcccgcgccgggcattcctgggataaaaaggcttggatcaagcaattacagttacaagtaaagatgatggaatctctttcctctcagtgcggaaataacccattcgccgcccgttgccttgaacaggagtatgcaactcttaaaatacaactgaacactgcgatgtcacacgtattgcattcttaacttttcaataaccagatttcaattattattgccccacaaacctaacgaggaacaactgatggcccgtgaagacaactctcaaatttacaccaacgcgaactccacatttgcggagtggcacaacacccttgagcgcgtagcacgttctcagggcggttcagcagctgatgccgatgcctggcgtgaagactatgacaacggcaagacgccgcgtcaggcatgggaagacgaatggggatgggaagatgcagacactaattcgtaaggtctttctggacaaaaagggtatggaatcaaaggtggaagtcttcaggactcaaaaattgtttgagcaggctgaaactcggtactatctgaaaccaaccctttaccttccagaaagcagtctgaaccgcgatattacccaaatggatggtactgtcatccgttgggaaatagccaaacaggaagatgtcgaacacgacataacactttgaagcgagatctatatcatggcaaataaattcatttttctggacgttcggggcaaacgattcttcaaaactgatctggacgaaaagacagaagggttccagggtcgattgtcatatttgttgtccacgggtgatatcgacgtccagcggcatgtggcggatgtgcgggatcttctggattctggttgggttgaaattcctaacccccaggtgttgaccgtcaacctgtattacatgaaagacagcgggaagtattattccactggtgaactccatcttccccgttcagaagtcgatgccgaccctgccaagagttggtacaatgctagagaaaccgtccggaatatggttgacagcggcaatttacccggcctggtatctggtgctcgctatgacgtgttcatgtcttgtgaagagcatccgtgctatgtccccactttggtgaaggtgaaataatgaaaactctcgatcaaattttagaaggtcataaatcaggaactttgtcggcggccttagacggtcgtgacctgacccgtctggcgcagtttttgacagttgagcaaatcgaaggtttggggttgtccttcaacaatcctgaaaaacgtgaatcccatgttccggttgaattcaccaaagaaaatatcttgaaacaactggaaaaggacgttgcgtttggctttgaaaaagcgctcaaccgccgtgggatcagttctagccttatgtacgaagtcgtacaaatgtggaactgtatccttgaagaaggtctggaaaattttgattcctacgctatgtatggccttcctctctttaaagcgacagctctcaaatatgggtttgaaaacccaatcggcgatgatactggtgctgaagaccattacgaagagcagggatattaacatgcgcatcaaaaagatcggtgccagcccgttgactggtactatcttctccggcactctggaaacgaaaaccagtatgtgggtaggggataaaattgatgtcactgacgattgtgtggcagctaccgctgagcacatgcgtcacatcaagaaagactactgctacaagacacctgatggcaagtatctggtgttatctgctgaagttcacgatacccttccggaccgcttcaaataattttaaaataattcaataaacggggtttacttcttcaataaaccccgtatacttcatttcataagcagtacgacaccaactctgaaatgaaggaactacattatggcacgtacaatccacgattttaaagactccgatatcctgacctacggcatgaacggtcgcctggtagttctgaacgacggtgacagcgaagaacgctataacaccactctggttttcgaaaacaaagtgatttactccaacacccgcgaaggcatgaagcgtgccctgaccaacccgaattcggggctgacccgtttactgcctaagcagtgccatgcagttgctcgcgcactggctggccgcttctaacctaaatccgaagcccctccgggggcttactttgaaacgaaggaactatatcatgatcactcccaatatcactgtctatgctttcgacgagttctccaattttgattctttcgtcaacaaatttggtgtgggcaacgtcgaagccaaaaagttatatggttctgatcgtctgagcaagtccactcagattaatgctacgttggatgaattggtggatgccctgggagagtccttccgtgctaaaatctataagaaagacggtggtttgcgcaaactgaaagacaagactgttattcacgaggctgatcagtttaccgtgtctatgtatttcacgttcaagcttgaatatgaacttttttccaacggcgaaggttccacccattatgtcatagccaaaggcagcaatcgtccagtattcgaatcgggcgacatcgtcgctgcaatggaagaaatggaacgcctgaacaaagcatagttatcaaattaatgacattagggtatgattcatattgtaccctacacactgatgaggtctctttatcatggcttgtatgtcttctatttctaaaatgcctccgctcaaatggagtgggaacgagcacagcatttattcccgcatcatttctgcagtaaaggaaggacgcgaaagcatagaatttttccgtccggctgcttcttccaaagcgcatcgtgacacatacaccatcctgaacaatcttcgaagtctgggagtcgttgtagagcctatgccctgcagcaacccaatggtcaatctctttgtcctgagcaactttgagtattggaaatgaagactattattctcataaccggatcgcgttctatcacagagcgcgacaaaatctttgacaaattggatgaactttctcatattcattcagtttgtaatctgtatcatccgtgcgatatcctattgatcgcgggagaggctgtcggtgtcgatacgatatgcaaagattgggctgaatccagaggggcgacttaccttggaatgcctatccccgatgaatacttcgctacatatgggaaaggggccgggaacaaacgcaaccaggacatgttagacaaggcgttggagttatcacagaaatacaaggcggagatactgcctctggctttctgggacggttcatcgactggtacacaggatatgatcaaacgaatcaacaaagcagggttgtattgtaaggtcatgctcttgggtaagccaaaaaccaaacgccttctgtaatttgttaacactggagacgtcccatgatcatttttcaactgttttgctatttgttcactctgtactttctcgttgctgtcggttatgaaaccttccgtgatctggcatcgagccagtattcatccaaactggtttatgctaagaaatttgctgtccgcttctggagcaattttctgtatcgcctcccctgatttaaatacccccatcaattgggggtattttcttatgaacgcacaaatttatgacgcccttgaacaaggcaatgcatttaacaatcctctcccgggattctctgctacttctcagacgttaatcaccagtggccaacaaagtatagcaggtattacaagcatcccggatacgtccgttcaggcggcgataaccgctggtggtttgactcctgctaaactcaatacaatgaacaccatgtacgggactgccaacaccgggatcgggactctgaattcttatggtgaccagaccgttaatgaggcatacaataggatcggaacttcagtatcctataaatccggcctcaaaagtattgaacgagaacccaccaactgcgatttgattaacaacgcattcggtgtcgtacagacactcggtcgtcaatggttgactgcaatggaggatgccttatctccaataacagacaaaatccaagaactgtatgatctggccaaacaaggcgcggcggcggggttggccaaaatacaggcattagcctcacaggtcaacggattaatcaatgatgctgtagcaaaggtgaatggtgttattcagaacatcactgatgggatagctgctgagttagctcatattgaagacatggtgaagaagtgtcttaatttctcctttgctaatgttcttggcgaatgggcaaaagatctttgcgcaggcggtgtcatcaacaatatcggttctaatgatctgaaaaatgccctgaaatgatcagggcacagtccttgctggcagaactcccactggctcaataccttccaccaggagggagttcacacccacatcgctcaacctaatccatatcttcccaccaggcttaatttcaaaaacgttcatttcatttccaaccgcctcattattcacaaatacgccttgtgttgcgatcctgataggtttcttcgtgttgtttgtgatttgaaatgtaacagttatatccgtggtcagattaactccctgtttcatggtgtagcgttttattttgtcgtagaaagatgggttgaatgtgatgatgatactgttgttctgtgagtaataaatacttgctgacaagtaaggaattttgccttcttcccctttgcgtaaaagagggatggtggttttccagtatggtcgcaaagtgtctttattgtcatcaaaacaaccgacaggctggagattttgaaaactttgaaacaaaatggtggcctcatccagcatggatttttcacatttgttactgtctgttgaaatggttactggtacaacacggacatcagtatcccagaggtcactaacggaaatgatgggcgtgacgaaaatacggcaacttgtcaatacaagtaccataaaaatcatcacaatccatcttctgattccgcgcatcagggacacaattaatctccacagcaaaggtgctaacaatgtctacttcagtccaattcaaacatgacaacccaaattatgcagcatccgataagtggcgcttaactatcggtgatctgatattgttatcccgctctgtacacgattttagcataccaggcgtgtattccgagggcatcgatgggccttcgcccggttcagtgctcaacacgatcccttctgaacgtttaacatatgatcccatcgtatttacgttcgttatcgatgaggattgggtaaactgggaaaccatctacaactggatagccagtaacgccgccgctgatatggctgttagtaaagacatcaccatagaattactcaacaacatgaaccgcccggttggcctgcaacttctgttagaagaagcacgtccaactgcattggacaacgttcttgttgatgtggacgcttctgttccccaattagttacaacggtgactttcaagtatctgaaactgacaccgacccgtgttgtccgcgaaattgataaagaatgagttataatagagagagttgaaaaggtgggaatattttatggaagttaacaacactcaatatcaaacgatgtctatagaggacatcatggctgaactggatccactgattacggttgatccggctgatcgtaatttagatcaaatttcgttgaagatcggacgttcctttatgacagtgcagcggcattacattcgtgaagggcgttatctggaatatctgactgggcggtttaaacagattgatgtttatctgcggaggtattatgccggggaattacctgcgcaatcgtaccgagatcgtcctctcaacaacaaaccactgaaaactgatctgcctctatgggttcaggctgatgatatgtatgttgagatgtcaggtctcctccaagagcagaaggcaaaggtgaaattcatagaaagctgtttggatcgtttgaacaagctgggttatgaagtcaaaaacgccatagattggcggaaatacatggacggtatgtagtgatgagccgactccaggcactcaagaagatcaacaatattgaggaacgtcaatatacatttcagcagtacgaattaccgtacaaggagctgacttgtgtaacgaacgagaatggacgccattacgtttccccaacaggggtgaagttaacctctgtaacaacaatgttggggcgtaccagtgaccatacatggttggatgcctgggtcgaaaggcttggagttgaacaagcagcaattgaaacacaaagatgcgctgataggggagaggcagtgcatcttgcttgtgagttatatctgaagaatgccccaatgaaagatgttgtggccgccgccggacaatatctgttcatgttcatgcaattgtttccctatctgaaccgcatgacaaagatatatgctcaggaaatacctctatatagcgaagtattgggcttggccgggcgtgtggatttaattggggtgtacaacggaaccccagcaattatcgacttcaagacttccaatactctgaaaaccagggacatgatcgaggattatagcatccaattgtgtctgtattcagttatgtttcaacagatgtttaatgtcaaaatcgagcgtctcatcaacatcatatctaatgagaatggtttactgccgacagtaatagaattcgacagaaaagatattctcccaaaaatgttcgagcgcgtccgtttatatcaccgtatggacaaggaacagaatggaatctgggcagaccgctaaatactccatataattgggaggattggtatggccgacatttctgtgaccaaagtgaacgaagtccgtatgcgtgtgcatgctgacgcagggatctatgaagaactgaatgattatttcaaatttgaagatcccaactttcagcctaatcctttcagcaaatgggatggcgtcgtccgtttatttaccaaatcttccgggttgatcgacatcggtcttctgtttgaactcttcaaattttgtaagaccaacggttattcacttgacgtggatcctgaattgaaatatatccaggacatccctgataatgaaatccatgatttctgtaataatttgaaaacacaaattcgcacagaatctggggaatacattgatgctgaagttcgacagtatcaattcgattccatcgccactgccatgaggcaatctcgctgcgtcctcgagctggctacaagtgccggtaaatcctttattctttatgtgatggcccgttactacagggaaaggcgagaagcgctcgaaagtaatctgaggacgcttatcgttgttccttctgtgcatcttgtcagacaattgtacgagaacttcgaagaatacagtcatggacaatcctggaacccgttctaccaggtacaaaccatatgcgaaggcgcaacccgtaatattgacaagcctatcacaatttccacatggcaaggcatacaagaccagccaaaggattggtttcatcagtttggtgacatcattgttgacgaagttcatacttcaaagtcagataaactttcatatatcctcaacaactgcataaatgctgaccagcgccttggggtgactggtactttggcgaatactaaggttgctgggttgcaggtggtatcccactttggtgcctatcacaagatcatcacggctcgagaactgatcagtatgggatatgcagctgacatcaaaatcaggatgatagaattgaaacacagattggccgacgctattgatatgcatggtgccgattatcagaaagaaatggaatatttgatatcgaacgaagttagaaaccggcttatcgccaagatggctttaacattgaagggtaacgtcgccatcatgttcgaacgtattgatgcgcatatgatgatcgtgtatgacatcctcaaagaaataaagccgaacgtatttgttatcaacggggaagtcaaatcagcagaccgcatgcaaatacaaagggcgatagaagaaggtgaggatattactctgttggcatcttatggaacgatgcaacaaggggtttctataaagaaacttcaccatctggtattggcacacccaagcaaatcatatattcgtgttatccagactctgggaagattgatgcgtcagcactcaacaaaagacgtggcactcatatgggatttggtagacaatttgagttataatgggagttacaatcatgcgttacgtcactctcacgagcgatacaaattctatttgacagagcgccaccctgtagaattgaaaagagtggcgctggaagattatttggggtcttgatccacataggcgggcgttggctcgccttcttcactgtcgtcaaccaaacccaggaatgcgtcgatactatcacaacaacgttgtaacagttccggcttgatggttttgttgatgatcgcctgatttttgttgatcagagggaacactcttaattcgccgaagttgctcatattgacgatcgcaacataaagccctggcttggtattaccagacaggaatgagaatgggacttctttggcagaatcggattttgtttcatcaactaaaaccttcaaaagagtagttgttgatgtctcactacccaatttccggcttgccatatctccgtggctgtaccctacggcatagattgctactagttgtttcatgctattcatctcgtgttgtttacatccttatataatagtctcatgttatgtttagaccaatttaaaataatttgcctttcggattaaaaagtcctttcttgttgaacaaatccgtcgtactatacgagttgtgagctttgcgagcaacgagtattaggggtttacgagcgaagcgagttgattaatataaattaatagattaatctatttcgttaataatttgcgcgcgaagagatttaacacttgttctatatccccaaatgggcgatactaaattgcgtcaacaacatgacttgacttcactatatcttgaggatacataaatgcaagaaattactctgtcggaacgcactctgcaacttctggctaactttgaaaccatctgcccgtctatcgtcctgactcctggcaaaaagctgcgtaccgtaaatgacgcatcgacggttatcgccatcgccgatatcgacgaagactttccgttcgaattcccgatcctcgacctgaccaagctgctggccatccagcgcctgccgagctttaagagcggcaagatcgaaatgtacgaagatcacgtgctgctcaaaggcgaaaactctcaactgcaattctggcgctcggccaaagaactgacgactgttccggctgataccattgatctgccgtcggttgatttcgaagcaactgtgtcgccggaaaaaatgaaagagctgatccgcgcgtgttctaccctgggccacaaaactgtccgcatggtcgccagcggcggcaaaacccgtctggtgggtactactccggcaatcgacaattccaacgattacaccgttgaattgggcgaaactgcgctgggtgatttctccatgccgatcgacgttgtcaacctgaaaatgatcgaaggcaactatactatccgcgcctgcactgaaatgcagctggtcaatttccaatcggtcgacggcaccatcaactattacgtcggcatgcagctggaataatcttcaatatctatctgttgctttaatatcgttgcaggggcggaaagcccctgtattttgaaacgcatcatctaaagaggctgtaatgtctaatatcacaatcgttggtgaccaatacgcatgggaaaacaaatatcgcccggacaatctggacgaaatcgttcttccccaggacgtccgtgccaagatccatggctatatcactggtggtaatggcaacatcccgtcaatgctgttctactcaccgaaaccgggtactggtaagaccacgactgctctggcggtttgtaatgaaatcggctgcgtcaagccgctgatgatcaacgcatccctggacaacaacatcgacaccatccgcgacaaagttatccagtattcgactggcgtcagcgtatatggtggacggaaagtcgttatcctggatgaagccgagcgcctgtctatggccgcccaggaatcgttgaaaggtattatcgagaaggtgagcaaaaactgctcttttatcctcaccaccaactccaaatcccgtctgaacgaaccgctggtttcccgctgtcgtgaaatcgacttcatctggaccgacaaagaagcacatgaagtacagctacagttcatgcggcgctgtgctgaaatccttgctgctgaaaacgtcgaagtcgatctgaaagtcctcggccggatcattcctcagttcttcccggacaaccgtaagatcatgggcatcttgcaagacaatgcctccacctatggaaaaattgatgaacgcgctctagccgtcgtcaacgcaggcggtatgcgccagctggttgaagaaatgaaacggaacaactgggacggcgtccgccaatgggtaactgacaatcagaactacatcggcgacgatttctactctcgcttcttccatttctgcgtgccccaggataaagacaagcctcgggcgattgaaacaaccagcattgttgacatggtcgctctttgtggtcaggcacagatcgaacatcgtcaggctggggacgtatggcttcatgctgtctatttcctgactaacgtcatgctcaacattaagtggagctgattatggccgctccgtctttgttcgatttcctgggtgcgttgaacaacaccaaagagaacctcttgcaaacggacgaccctgatgttcgtaaggcttttgatccgtttatgacccggcgcgggctggcacagaacaaagatactcttgtcatcgcccagcggatgaatttgcttcacaaggtcacgccgtggatgcaatggaacatggcattccattctatcccggctcgcaagcggtatgggaagtgggccaaaaaaggaccgcttgatcctgatattcagatgttgtctgagtattattacatcagccatgaaaaagcatcagagtatctcaaatttcttccaaaagaagcactggccgagatcaggaagaaagttgagttgtccaacagcaacgagaaagcgaagccgcgcaaggctaagtagttaaaatcattaatgaaggagtttggtcatggcgcgcaatacgctcgacatcttaaaactgactgcggtagacgatgaggccagcatcgtcgactgcatggtcgaagttgaattaaaccaagataaaccggggatcttcctgggtatcaaggaaacactgagccgaatcggggttaatactcgtcaagagcctgaaaccctgtaccagacctgccatattcttcataaatctggcaagtattttatcgttcatttcaagcatctgtttatgctggatggacattacaacggctttcagcgtgaagatgtcctgcgtatgaatcgcatcattcgtcttctggagcagtggaagatgatcaaggttctgcatccggaacaagtgaccgaatgcgccgacatgtcccgtatcaaagttgtgaaacacgatcagatcgccgattggaaactggtccccaaatatatcattcgcccatctcgggccaaaagcgaataactggagtcgctatattatgacaactacatttagtaagaacgtgagactgaatctggcttttggtaatgctaaaggggacgtaaccgcccccgactttagcaaaattcgcaatcaggcgaaactcgttctggaagaaaccaaagaactcctggaagcggtgtatttcgatcaccaggtggttctgacactggaactgaatccccgggaaagcgaaacgccgactactactgaagatctgatgaaagccatcatggatgcccagggcgatatcactactgtcaacgacggcgtggcgcacattgctggcttcgatggtgatgaatgtctacagcgcgtttttgcttccaatatgagcaagttcatccgcagccaggaagaaattgtcccggcgctggaatattattacaacaaaggtttcccccgcgaaagtcttcgtgtggaaggtgaattcccgcaggcctgtgtgaaagttactgaaactgtcacggtggatggaaaagaatacccggctggtaaattcctgaagaatatggcagctttccaggaaccggacttcagtgatatgctgacagccaaccccgaacaacagatcaaaactatcgttgccactcaggcgattgaaccgggtagtatttctgttgaccacaccaacgggattgcatatatccatgtggacgacttcagaacattcctttctggacaaaccgaatattctactggtagtgttgtcggcaccaaagagcagacagaaagctatgtccctgtctacaaaattgggggcgaaaattgtcctccgctgaaaggtgtctgggaagcgaacgtccgtgtattcgtatactccccgtacaatccggaagtcacgcagctgacccgtatcgattaagtcattccgcgtttcaatatacaacagaggctataatggcctctgttttcgtattctaagaagaggataccatgaaagacaaacagtcagacatccaatattgcggtgtccgtgaagataaaatcaaatcggctgatcctgtcctcagccctttccatcgtaagctatcctatgattggatgaatgaacgttacaaaatccacgtaagaaaggacgtccagcgtcttcctgccccctggacagaaaatgagatactacggcaggtcaagttctgtaacgtccggagagagcacgacaggcagtctcagcacctcatccggaatatcgtcgataacaacaacctgtctctggctgacaagatgttcaactgccttctgttccgtatgttcaacatgtgggatcccatccagcatgttctggaaggcccggtttctatcaatgatttccgcaatatcaatttggaccgaactcgtgaacggtttgcggactttgataaaaaaggcggcgtcacgttcaccaatgctttcaacacaggcggtctaaagcaatgtttggccttccctgaactggccgtgactggtaagccagccagccccagcaaaatgatggtgaaagtctttgagaaagaagggccaatgcgtttttatgttggagaaatgaaatataaagatgccaaggttctggcggaatcaaacccagggtcagtaacgattgaaggatgggaaccgcatatgggaatgcgtgttgtccgattcctgaaagcgtttgttacccataacccacatttcttcaatgtgttgttggggttcaattcaccgctatctgtttatgaagaactccttaacaaagttgaaggcctcggtccattcttggcatatcagatttgggttgacttcacatacaatccggattatccgtttagtgaaaaccatttcactatcgccgggccggggtgccgcgccgggattgatctgttattcctggacaaggacggcatgacccatgaagagtgcatcttctggctgcgtgacaatcaggatgatgtgtatcgtcaatatggttatgaccgaaatgcgttttggtcagcggaagaatcgtatgatcgttgtatgaacgtcatgcagctggagaacatgttctgtgagctgagcaaatacacccgttgtgttgaggcggtcatgcgtggtgaaaagcctcggggcaaggtcggatacaatggtggggaagtgtataccgctcccaagattcaagtccgctccatcaacctcctggaaaggatgaagaaatgaaacctgtgaagcgtcatcgttcttggaaagtatgcccggcgtgttcaagccgggccacaaagatgtttgactttgggactggattgtatcgttgtcagatctgctctcatcgttattcggacccagctggtcgttctttggttgataagaagtacaaattcaaaatattattgggaaattctgaacaatacgaatacactgtgatgggtgactctctttctcagattaatcttcacgttctggaaaagatttcccattatgacaaaaattgtgaacgtcctgtgcgagttgtcaaaactccaaagggttatccggaaggcactcgcagtgttgtcgtggctggatatacccgtttcgatggtaagaaattcagaagtatccgaattaatatgatcccggtttaaagttttcaataactgtaatcggggtatattgacctcactttaacgaagcgcctcaatcggggcgcacatttgaactgaaacaggaagactatatcatgtcagattttaaacctttcgcagttgctgtaaagaaccaaatctccgcgatgtccagcaatggcctgtacatgacttcggttgacaaagacgccctgtgggatctgtacctgtcgtctttcccggaaggcacgaacaatatctatcgtgagcgcactgagcacgattgcacctgctgcaagcaattcatccgtaacatcggcggcgtcgtatcgattgacgctgatctgaacctggtcactgtatgggacagcgtcaaactgggcaacgaatacgacgtggtggcagcggcgctggccaaatatgtcaagcagcacaacatcgtcggcgtctacttcaacgattcggctaaggtgagcgtagaaagcaaccatgaaatgggtgaaaacggtaatatccgcacctacaaccatttccatgccgttctggataataaattcgtcctgcgcggcgaagatatcgcctctaccaaaggcgaaatttcccaatcgatcgaagtgtttgagcgcagcatgcgtgagctgactatggaatcggctgaaatcgtcctggaactgatcgatcagaattcgctgtatcgcggtgaagagcaccgttcggctgtgcaaagttttgtacagagcaaaaccgaatacgctaaaattcgccccgatctgaaacaactttgggcctggcgaactggttggttgtccaaaaaccataaaccgttcggcatccgtaacactgtcatcggcaccctgctgactgatctgtctgacggcgttgaaatggaaaaggcggtgaaatcctttgaaaccaaagttgccccgaccaactatcgccgcccgactgccctggtcacgaaaggtatgatcgaaaaggcgcagaaaactgttgctgaactcggcctgactgaatctttgggtcgccgctatgcgaagtatgaagatctgacgatcaacaacgtgctgttcgccgatatcgatgcgcggaaagctatggacccgttcgatcaactggcacaggaagtcaaagtgactgaaaagtcgctgggtaagatcgaagagatcagtgttgatgatttcatcaaaaacgttattccaaaagcgcgttccatggaagttatgttcgaaggccgacacactaccaacctgatgtctctggttgcaccggaaaccgaaggcgctccgggtctgttcaagtggaacaacaacttctcctggtcgtacaacggtgaagtcgctgactctatcaaagagcgcgtgaaagccgctggtggtaacgttgattcgttcctgcgtgtgtctctggcctggttcaacaacgacgacctggacctgcatatgtacaccccggctaacgaacatatctatttcgctcgcggttgccgccgttcttatcatactggcggcgagttggatattgatatgaacggcatggatgggatcaacaaagagcgtaagccggttgagaacatcttcttcagcgatgaaagcaagctgaaagacggtgtgtaccagttcgtggtggacaactactcccagcgcgaaatgatcgataccgggtttgttatcgaagtcgaatacaaaggtgatctgaagcgctattcttgcgaaaaaggtctgaagcataaacagaagttctcggtagttgaacttcatgttaaaaatggcaaagttgttgacgttcagaccccactgacgccgactgctggcgtagaaactgaaatttggggcatccgtacccagaacttccagaaggtacaactggttctgaattcaccgaaccattgggacggcgaacaaactggcaaccgccacctgttctttatcctggaaggttgtgccaacccgtcgagcactcgcggcttctacaacgaatatctgaagccggaactggcgccgcatggtaaagtttttgaaatgcttggcgctaaaatgaaagccgagccaagcgaaaaacaactcagcggtctgggcttctcttctacacagcgcaaccatgtgctggtgaaagtaagcggttcttttaatcgtgtggtcaaagtcgtcttttaagttaaaatataaccaaattcatagaggatacaaaaatgtttgataaagcaacccgtctgaaactgcgtttcaattccaacaaaggccagctgtccgttgagcaggtgtgggacctgagcctgactgccctgaacgaaatggcgaaaggtctgaatcgcgagctgaaatcggccgcagtcgatgacgaagatttcatcggtaacaacacttccgtcgactccctgctgcaactgcgctttgacatcgtcaaaagcatcatcagcaccaagctgaaagagcgcgacgatagcctgtccgctgcggaaaaacgtgagcacaaccaggctatcctggaactcatcaagaagaaacagcaagaagagctggcgggtaaatctgttgaagaactgcaagccctgctgaaataacccgccgtctttggcgaaataatgaaccccgccatgtgcggggtttgttgtatgaggaacaactatgacaaacagaactggtatcaaactcacccccgatgttcttaaatctcacattgctgaggtcatttatgaagaccgtgaagtgggaggtcatcgggttatcacttgccacttcaaaatggacaacgactttgttgtatggggtaaaaatagttctacgtctgttgaccccaccaactttgatgaggagttgggtaagaaactggcctacgacaaaacgttctctcaactgtgggaattggaagcataccgggctatggttgttaaagattttatcagtaagacaactgaagaaccatttataaatcttgaagattatattgaagatagtcggacgatacgattatctattggccccgactatcgggaaggtgtggccactgcatattctattagatcgattaaatcaaataaatttgggttgttggatcatattgacatatgtctttataaaaccgataacaaacgacatgatgaaatcaaaaattctgaagcaatacagaaagcaaaggattttatcagatcccatatggattatgctgaaattaatagcgaatttgtaattcatatcgcaaaactttgttgggccgcccggtcagcggtcgtagacactacacctttgtgggaaaactgtaaagaaacagaccgtcaagatatgtgtgacacggttaaaaaattgctgttatcccccagagattatcaaccgaatgataatttgttgaaattgttttgggctattgtatcccaatttagataacaatgacgcctggtatatttgctgggcgtttcaatttgtgcatcgcagtataatacggctgtacattaaaccatgaggctacattatgtttcgtttgaaattgaacgaccaagatgtgttctacaaacgcttcaccttccctggtggcgaggaacacgtcaagatccaaaaggcgggtattcctgtgggtcatgtcaataacgtgaccattgatgctcacatcaaatcctctgccgacttcattgagctggccttgctggttaatgccgtgcgcggcctgggcaacgtggatcgcatgaccaccttccatgcatacatcccgtatttcccttatgctcgccaagatcgctattgtgacttcggcgaacctctgtctgtcaagtgggcagctgatttcgtcaacagccttaacttcgaccgtgtggctatcaaagatcctcacagcaacgttgtatcatctctgatcaataacgtacacgtggtccaacaagactacatcgtccgtcagtatctgggctggttcatccgtggtaacaatgctgtgttggtagccccagacggcggcgcggcgaagaagaccgaagcactcagcctgtccctggatggggttcctgttgtctatggccacaagaaccgtgacaccaagacgggtgagatcatcggggttagcatcaccaaccctgagctgattgaagatcgctatctggtcgtggttgacgacatctgcgacggcgggcgtacatttgttgaactgggcaaagagcttcagaagcacaatcctaagcatatgacgctcttcgtcacccatggcatcttcagcaaagggctgtccgttttcgacggcatctacgacgctgtgtatgctgatacaatctggtggaacaacattactgctgatggcgttcctttcaaaactgaaaatacaggacgtgtaaaatgagcatacgccacttagacccgatccacgcaatcgatttctacaaatcaggccacatctatcagtttcctgaaggtagtgagctggtgttctccaacggcaccccgcgctccaacaaactgttcaactcccaccttccgaagaacggtgtggttgtttggggtatccaaggcttcatgacctggttccatgaactgtttgacgaagcattcttccagcgcccgaaggccaaagtactgaagaagtacgctcgccgaatgaacaaagtactcggcccaggccgcgtcggcacagagcatatcgaagccctgcacgatctgggatatctgcctatcgaagttcgcgccctgcctgagggcaccatgtgtccgtatggcgtcccggtgtatgtgatgttcaacaccctgccgcagttctactggctgaccaactatctggagactgtgttcagttccgagatctggaagccgatgacgaacgcgaccatcgccctgcattacaaggcgctgatggtgaaagccgctatcgctacaggcgttgcgccagaccactggttcattgactaccagggacacgacttctccttccgtggcatgagcggatggcacgacgctgcctctgctggttctggtcatctggtgttcttcaaaggcaccgacaccaaccctgcgctggacttcgttgaagagtactacggcgcggacgaggacgattatgtcgtcgctggttccgtagccgccaccgaacacgctgtgatgtgtatggggacgaaggacggtgagttcgatacttttgaccgcctgatctctgaagtatacccagacggcatcatcagtatcgtgtccgatgcttgggactactggcaggtcatcgacgactatctgccgcgcctgaaagacaagatcatggcacgtaatggcaaagtcgtgattcgccctgactctggcgatccggtacatatcgtcggtggctaccggattgaatcgttcactgatcgtgctactctgaacattagtggtgtggcaagcagcaccgaagtcatccatattcaggagtctaacacctatcacctgattacaggcgaaggcacgatcaactccctgatggctgatgaccgcaatatcatcagccgttctgaagcggtcggctctatccagcgcctgtgggagatcttcagcggtactcagaccgagaccgggcacttcctgctggacgaacatatcggcctgatttacggtgattctatcaccctgagccgcgaagaccagatttttgctcgcctggctgctcgtaacttcgcctccatcaacgtggtgtttggcatcggttcctacacctaccagatgaacacccgtgacagcactggtacggcggtgaaggcaacggcgggtaaggtgaacggtgaattccgtgagatcttcaaagagccgaagaccgacaaaggcggcaccaagaaatcagcacgcggttttcttaaagtcattaaagactctcagggtaaactagtgctggttgacggtatcacctttgatcaggtacaggatgccgataaccaacatcagctggtctaccgtgacggcaagttcttcaacacccagacgctggaagacgctcgtgtcctcgccgcgcctctggtggcagaactggccagtcaaatctgataaccgaaggggaggtaactcccctgttttgaggaaatcccgatgtctgttaagatgaaaggtgccgaatttaaagcatactatgacgactcagagtattgggttcaggatgcttggcatgattatcacaacataaaggttaatggggaatatatcgatgatatagaaagcgaaagtattcccgatgatgctgatgttgtcattgagtcagggatagtttatatccccgttaaaagtgaatccggttatgaagaaaaagaagtccaactggttacccacttcaagaactggcgcaaacagcagaaattttctactattgttgtggtagttgaaaaagacaaagctgaagaaattatagcctcaattaaaacgatacctggcatcaataccgtcaagtgaggcgataatggattcctgtctattagatcccgagaacgttcttgtggttgaaattgaaaacaacaagccgttcattttgaaaatgttggagaaggataataatcctgaaaccaatcctaaactatcccaaaaggggaataacgatgattgaatcattagaatttaagaatgccacacagacggttgctccttccaatcacgtcatcgtcgttgacatttcttattccatgtgctatgctctgccgaaactgcgccagcacctgaaagaaaacctgccctctctggttaagccggaagacaccatcagtattctgtacttctcttctcgtggcgacttcggtactgtgttcgctgggcgccaggtcagcaacgcatctgacctgagtgagctgggtaaactgatcgatcgcttcctgcaaccgacgggctgcaccggatttgttgagccgctcaagctggctatcgaaaccgccaacgatctgaaaaagtccggcgtcatcaattccctggtgttcatgaccgatggctatgacaactgctggcgttccagtgaaatcctggccgttgctgagcagctgccaaaggcgtacgacaacatcaccctgatcgaatacggctggaactgcaaccgcgaactgctgcagaaaatggctgagtgctctggtgcaacccatgtattcgccgaaggccaggaagaatatcagaccgaactggaaacagcgatggtttctgtcgccccgcgcgtccgcgttgatttcagcgtcatctattcctatgccgtttatatcgaaaacgggattccgaccatcctggccgcccagtctgatgaagaccatcctatcaattacgtcaacatccctgagagcgtctctaagctgtgggttgttgatcctgacatgatcgatcaactggataacctggcggacgttgaagcggcatatgtgctggctctctttggcgtgcatactatggatgccgatctggtgtgggccgcgctgaaaaagactggcgatgtgcgcttcattaaacagtacaccaactgcttcaccaagcaggactattccaacatcaaaactgacatcacagcagcgattgtagacccggcgctgcgcggtgtggacggtatcgattacaatctggtgccgccggaagacgcaactactgttgttgatgttctgacttacctggcgggagcagatgcacaactggttgttgaccatcccctgttctcttacaagcggatcggtcgcggtacggtacaaaaagccgatgataccgaagacaagctggcggcagaaattgccgaagccaaatctaaagaagagcgtaaagcgctggccctgaaactggctgagcacgaagactggactcctgtgtttgagccagtgaaaggcgcgggcgttcccatcagcaatctggtttacaactcggcccgcccgaacatcagtctgcagactgtgcaaaacgggaccgtcatcatcccgaagttcgcacaaaagaaatacgatctgccggaatctattgatacatggcagtggaagaactacaccatcgtcaaagacggtatcatccatatgaagacccttcctgtggtctgctcggtggaaaccgtatctgaactggttggcaaaggcgttgaagtttacggtgggccggaagtgttcatcgtaaatctgggcagcgttcctctggttaaccgcgcgatggttaagaacatcagcgccgcgcagttctttgctgaccacgtccgtctggaatccctgaaagccaagcagaaggttctcaaatacttccgtgacgaactggttgggaaaggtaatgccgtgggcctggcgggcaaatacggtttcgaagcggctgagtttctgtctgcgaatggcatccgcgattacggcttctctccgaagaccgcttcggttgagtctactgatttctacatgagccgcgaactcaatgtgaagatcaaaggcgcttcctcgctgccgtcaattcccgccgttctgaagaaacaggcggacaagaaacctctgaacgctgcggacaaactgattgccaatgctctggccgaatacaatgcctttgtcaaatctccggcggtgacagcagtcccggaagcaacgcaggccaagatcattgaatcttggatcagtgacgcggccaaagcagctatcactcaagtgcgtgaactgaacaagaccctgtctaaatcgatgtatgccatcgttgcaggccatggctggttcaccgacctggatctggaagagtccactatggaagtggaagttgacggtgtgaaatataccgtcagcgcagtcctggaagagaaagagatcaaaatctaaccaactgagccggggaaacccggccttttcataaggtgttattatgtctaagaacgtgtcttatatcgatgttatgcgccaccttgttcagtatgcaggtgacaatctgaatatggagttatggcgtgaaaaataccactccgaaacgatacaacgtgctgtcgacaacatcgataaactcgaagatcaattagaatcgctggccccgttgcgcgtcaaagaacatctgggtggtgatgaacttgacgccatcgaaatcatcatggatttggaagaagaatatgatgtagagatcagtgacggttgggtcggcaaccacaaagatgacccaactctgggtgatctggctgaatatgtggtgcgtttagtcaataaaaacggctgaactggtttacttcttcaataaaagaaactattattgaattcgtagggcgggaacggctcccgcttgattgaagaaggtcctatattatgagcaataagaaagtcgaaaccacggttgaaatagaaaagaattggggtttcctgcgagccaaaggtttccgccgtgtgtatgccgcgaaggaagtctatgtccagcgtaaagacgttataataagcaagaagggtaagtcctgggtggccgaggaagtggacgaagacggcatcgtaggcaagattaaggccaaggccgaaatcctcttctctcttctgaagcaaatcaattaaaatcaataacacgggcggggtatgattgccccgtctatttgaaacgcaggatttatatcatgaaaaagttaatcatcgccgtggctctggtcaccctttctttcgccgcccatgctgatcgtgtggtaaaaggtatctcgtttgacgggaaatattccttccaggcgtttggcgccgacctggtattgacccaaggtaaaaagaccatttatcgttgcaaatacgatgaaacgatccgtgggatagataaggccaatgacccgtatattctggacatttaccagtgtggtcaaaaaaccctgggcgtaaaaactttcggtcgaattgaagacggcggatgggtaacagttttggcaactgtcaataacaaaactgtggaagttttccagaaaccgttcaatatttacactgaggcgaattcattatgatcaagaacccaagtattcatgatgcggtgacaaatattgtcagaagggaatttgattgtctaagggttccggctcggcgtattactcgcttattggaggcgaaagtcgccattgaagaaggtgatactaaatctgcaatgttgtcgatgttggaagtgattgtccggttgtctgatgatgacaatgttaaatctgtagacgatctaacaaaacttctaaacacaacaattcaggttcgtttagatacaggactattcaccttacgtgaactgatcaaagaaggggttggaaaatgattattaattgggaattagtcggattggtgctcagcattattttcggcttggtgggtgtaatttgggtaatcattggcatctggttctatcgtttcttcaccaaatatgagaaacgcgatgctgaacgccgggcgcgtcaggatgatattcgaaatcgccgggagaactggtgatggaagaaaatgtctggcatgtcattggcggcaatcttctgggtattctgatcgtctggttctgttattggtttggtggcaaactggctaaatttttccacgggcgtgactaactaagggataactccatatcccgaggtgtgccatgtttctgacttcctttatcgactggatgaatatcatcaatggcctgaggattcctgtgggaaacctcgggctttctcgttcttctatgccacaaattgacgctgataaacagcaagacttccatgattatctggaagacaacggcgtcactatcgatgcatctcaagttccgatccggtcattgcgtctgacccagaacgaaatcaacaaaatgaaagtctggaaaataatgaaacagatcaggaacaagaagccgatgggccgggtttgggtgtcgtcagacaattacgtcgttgatggttctcatcggttcgtcgccgctctgaatatggatgggaagcagcgcatgaaggtctacaaagttgatatgcctgccatggaatttgtcaaattagctcgacaattcaatggtgtgcgttatcgtactgtttctgatgcgcgtttctgaataaagaataatattgaaaacctttactcaataatccttccgaactactatttcctcaatgaacaagagggaatcaccatgaaacgtttaatccttggggtgctgctggctggcctggcgctccccgccgctgccaaactgaactccacaggcgaaaaactgtggggagatctttcttactgtgctggatggtctcaggctgttgccatagacaagactggttccatcgagaattttgctgaattgtggaatacgggtaacgtcactgatgctgtagttaatgccgggattgaatttaatcgttacaaacaaggagcctataatctgaaaggctacctgaatgatgacaaattcaacaaaggcgggatggacgcagcagatctgattatgaccgggcgtatgggtacagcagggcgaatccaggttagacaatgccgtgcacttcccatcccggctctacagaaaggcgtcaccatcggtcgtcgtcatcttgatcttatcaacgatggcaaccagtgtgtcaaagtattcgaatacagcgcagaccaggttagtgatccacgcctgaagaaagaatggcggactcgtgctctggggcttcgggcctggttggtagagaatgatcattactatcaggacagggttgatgcaggtctcaaagatttatcgactaacttgtctgtgaatctggatgatccaaggctttcccgggaactccaacagacccgtattgactgtgacaacatgatgaaggagaacgaataatgtgcgttaaaaaatctactgtcgttatcgtctacctgattttggtcggtgtctttggtctctgggcaaatcatgcattggcgattccggctaacaatctgaataaatgcgctgcatggttgtctacctatcagcaatttcatcctgacgataaagatacttccattttgctttcagattttgaaggtgaaatgaaacgtctggatcagtatagcacagaccagattgagaatgctttggatttaccaatgatggaatccgccgccgacaatagtcatcaaactgttgttgatttaacgtattgccgtgacattgcgattaactttacccgtaatcaaaaatgaattcgggttaaaatttaaactacaaattgaaactgaaagggtgatttcgtgatgctgttaaccaaaactatcgttgaggctttgattgaaaagaacaaggtgtttgctcccaacgcggcgaagatcattgcagtccatgaagatgggcggattatcttcgccgagaagttcgagcaaggtgtcaaattttggtattccgacaccatgcgggaaagcaccatgcaggggatcatccacaaactgacgttgatcgccaagcgtaatgatcaaggggattgggtcggtgttgctgacttcagcacgaagattacaccacctgccccaaaatccagacaagaacgtattctggaatcacaagaaaaactgcgcgccgcgcgtgaacccaaacctaaacctgctccggtggctaaagttgttgatgtcaagcccgtaattcagcccgtcgttgaaaaggttgaaaccgaaatggcatctgatttcatttcaattcgagatctggatccgttatctcggcggtcgcctgaaatgcttttcatttctttcagagcgaacgggaagattatcatgagcaagtctttgcgtgataaaatgtcctggaccactatcaatatgttagtgtcccgagacttcaaacgtttcgctgtggcggaagggaaggagtataacatcaaccggagcggaacatacgttaatcgcgcgttatgttccaaactgtctttcccagaagattctggtacagtccgcgcaattttggaatgggacgacaaattgaatatgtttgtcggggaattccaataatctataatatcggggcggttataatgaccgcctctttgatttgaaggaatatattatggcccacatatggtgtgatgtcttgttggttttgtatacgacggccagaaacgataaaacaaattctgcgttcttcccagttccattttcatcaggtggaatgactgtcgcacgtattcttgaaatagagaaacaacttgggcaacctactatgttcagccaggttcaagttgtggggtatgaactattaaatgaaatgttgatacctgaagtttccgtggaaagggttattacaaaccgatcaacgatggcacaattaatagagggaaataaaaatgcctaacaaatcttttgaattaaaattccgcgtttggcacgtgccacaggttcccgggaaaatgttcatggtggaagttcccacgtatgctgaagcagaacgtttgaaatcggcgctggccgattatgatctgttccagtacgagaacaatatcaagcccgattattgtaatgccagcggtattcagatctaccaacacgacctcgccgaagaagagatcgaagaaatgggccttgatgaccgttgggttgacattgaggacgatgaagatctacaggaatatctgaatcaccttcgttctacgggctgggaaataaaatcatgaccatgatcaattcgtatattgttcaaaagggcgatacccttatggggatctgtatgaaattttattcagatccctatatgtattcagatatagcgaagtacaacaatattattgatccgaacaaaatctacatcgggcaggtgattaatttccctcgacccgtcaacgatccccaaacagtcgttattccggtggaacccactcaggagtgtttggatgctatcgctggtttattccaggatgggttttgtgatggtcgtattgaaagagatatttatgccgccgttgtgcgctcggctctgaaccaataaattattgggtatcggtaaataagcgctttattcaataaaatttgttaggtaagctgtaatcctcttgtagtgaacacagaagtaaacatttaacataaaccaactggagtaatccgaatgaatcgtcaagaatttgtcgctcacatcgcccaaactcagggtgtgaccaaaaccgaagctgaaaaaaccgtcgcgtccttcatcgctggtatcaactctgccgtcgctgccggccagtccgtccaattcgtcggcttcggcaccttcgaagtgaaacatcaggaagcccgcgctggccgcaacccgcttaccggggctgcgctgactatcgaagcgaaaaacgtcgtcaaattcaaagtcggcgaaactctgaaaaacgccgccaacggcaaataaatttcagtgctgatcggcctggctctacaaagtagggcgtggcaaaaggaaaagccggggattgccccggctttttcgttcttgggaatcgggtaaactataccaacatccccaaaggagaaatcaagtgacagcatttaatcagcatgttaaagcgctggagactcttcgcagagaaataccaatagaagaaatccagaaattggctgaacaatattttccttatgaccatgccaaccccggccaaatggaatgtattgttgaagccatagatgctttggccaacaagaaattcaaacacgtgattatcgaagctcctacgggagtcggtaaatctctaattggcacaaccatccatcaggtgttacgccatcttgttcttgaagcaaacccctatggccaatttcgtacttccatttccacgccgaccaaaggtctgcaagatcaatatgcagctgaaaaagccgttgctatcgatatcctgaaaggcaagaagaattatcgctgccatatgcatccggatatctattacaacgctgtacaatgccgtatcgcttgccgggatgggcattgcagcaagaggcgttgcccatacgttcaggcgcgtaacctctggaccaatatctcgtccctacgctgcacgaacgcggccatgatgattgagatgtgcaccaccatttgtatgaagccagaaaaccgggccgacatgcttattttggatgagtgccataaaatgccctctacgctcctagaccatacgatcatggaatacaatacgaaggtattggaaggactgagatcgttgcctcaagggaaggatatcgtccaagcggtaacagagatcgttcaccattgtaaggactacgagttagggaaactgtattcgttggatggatacttgtttgaccgattccttgatcttctggagaaggttgaagccattttaacagaactggaagaacttgttgaggacgaccgcctaaccgaagcccaagtgatgaagctggccgatatcatagacatcctccataacttatcagattattgtggtatcatgtcccagacgcaggccagtacctttatcgtacaggagaagggggaagatttcatccaattcaagccagtcatagcatctgacgtatctcagttcggtctgttccgcaaagctgattatcatgttcacatgtcggcaaccatctgcgggattgatgcgtatgcgcgttccttgggtattcgtcctgggcaataccataaaatacagattgggaacccgatcccgattgagaatcgcaaagtgaattacatgccggttatgaagatgacgaacaacatgggtgactatgagatgcgtcagctggcggggtttgttgacgagatcatcgaattccatcaaggccagtcgggcatcattcatacggtgagttatgaccgggcgctggcgatacagaagttcagcaaatatcggaacatcattcacgttcccagaacccgcaaggctctgatggaactgatggataatgctttccgtacgaagacaccgtgcatcattgccagcccggctatggaagaagggtatgacttcaaaggagattatagccgtttccagatcctcatcaaggtgccatatgattaccttggtgacccattggttgcacatatcaactctgtggatccttcggcgtatttccggaatgctatactgcgtatcatacagatgtgtgggcgttcggtcaggggcgtgaacgactgggccgcgacatacatcctggactcatcctttgaatccttgatgatgcgcaacccagagttctttccaacttggtttaccgaggcagtgtttgaagtttaataaccagcaataaatgacaggcgacatttgagattcggtgccagggatgtcagggatatgatcatatcatcactgtccatactgtactcaattgtcgccagttgctgggtttgaacattgttgtattcactgtagattaagtcctcaccacggaaaccgatctttccatctgtgtcttgccaatgaccttgtgtcttgtcatagacatggacgcggaattcaaccatatggaaaagggcttttggtatactcttcaatatactggtaccgacgaccggaatctcaatattggcatcattggccccgccttcatatactggcgcccaattgaatataggatcaccaccagcgaccggagtccttttccaatattggaattccgggttgcctgaatcgtttttctgcaacaatatgacttcgccacctgtaaaattcgtggtgtcaatatcatctcttgctaaaatatccgccggggagccgataaatttccagccatcacgatccaataatgacttataatagtctgtgaaaacgttgctgtcaccagcattgttgattgcgtctttgagaccttctcctgtgaccatctcattgactttcaaccacatgtttttaacggcagacgctgccgcaacctgaccttgtgtaccgcctgcagcgtagtcatagatgatgtctacgttctgtattgcggtctgtatggacaggagaagtcgttcgatttcagctgcggttaaactgaaacgataagaacgttcagccataataatgtcctcatgataaacaagtttggagatatttatatcgtgattgaaatttacactgacggcgcttcatcgccacagactacacaagcggcgggatgggcttttgcagtcagcccaatttctggtggagttcaatggaatgtattctatggttatttgccaccaccttccacaaataatatagcggaactcttgggtgttattaatgctctgaaactcctgtggaaattttcgggttgcggtgagcgtaatatcccaaaggccaccattatttccgacagtcaatatgtcatcaatagtgccaccaaatggcggtctaaatgggaatatgagggcatgcctcccaagaatactgaattactccttgacttgttcaatatgtatgacaaagtttgttcaatttgtgaacttgaactaaaatgggtcaaaggtcatgcgggtacaatcggcaacgaaattgcggatcagtggagtgtccgggccaaagaaaatagcagtatggtcctggaaaacgaacgatttcgggttaagaaggttgtcggttcattcaatcaatttatcggtatctctgagggttagatcatgggcatgaatttcgtagacagaggggaaaacgtcaccaaatatttcactgacgaagacaatgagcgtgtcatcgcaatattacgtgactggatacccggaaggaaaaaggcgatagccgaagggaagcccctacccaagatcccgaattatgtggccgccaaagtccatatgatcatccacaaaatgagtacccgctacaactacagagattatcctttccgtgaagatatggtgagcgatgccgtcgccaatattcttcgatatttacacaccttcgacgtcagccatgtcggcaagaaagggaagatcaatttcttctcttgggtgaccatgtgtgctgatcgttcattcgcccgcaaattgaccatcgaagaagaacacacatatatcaaattgcgttcattcgaagacgcgggcggctttgcggcgttcagtgatgatccagattttcagcctcagacatttgtggacaacaccgggattacaatggattttcgtgagcgcatagggcacttcgaaaacaagaaagaatcccagcgtgaaaaggaaaggcaaaaacaagccgacctcaaagaagacgaaaagaataaaaagattccaaaaggtatacttcaatgcctccgtggaccgcaaaataatactaccgcacaggccgaagatgattcagaacaagacttcggcaaaacccaattcagccttgaagaaataatggatagccctacgctgctatccgaattatcaggagaaaagaataatggcgattgctaagatcggcgatttacacatcgggagccgtaatggctctcgttatgttcgtgacttcattaagaattatctcatcaactatttcattcctgaactcgttgatgccgacatcaaagaagtctggcaattcggtgatacatttgatgtccgcaaattcatgtatgggcgcgacaaagattggctaaaagatgagttggtcccggctctgcgtgttgctggtatcaagtggaacggtctgatcggcaaccacgacatcactctggaagaatcaaatcgcatcaactggccttcttatcttgtcgaactggcccctgatgtcttcacctattactctgaaccgacagaagttatggtagaagggaaaaaggttctggtgctgccgtggatcaacaaggagaattacaatgcatctattaaagcattacaagatacagacgccaagtactgttttgcgcatctggagttggcggggttcaaaatgtaccaatcatctgtttgtgatcacggtcagatcgacgttgcgttactttccaaatttgaccgggtcgacacggggcattttcatacccgttcgatggaaggtaacattcagtatttgggaacgccgtatcacctgacctgggaagattacaaagacggcgacaaccgtggcttctatgtggacgacctgactgatggcggtgagatgttcatccctaacaacgccagccagaccctattccgttatgtggaatatgattataccaaactttcttctgacgatgaaggtaattggatcgacccggaatggttgaacaccaagttgggtattgaaggacaaatcgttaagattatcgtaaccaatcgcgataattctaaacattacgagaagttctgtgatgccatgaagcgctgcaaatgcatcgattacaacttcattgacaagactgtgacggtttctgctgaaaaagtagaagtcaccgaggaaatgatagccaccgatgccgtagaagttctgaagaatgatatccgcgctgctgacaatatccagcgcccggaatcggtctgtaaactggccgaagcattctatacagccgcccaacaacgtctcaacactctggatgcgtaacgatgactgatatccttgaaaaattcggcaacctgttaaaggaagctacaaccccggaagatatcccggttccatttgatgttcgtggtgatgtcacccacaaactcactttccgcaaaggccgcgccaaaaacttccgctctgtgggcaatgagttcatggagatcgactatcagcgtaacccggcaaccctcgttacatcagatgataatggcgctggtaaatccactatgctggtctggctgttattctttgtcctgtacaacgatacttacagcaagaaagagaagaaggccgggctggtaaactctcagaacaaaaaagactgtgtgggtgaagtggaattcgcctgccggggtagtgaatggaaagtccgccgtgggatcaagcctgactttgttgaagttcatcaactggttgatggtgaatggaaacaggttgtgaacgaagcggctaaagccgacatgaacaaatatatcgtcaacctgatcggcattgaccagaagatgtttgagaactccctggttctgggcaaagagaaattcattccgttcacagaaatgtatactgccgaccgccgtaccatggtggaagcaatatgggatctcggattcttcagcctgatgaacgaggacgttaaggcaaagatcaaggtgctcaacaaaacgctggaagatatcttccagcgttttggtatgaaaatgattgatcataccaataagaaaactcagctggcacagatcattgagtctaataatcgtatccaacaacaatctgcagaaatcctcgagcaggaacgggtccggctttctaatctggatgcggatatttcttcgtatcaagatgagatgtctcggctacaggaagtacaaatcaataccaaaaaggaaattggtgaagtagaaagccgcctgaatcaggaatcgatggaagaaatagaaaaattaaaagcccaatacgctgagaagatgaaagctgtagatgacatcgcgtcagacaaagctgaagattatgagcgtatagaattgtcttcggctgaaagggcacttaaagatattcgcgaccagggctataaggtcactgaacgtaaaaatgaggtgctgaaccagcgcaatgagaatctcaatgttctcaacgaagcgatggaaaagctgcgttatggcgaaggattcaggattaaattccaaactgaaaaagaaggatatcaggaatccattcaaaagtttcatgatatgggtacttgcccgacttgccagcaagaagtgtccgaagaagctaaatctcaggttcaatacgaaggcaatatcaaaatcaaggatgtagattctcgtattgaacggctggaaaccatgctggaagaaatcaatgccaccatagcagagcacaaagcgaaagatgatgaatttgttcgccagatcgctgaaatcgatgctgagttaagttctctgcgggaccaagcgacagaagcacagaacggcattgaaacgattaaacgagatattcaggagttctacaaaactgctgaaattgagaagacctctctagatcgtgagcttaaatctcaaatcatgtctagccgccaggcgctcaacaccagatttgaagatattacggcatcattacaacaaacgttagagacagcctctcgggggatgcaaaccgtcaagggtaagattggcgagctgaaagaccgtcgtgctcctctcgttgcctcgattgccgatttggagcgtaaactgtccgtacagccgactccaaccgctgacctggaagcagtcattgcaggtattgaacaatctctgaaagatctggaagaacggcgccaaacaacagatgaagaacttcaggatcataatcatcttctccacttcttgaaggatgaccagaccaaggcccgcattatctccttgtacctgccgttcttgaacaagaagatcaacgaatatctggagggcatgaatatgttcctggatattgtggtggatgatacttttgatatcaccatgggcacagccgggcgtaaaggccagagcctgttcagcttatcatcaggccagcgcgttcgtgttaacatcgctattaccatggctctgcgtgacgttgctaacctgaaagcgtctgtccaatgcaacatattggtatttgatgaagtgctggagaacctgtctgagcgtggcgtacaggaatgcgtggagatgctgaagtacaaattcagcaacaacaacctgtttgtcatcagtcagcgtgagcaggaattccaagagtatttccaacacaatatccgttatggtctgcgtaatggtatgacccaggtgattagcaaggagtgatcatgaaagtcgtagttgctatcacattttatctttccatgggtattataggcatcgtatcaggttataacataccaaatatgataggactggtatcaagtatatcagcagggatatttttgattggtactggagtttaccttcttatcagaacatgtaaagagaacaaatgaaagtcgtccatttcaagaaggagccatatgacgtctacatcgggcgacccggtaaatggggtaatccttttgaagtcaaagatcatgggcgcggtaattgcatcggattatttgaagatgatctttatcgccgcttgataaatggtgacatcacagaagatgaactccttgaactggacgggaaggttttagggtgttggtgtaagccgcgcccttgccacggcgatgtttatgtcaaagtggtcaaccgtattaaactattccgattgatgggtaaatcctttgtagagcacttgagacaaacatatgggaaataacatagacgaaatattcgaggcatccaagatcgcatgtgacacctggaatagcaagaacccaaagttccctgtggccattggtgttatttcataccatcttgaaggatatgtaatatatgtagacggtaagattaatttctatcgtgatggtcacgaatttaacggattattcaaggtcgggaattataaaacttcattcgatgaccctatggaactggtctatgcctggttagaatgcatcgaagaatgttataacgccaaatttgaataatgataaagggcgctaattatctggtgccctttatcttttaaccctgtcaggaggctcaatcgagctgcaagtcgacaaaacaaataaggaacgccatcatgacgatgacaacgttgaaggccatggctgctttcgtgacctttaccattgccagcgggagtgtgcacgcttcccaaaatacatcacaatgtgactatgatttttctgagcaacaactatccaccatggcgactgcttaccacgtaggcaagtcccaatctcttggttacaccctggcagcaatatcctggagagaatcccgtgcgggtgaagacgtcgtgtctatgcggtctggtatcaaaaccgccaatatgggagcattccaaaacaaagtccaaagtgttggggaccgggaaggatgtaagaacagaaagtgctatgccaatgtagctgtgaaacttttgattgatcaggagtatgctgccaacgccgcgctggatgagatgaatttctggatgaaccaacataatcagaatgtacgcaagtctctttcatcgtataatgccgggcattctcgcaacagcaaatcgaattcgtatgctgccgatgtagtgaagaaggctaaatatctgcaaagatgtgtgtctttcaaaggcattcccgcgagttcgaaagttgatcctcaggtgatagccatgaacaagcgcacgatagagaaactcaagaggacgcgataatgaatatcaccccatcccaaacaggttatgagcatctcatggtattcctggctattcagggggccaaagagggcatcataacttcagaatacagcgggaccgtccgcttgatcgactacacggccagcgaagcatttatcaagaaatgtatcacagcatggaccaaatatgctgttgggacttatccggcccctccttctggggaactgttatttgtcgtgcctaccttgacggcaaccgatactgacgagatcttttccgatatgctgtctaagggatacatcacttatgacacccagcatgatatctatgagttctctgctctgaatcgtgtgttcggttatacaatcacgtcggaagcgaatatccctgattgggggatcctggcttggggcaaagacggtattggggcaacgtatgcttcgtctgatgttgggccagtccttattgatccgggtgttaccatggaacaataccttgctcagttccctcagcatggcgtgaccggtagcgacatcattatcgtataccctggctccaatgctctggaacgcctggtttcgggatgggatcctcatctgaaggcggtcgtggaaggtatccggttctacatcccagtagtaaatccatagcataaaataattcaataaaaggggcttcggcccctttacttattcaataacccaccctataattcaatacataagcagtacgacgaaacaaattgaaacgaaggaactacattatgaaaattatcctcgacgcatatatccactacggcaagaaatatctgatggcgaaagtgtacgaaggtgaaaccctggtacacgcccagacccacgaagatgcaaaactccgcgaaattctggcacgtgacttccctggtgctgaagttattgagccgactaaccaggctgaagttgacaaagagtgggaacgcgaatggagtccggctgcgttggccaccgctgaaaagaactggaataaccgtgaaaacgccaaccgtccgttccgtcgttgaggataaagatatgatcacattaaaagatttcacgaaagacgactatttttgtttcatgggtgccgagaaatttgagaatggggacttaccacgaatttactatttctctgacacggaagtggaagaatttttcgatctgatgggcattagcaacgatcaggacagcggtaattgggcttatcttctgcaccacaatgaaggatttgtccttggttggttctatggagatgaatttcctgaagtctgctggaaagcaggtgacagttccgaaagggttgaatatctgttggagaaacttgacagcgaaaccctccctctttgggcagcgtcagttgcctctgctgaacaacggttttgaattacaaggggctataatgcccctttaatttcgctaattaagggaaaccgaccgctttcttatcaggagaaccaccatgtcaacaccgaacttcttagatttcatgaaagagcgtgaccagttggacgaagcgttcaactcagctccttatgaactcaccatgggcaagaaaaatgccggggacgttttcttcactttcatcgacgaagacgataaagaataccgcatccagttttataccccgcaaggtctgggcaaaaacgtccgccaggtcttcatcggtcagaaacgtggttcagtttat

SEQ ID NO: 19 - DNA, 51106 bp, unidentified
  source 1..51106: mol_type = genomic DNA
aaaaaaagcacccgtaaagggcgctttgtgctatccggctgaagagaatcgttcggcaaactccgccgttacctcatacaccccgccacccatcggcgcgagattaacagagtctgccgttacgacgaatacacccattcttccatctggtgccttccagataaatggcttcgtcacgtgattctggcaaaaatcataaaccgcctcccaatccctcccgccataaacgatcggaaccgtccggcgctttgtgttgatgccactcgatgcagtctggatatatccattgccgaaactaaccgctcgaacgttgttggaaacggcgactttcgccgcccctccttgaatttgagtacaccatgaaaaagaatccactgttaacccctcgttttctcgtttacgtatttcgcaattcgcccgttttggctcagtgcctccgtgaacatatcattcacgatctgccttactccctgctctaagcccttgctatcctgaccggaacccatcgtgatgttcacgtcgcccatgctaaacaccattgctgccgatgccgccacgttaccgccgttagtcacgccagatcctgacgaaccgttagagcctaccagaccgccggaagcatagccacgcatcagcctgtataaattttccggccctaatcggctggtcgcctctttagtaaagacgaattcgccaccatgcacaacgccttttggttcgtacttgccaccgttgccagtatagccgccgctggcgaaccctttgctgaacatgctggcgaagctgaacgtacctccaccgccgaacgcggcagacattgcattgaacagcgccattttgattaacatgctggtaatgtcattaatcacgctttttgcgaagtcgctaaagctggccttaccagtcatgacaaaatcagttagcacagtagccattccgttaaatgcgttttgggtgatgctcccgatattggagtacacgtcattaacttcgttgccaatgtcagcccaggcatgcgtgaatcccgctttccagtcaagcatctgcgcatcctgctgcgcgtaaaactgttcgcttgctgcctgcatctgcttaaattgggcgtcgtcaagcgagcctccattattcttccagtccgccgccatctgcgcgtttgccctgtagcgctcctgctgcttactccccatcccagcggtatcctgaagcgctttcgtcttctcagccatctggttctgatacttcaccgacttgtcaagcaaggcattcaggcgctgctgccggacaatctgatcgcccacgatcgctttctgttccgccatagcgatgatactttgcttattggctaacatctgcttttcgctctgcgtcagcttacgcttggcgctcgcttcttccagcacctggaattttgcgacagtggtaaagtagtctttgcgctgctggctgattttgtcgtcaagccctttgtgctgctgcaatactttcaactgcgcctgcaatgacagcaattcggactgatactgttcatcgatcttaaccccggcgtctacctgctccttcctggcgtttcggttcttcaggatatccttttcttcctgatttaccttatcctttgttgcactgctgtagccgccggacacgtttttgtttttggccgcgtcaatgtaacccatttcgcctttcgcgatccttgcctgctgctccgcaatggtcttcgccagttccgctgatttggctttggaagccttgattagctgttcttgctgtgcaagaaaatcattcccaaagtcacccatgccaggcactttctgcaactgccgaccagcatcaacgatgaattgtgcgatcatggcgtcgccatccgtaatcagtttcctgataacgttgatgatagatgaaaccgtgtcaacaataaggtttagcgcgccgacggtgtgatcacctacccacttccaagagtctgcggcccacttcttaatgtcagtccacatcgtttcaagcggcgttgcgctgtctgcgatatccttcaggcgtttatccatcgtgtcagcaaagagtttcgttgccgcttccgctgctgccgtctcacctttggtttttcgcaaagattcgatgtaggttagctgcccttccttcaggaaattaaactgatcattcagttcggcaagccccttaaccggatcctttgcgatagagtcaaagtaaccagtaatggtcttttcgctctccccggtctgcgccgcccattccgccgtagtcttcgtgatcgccttaatctggttgatgctgtattttccagattgagccagtgacgttgcgatcgcctgaatgcttccgacagtagccgatgatgttttgttgatttcatcggttagggaggtgatttgtccggtagttgttgcagcatatccaccagtcagcaccaatgcattcgctagatctcgctgtgatttccaggagtcgtacccagctttagcgatagccgcaagagcaacacccaaagcaaccgcaccaactgttagcgggttaatgtagctcaacaaaactttgaacgtgttcccgatgccgccgaagctatccttgatttgcccgccttgctgaatagctactaaccatactggcatcccggaagcaagagacgttactacgtcagtgatctgcgccggaagttggcgcatcgccattttatattgacctgctgaaattccagcaggccccatagcattctgctgtttctttaacgcctgctcttgctgcttcagggcgttaatgaacggtgccgcttcagttgaaacgcctaattgtgccgccttcatttccagcagttcggcgcgagtcttgccgatcgagtctgcttgctgcttcaggctggcgacaaaatcacgcccggagttagtcgccttctgtttcgcctcagcctcagcgattgccgcgcggccttcttcggttagcgccaactgctgctgtctcagcttgttggtggtcgactcaatgacagcccccaggcggaagaattccttgtccggcacaaggcccaattgccaggccttatccagttcttccgaagccttgcgcaagttagccattttcgcgatcgtgggatcgatagcgcccgcgatgttgttgaaattggtcttggccttttccgtggttttcttttggttctgcaacgcgcggttcatttcctcagtctgcgccgtcgcgcgcttctcagcgtccgccagcgactgaagacccgccccggtttgttggctttggttcttcagttcggcaagtgatcgcaccgctctgtcaacctgcgacacgtcaacgccgaacgtcaagccagctactttatcagccatgttagcccccatatgaaaaaagcgcccgtaggcgcttattgtgattttttgtagatctgtttgaggtattcaccctccaggatctgcaagtcaagcaatgccgcttctcgattgtcgattttatacaattcaaagaacataggcaatgtattatagtccagccccgttgggccattcatcccaatgcgccattgcgtttgcatggcctggaatagttgccaactttgggcggtctgctcatcgaagaaaatttcctctaaatcagcctcgtaatccgatcgccgtaaaccatactcagcaagctggcgatcggttaactcaggctgaagcgttagataaacagcccgccttagacttttgcacgacgcccggcaagcgcggccatgtacgtttgaggtaatgccatgacaaaggaagggtaatgcgagcacagccaggaaatgttttcatccgtaaattcttcgtccagatcccagccttcggccatgaagcggataaaatccacgttacctttcggcgctttttcttcgctttcataaaactccttcatttcatcggtggagtgatgttttaccgtcatgttaatggttgcatctttgccatcggggcaagtgaaagttaccggaagtttgaaggagggaagttcgccgccaatacgaattttaaacttagccattttgtaatctcctgattggtatatgttgattgctattatgcataaaaaaaggcgaggcacaagccccgccagttaattaagcgttggttacaggcaagaaaacgtgcgaacctttaagcgcaacatcaagcgttaccgtctccatctcgttgacagccgtagtcggaatgtcatcgaatgatgcagtgccagaccaataacgaacctcggatgctcgcgggacgtacatgtacatcgctttcgcctctttgctggcgtctgctgcacgcagcaccgggtagattgcgttatcgtactcgtgcgcaaacgtgtagttaagcgtcaccgccgacttataggtaggctcggactgttcgcgctcatcgctcaggcactggtagttataatactgctgctcgttgccgtctttacccaagtcctgaatacaaggcaactcgatccagtcagtgacgacgctcacgcttccggttgcagccgtagggtatttgttggtgtcggaggtgtcgaactcttccagagttgccacaccagccgataccgacttgacgcgagccactttatttacaatgtcgctccaagtgcaatcggtaaagatcacgatatcgttaacgtcgagtgcaccatctgtcaccgtgattttggggtttttcacgtcgtttgtcattgcggtaaacggaatctccgcaccgcgagccttctcaaagaagaccttagcaccgtttggtaaatgcatgttgaatactcctgtttgaatgaaagttttactccgccattatgcctatatatttccggactggcaagaaattataagaatctcgaagatcagttaggtggttggataaccgctatcctccacgctgttgcatcttactgtgaaccgaaccgggaaaaaccaaccagtttcgtgcttctgcacgccggaaacttccgcccattcgctcacataaactttattaacagaatcaatgattttaccttcagggaaatattttgcaacgttttgcgcaatgagccttgcggagtcggttccgatccccggcttaaagataacgtcaatctgaaccatcgccagatagactcggcatttccttgacaggtcaaccgatcttgaatccgcctcgacgtaggagactttaaggtaggtttcaccgcccgccggagggataaagtcaacgttatcgcctgcgaccttcaacccgttgtcggcagcgaatttagccgccgctgccttgcattttaacgccatttcatagtgcatttttcgccctcgctcgcttgattgcttcagttacataaacgccaagcctgatagcaacaacgcccataacaccattgggagcctgctttgaatggccgtattccagcgcgttcgcatagattagcatgttactgaaccagatcgaagtgatcccggccccttttgcgtatagtgcaatgttggcgttaccgttctggattgtcttctcgcccgtttggtcgtatgcgttaatcgcgtaaagcggggcgcggttaaaggtgatttgccagttgccacggaagcgccctgtatccaccggagaacgcattacaaggtcacggtgaatatcttcacacgtaaacctaacgacgtcctccagcgcatcgccagccgccttgcaccacgcatcaattgcacctgtgaactcccggatggtgtagttagccataagtcgccacccttcgcaaaacagggcggtaggcaacaacggttccggtaggtttcaccgggcgggcattcactacgcggtagcgctcgccgtcaacgtcgatttcgtcaccttccatgattggtacgtcgtgagtaaagaagccgcgcttgtcgccagcaaggatggtttcgccattgatatcgcgatctttgatatcccgcaccgcacctttgattgtggtcacaacctcgccagggatgatatcctccccggtttcggggtcgatgccgccgccagcgcctttggtgtacttgttaaatacgccatcggcatcgctgaaaaacttaatgcccgcactcgcgcgggcctgaattgctttgtagttcatggcgtttaacctcctatgccgcaacgatgaagaccgccagcggtcataaggccgaagccgccgccgcgcattttcagcatgcgccagtacattttaccccacggcgttgatagcatttcgttatcactagccgaagacacgcgatcgaacgtttgggaaaactccccggtcagggtgaatgacgctacacgctgcgagtatgattccacgctttcgccttcctgcttcattgcgccgtccagaaacatcaggtgcatggtcatcagcgccaacgctgtaatgatcgaatcgccgaacttagacgcgcatacgaattcctcagccagcaccacccacgcggttaacagttcttccggtacttctttaagtggcggcgcgaggctgcgcattttgtcgatcacatcttgaatcgtgtaattcatggtctttctccagatatgaaaaaggacgccgtagcgcccttgttggtttttttattcggcgctcgtaggctgcacgatggtttttgctttcgctttcactgctgcgatgtagtcgcgagtgcggcgaatatcatcgtggaattctacgcggcctttgaagatatcgtggcggaagcggtcaacttgagactcttcgatctcgaaggtttcgcccggtagcactttcttgccgtcgaacttaatcaggcaggcgcccacgttttccattgttaccatatccggcttcgcggtttcaggctgtgaggtttccggattttcgttgatttccggttcgatggtagcagtatcttttttagccattttgtatctctcctgttttggtgaggtttgatttaaacacaatgaaaggtttttcgcaacaataaaaaatggccccgaagggccattctagttacacgccagaaagaatggcgatggtaagcggacgatacacgatgaggccagtgcatttggaggtgcaaggcactttgaaatgcaggtctttcggctgcatcggcagcatgttgaagcgttccgggatctcgatcgacatattcatcggatctttttcgtatgccagcacgcctttagtacctgcgccgtcgatatcttccagttccgcaatcgcggtgatggtgacattcgggtagttctctttgaaccacgcgaggtaactttccgtaacgtccggcattttctgcgtcagcaggcggcgcttggacggcgggatcacgatgttggtaacatggtgacgacccagcgttacatcttcgatcgtctcgatcagatcctgcaactcgctgaatgcgatttccggcgtagtccagcctgcggaggtcagacggttaatgttcggctggtcgaacacgctaacgatgttatgcggcgcggaacctttgaacaccagatcgttaaccagggtttcatggccttcgcgtgcaagagacgctttgcggtcgctcaggctggaacccagcgcctgacctgctttgatttcgtcgatggagataaaccacgcgttacccaggcggaacactttgccagttttctcggacgccatcgcttcaacggtcggcaggtcgtcggtataatccgcgatgattttcgcagaggtcacgccgtcaaactccagccattcaaagtttttcgttaccggactcagttcggtagtaaccgggaaaagctccagcacaccagtttgcgggtaagcctgctcgtactggcgatttaagagttgggtaagctgattaacagtccagatgccgtgcgcgtcgagtttgttagcgtcgatgcccataccctgcattgcaaccttgattgcattctgctcgaatgcatctaatttcatagtcatttgaaactcctgtttgtgtgttttgacttaacgagatgaagaatagcacgaattgctaaacggtcaaaggtttttttaacgtatgaaaaaggggccgaagcccctattttttacgccccaccagtagcgggggcggctggcgcggttgcgtcctgcgttaactggattttcaccaggactacgccatctttgtttttgaaccactcaccagtgtgagtgtacccggttttgattaggccagcatcaccttttgccacggtgccatcagcgccgaaagttaccagcgacttaaacgcgcaatctgctgcggttacggtagatgcagcgcgacaccacacgcggccatgcgtcataacgtttacggcggaaaatttgtcgtatttgaattccggcgattggtaatgggaatgagtggttacgcccaccagaacagcatcagcagttttagcggtatcgaccactttatgaccatcaacaacgccaccggacaacgctaccagaacgccagttaaaatgtcatttgcagcggcacaggtgccgtcgatgttgtacagcgaagtatccgcgatctggcccggaatgcaaatatcgcgcttgcgggtataggttgcaggaattgccatgattaaatctccttgatttggattttgtagcggcccgaaggccgcacggtattagttacggaatttggcttgcgggtcgatgatgttggaaccatcgagtttcggcgcgcctttcttgtcttcctgctcaccatcttcttttttggcgaagactttagagcgattgcttgccatcttatcagaattggagataaagtcaaaagaagcgtcgatatacgaatcttctttatctgacaagtcgcggccatccgcttctttgatgtaagcaactttcatcgctttaacgtccaggccgtcgcacttgatgccagcggcggatacgatcgcgacaactttctgcttcgcgtcttcgtcggctttgattttggcaacacgtgccgccacttcatcttcaatgccatcaactttggtttgaagtgcgtcgcgctctgcggtgatgctcgttacctgactggttgcggttgcgatctgtgcgtccagtttagcaatatgtgcgcctacgttatcggctacttcgacgtctacgccgtcaattttgataatcatcgttttagctcctttgtggtttgagtcgtcatcatagggaaattcttgctcactatcaagatttaatttcgcaattcctgcacgcccgcgaaaaacaagcgccacatggttaacgcgaatcttcgtttgcacggcatcaaagcgaacccaatcagagacggaatcgtttttcagttcttcgaagttttccggtaggtcttcatcgaagtagtattcgcccgtcgcgttgttgccccagccttttttgtcgatatcgatcgaggtgtacccaacggacaattcagccgccacgcgctttttcgcctgctcgatcgactccccgtcgtaaatcatcaccggaaccagaaccccgatcccgtcctctttgccagcgccggaacaggatccgaccaccagccctttcgcgtttttggcgttgaccatcttgtgacccaaagtaattggcttgccctggtatgacgccagcgattcagcatcgaacacctcggatcgcgggcgaaactcaacgcgctggccgttcggggtctggtaggtctgtgcgccgatacgcgcaacgatcggggtatcgaccagaaagccgttttcatcaaagcgggccttcacctttaccgtgtcgaatctttgaactcttttcattgtaattcctctacgttattaaaatcgggaaccgcccagcaacggcaaccgtactcctcgccggggaaaatgccgtcaccgtttacgcggcgtcgcttaccttctagtttgatgtggctttcgcgttcgcgatcgtccatcatgccgaaccaaaagtaatgcgatactttagcatcttttagtcgctgcatcatcaacatactgttaaaacttccgataatgccgctcgcccggttgcgcgaccaactgccataaatggcgtatcggccctcgatgatttcatcgatctgttcgcgagtctttccgatgttgttggcggttcgaactttcgttgtccagtcagcgacgatatcggctgttaacttctggattgatgcctttgcggtatcctgccatttcttcagcgcctgctgataccactgctcataaccaccagcgccgaactccttcagcatcatgaccgcttcattatcgcgcccgccagccgccagcgcaataaccagccactgcttagagttgaatcggtagatagtcagaccaatggaggccagcgccgcaatgacggcagtaaagaacgcgatcgccgcctcgttgatatcgtcttccgcctcgttaatctcctcagccgtggcgtcaaacttcaggcggtctaaccgatcccgcatttccacgaccagatcggttgtcgcgtcctgcatcaagcgggataaatcccgctcacttgcttcaggataacgccagtttggaattctgccgttaactttcatcaccgccttcctccgtgttgttcaggatctgagatttttgcgttttggtcttaccagcacccggcgtgcgatccggtaactttttctgttccggcgcattgcctttcaacttcagttcgggaaccatcgcggatagggtatcgcgcgcttcgttcgagtcaatgacctgatccgtaaccagtccttgtactgcttcggcgtttttcttaaagatatcagccttctctgaatcggtcggcagtgacagcggttcaaactctacgctgaagtcttcctcagtgacgatgaattgtagcaggaattctaacagcggtttgtagtcgtcgttgcgcttgcgctccaccagcttataaaacgtctgcaacgcagtgttttggctggcactaacgccacctgtgtttttgttcttcagtacgatctcatgaatgcctgacagcgcgacaatccgatccattttggcggacaagaattccgggatgcctgaaatatcagagttaatcacggtgtattcttcgtcgtccgcatcaatgccgattgtgttaccaacgccggaattcgcgtcaacctgtgccatgcgcaaccgggccgcgtattcgccctccctgtcgtcgcagattagagcaagacctttagccttccacacgccctgctgcttacgcttcagcaactgcgttgcgaggtactccgaataatcgtaatcaagaatcgcttcaatcatcgacttgttcagcaccgtgccgccagcgcccttgttgagtttccgcaccttgttggttacacgctcgccgtcgacgtagtgcatgcgggtataatgcacgttaaagtcgctaccgccgtttaacggcttgacggtgtacatcttgggcttgccgaatcgtgggcttcgcgggttcttctcctcctccgctacggacaccgaatcgtagtcgtaaacgacaattgattccagcggcttacctcgcttcgcggctgaagtcagcatacggccatcgttaaccatagccaggacgtaagagccaccatacaggcgcgcccaacaaagggcatcggtgatttgcggctcaagtttaagaccgtcccactctgactggaatttcgtgttatcggagacgccgttaagctggaaaccgggtgacaccatttcttccgggatcacgtcaacaatctttttcgccagtccgttattgtgatagaactcctcgacttgcgacatattcccgaacgtgcttgcaatcatcgccgtggttgacgcgtaccccgcgccaccattgaagatctgattgtagtcatccatcttgatagctttcatattttaaccttgtgtgatttgtgggccgttaagcccacattatgtattagcggccaagctttttcaatcctgccaggcgtttcattcgctctaccgggtcatcgctcaggttcatttccaggttcgctgcgtcaaatacgttgtcgcaaatgtcatcgtggggatgtgaatcgtcataggtaaacgcgctcatttccgccacaagctccgcaatgaacggatggctgtccggcagtacgacgcggccacccttgataattggctgcgcatccatcgcgcgagtcaccttatctttgtcgcgctgaaccgggacgatctcacccatgccattaactgctttggtcagatcctggattagacccgtaccgctcgccttgtcttcgatgtaaatctttcgcagattcccgcattccttgtttctgcgccagcactgcttaatgaatgcctcagcctgcacgcgcaaatccggcgcttcccacttgccacggattccatcaatgaagtagacgcgatcgcggtacttgccccaatagcacagcacggaatagtcgtttagttcgttcgtcttctgcgccgtatccgccgtaatgaaggtgtattcgaacttgtccgggcgcggttcatgcgccttttcgctgtcgccgtaatagcgccaccattccgacttaaacacgttgccgcccaatgcgatcggctcctgctgatactgcgaaaggaatgtataaagatcggcatcgcgcaaggcaaccaggttctcgatcgattcgttgtcctcccaaaatgaccagtattcgacaccatcaatgaccaccgacggcccggataacacgtcgcgttcgaactcaggacgcaaccagtcagggagcgattcgccgtattccctcgttaccatcgccggaataacaatgcgatcgaattcgatagccatcccgccgctcatcatgaaccaggtggaatcctgcgcatgcagccgctgctgtacggacaggatcggcgtttcgtcgccttgcttcttcttcgcacgacgggatcgaatggtgttcttcagcaagatgtggctcttttcgcgcttcacctttgagaacatatcatcaggcttgtcgatatcatccagcgcgattaggccgctgaaacccggagtcatgtacccgccacgcttaccgacgatctgaccaccagacgaacgggacaccatttccagccttacgcgatcgttgtcatccagaacctggaattcgtcgatctgcttccgcccgaatttcgagggccatagctcctgccattcgcccgatgaaaagatcttgattacgcggtcggagttgccttttgaaagcgcgtcaccctgcgagatctgaaggtttcgaaccttccggcatttcagatacgcatacggcgcgaggtggatagaaaacgcttcggttttcgtcgaaccaggcgcaacgtttacgatcgtgcttttgcgcttcccggcgatgatttcatctaccgtgtggcaaaagtaggagtgatgccagttccacatcagcttttcgccctggataatctgaaaccagatcttcaggaatagcgaaaagttgcgcgtgctcaatgccttgattgccagcttgtcggctggcttcaggtcttcccaaataatcatttcgtcattcatgatcggcccttaaatcttgtccagaatgttactaacagccttctccaatacttcatcggtgatctcgttcttgttgccagctacggcgtcaatgttgagaacggctggcttgtcgatccccatttccttaccgacgaacgaagcgttaatcatgccgacggcagcaagctggaatttctgctcatagattacagagtcgataaactccatgaccggggcatagttagggtcgtggcgatagcgtacaagcgttgactggttcacgccgcaaaacaggcttaaccctgtgatcgtgaaaatgcgcggcttgttcacgccccactcgttaacgtcgccctggaaagtggcggtttccgcagccttgatggcgttttcttcggcccactggaaataacccttcgcgatctcgaagaattgttgtggcgtcatttcggcggttcgccccagcactacgccaaaatctttttcgtacagcgccttgaaatttccttcgaagtgcgatttcgttacgcgttttttgcgttcttcagacattgttaatcctccttctgtgttgaattgcgagtataccagattgcagacacaaaaaaacccgccgaagcgggttatgttcatatcagtttgttacgccgcttcagtgttttctgaagtgatgcaaaaggctcacagtcaacatacgggagcggcgaaaaggcaattcgttttgcgataccatccggatcgccaattttttcccaacgtgccgttttcttgttgtacatcatggcagcaaacgtgccttcatgtacccgctttgaaagtcgctcgacaaggtgagccgcgccaacgtgatagcctatgaacagcattaacaaagcaataatcagagttaacattgattgacttcccttatgtagttgatgttgattttgtgcgtatccagatttacgccggattgcttttttgctttctccaccgcgtcggcggtatcgttcgcttcaatcgtcatgctgaactcttgaatgcaggacttgcaaaagccgcccattttccttgctgtgagtatgaccttgtactgcatcatcaccccttaataaaagccccgaagcggggcgagacttgcggatgattaccgcctcttgtgtctacgcttttaacgatacccggtcagcgtgaatgcgtcaataggcggttagttcgttcgcttactttttactcatactcgccatcacggcgaccgaaacggccttcgagatagccagccagccagataaactgaccgcgagttaacagcgtgttgacttcggcccaatgcttatcaatcatccgggctgcaacctgatcgtaagtctttttgtccttccgtatggcgtctttagtttccgccgtcattcgtttcgccacgcgcttcacggcgttatactgcgcttcgtttagtccgaacatttaagccttctcccattcgacccaggttccgcgagcaatgaagatctcgacacgcagaggggcgttgaaatttttgtagatgaagatgaaacctttcttgctgtcggtttcgacctgtgtaatcggaaaggccagcggagtaatcgtatcgaccgactcgctcatctggatacccgttacagttgcgccaatcggcatatcttcgacttttgagaactcagacatagattcaccttagtaaaatttgcgcccgccagaatcgcttacaggcgctttaaatggtatgcgaattcgttaatttttcaagtggtggcacggctcgccatctttaacggcttcccactggcgacgtttgttccgctccagcttttccgccaccgccattgccaactgctcatcgttgattccggctcggcgggttgcgtcccacaccagcatgatgatatcggcgaactcgctaatgtcatccggcgcttcggcggcttcgttggcctctttagccaggtgtttcagtgggccgaccgggccaacgcttccgaactggcgatccgaccattccgcgtgctcctgccgaacaaagcggaagggatcccgtactgactcagcgtcgccgtaaaggtacaggtctttccacgcctacgggtcgttttgcacctggcgcatttcatgcagcacggcgtcaacgtccatcttctcaggccaattgacctggaaggattccggctggcggatgtattcgaccacctcgccgcccagcacgcgctgctgcatttccgcctgcgctttcgtgtcgcaggtgaggcggcgcgatttgcgcccctcgttagtcccgatagtgtaggtcagcacccaaattttgttgttcattcttcgatcaccttatattcgccttcgttaagttcgaaccagtcggtagggagcacctggccaaattctttggtgtggtagtcgcgccctacctgcgcccacttctcgccgtcgctatagcactcgacggtcagtcgatcacctgctttgaatccggcccactgtgcaagggtaggctcatccggggagttggtcacgtccgggttgataatctcaacaacggccaggcccaggaatgatttgtctttgttcggatacggaatgctcatttgtttagctcttgattggttcgcttcaataaggccactatatcaaatggccttgcggaagttttagcaaaaagtgctatttgccgtcgcgccacaaactaaccagggcgtcggccatctggcggagaactttagcgtgggtctgcgcgtcttcaccttccggcgtgcgcatggcttttgataccgcttcgagttgaccagtcaggaaatcaacctgctcctcaagctccttgatgcgatccttctccttaaacacggctgcatgaatctgaccgccaatgatggcgttgttaatcaacatgctgccatctcggcgcacctcgaacgcgcccgccttaatcttggccgctttgatttcgccgggaaggattctcgactcctgcggctcgccgtagccgtggacgatggcgcgattcacaatcccgcgagactcgttccgaccgaacatgttgtgagcagtttcccctgcgtagtccagcgcctgcttggttgttgggcatgcaatagacgatcccaggcgagtagcatactggtaagggcgctcggggacgtttcccttgttgacagcgttgtgctggcgaatgaagtagtccagcggaatgcggctttccaatccatcgtgccatacgcccttagtgtcggctgctttgaagtcgatgaattcgccacggttatcggggttggtgtagaagcgtgctgggaaggtaatggtttcgatattcagcatttgtttatcctcgttttttggtgtgggcctactatagcgcaggcccggaatgttgttttaacaaaaagtgctatagggcgtcgatttctgcctgcatgaactctcggacggcatcgccacggctgcaatcttccaggtactcgctgatatcgtgctgaagctcgcctttttcgtcggtgtagaaagcggcccaatcccgcgcccactccttgacggttttgtagttgccgacgcgcttaacgcctgcgtcagtccacccatactggcgggcgataatgcacattgcgcgaactaccagtttgcgatcggtcttgcgcttcgccacttcgaaccgtgcgaactcaccgaagatgccgcgaaccaccagatcatcatccaggtagtatccgtcgaattgccagcatgaggattcgttatcccggctggcggtgatgatatcgccaggcttacaggaaatactaacgttcgactcgacggacacgcatttcagtttgattgtgttcattatcggatctccttcacttggtgaacttcgagaaggttggttacttcacggatgccgcagtcttcgaattcctcttcggccccggtagccacccttaacttggtgaaccctgcgtcatcgtcaatcatgacttcgataacgtgttcgctcgaaagctcgatgtatgcgcagccgtaggaattcagttcttccagcagtgcgattaaattgtcgttcattacgtttctcctgattggtttgtttcgcttcagtaacgccactttatcaaatgacgttacggcagttttaacaaaaagtgctattctttgtcgccagtgaatgcggcccggcgaccacggcggaagccgttaatctcagatgggcgacttaccccgatgataaccatcatcattccgatcatttgccagccatcttctttggcaaccatcagaccacccaagaaaagaacccaatacagtgcaatcattttcttgctcatagtttcacctcaaataaaacgttgttttcatgtggtcggttaagaaacatagcgatcttctcatccggcatgcggcacgctaaccagttttcgcccaactccgttgttttcttgtcgtcctgcaaaatccagacttcatccaggccagggccgaacctggcttgatactccttaccaaccgtgaacagcggaataagtggcccgtaacccgtatgggtgcaaatcactgttactgtttccatcattacaggccttacagttggttggcgaagatgtgccagatgtggctgttcggcgtgcgcttcatgagtttgtgcgccttgcgggccatgcgcttatagtcgcgcgaggtcagcttaaccggatcggcaacgaacgattcgaccaccagcccttcgcataggtattcagcataccactcttgatgagttcggtcttctcggaaaactgttaactggcgaacagaatacgcgtcactgtgaagacgttcgccgcgctcgccgtagtataatgcgctgcgcatttcgccatcatttccaaagtgcaaaaggtgaatgcggcttttctttccttcgaagttggttccgacgatggcgacgactgcgtttttgataaagtgtttcatggtaaatctccgttgttggtgtgggataattatgcccgatccgttgaccgggcgtttaccaaaaagtgctattgcatggtgcgaaggtcgatttgcgattctttccagtcagcgaatggctccatctctccgatttcctgcattttcgcatcgcagcgcccgcagtctacccaggctttgtttacgcctataatgcgaacatcttcggcgactgactcatacgcccaaatcgcgccgtcttcgtcaacggcaatcgtattggcccacactggcacgtcgacggcttttgcatcgctggtgctgtggatgttaatctgaaacgccacaacctggcgctgcgcaatggtggcaacaatcttgccgccggatttgatttcgttggtcattattcgattaccttaaaggttgccacgaccgaaccgttacggcgttcggcgttgagggttgatttgttgaaaaagaaccaggtgttgttaccatgaaccacatcacagccgatcgagccatgaggagtgcggacggtaactcccagctccgcgctgtactcaaagccgggggtgtagttgatagtattggaatcggtgcaacgtaatttcatggtgatagcctcgtttgttggtgtggggtaactataccagcctaccccgatcgagttttagcacttcgtgctattcaaccaccttgattacccgttccgggcggtgcggtgcgccggatttatggagccagtagcgggcctgagtcaactggccgaagtgttcgaccgtcacccaccagaagaaggcaacacgcagctgtgctgcataccactccaccggacgcccgaaggcgtcaagcgtcgcaatgcgcacgatccttaatttgcggttagaagccataagcctgactctacagggaagcgagcgatgagaacgtgtaagttctggtgcatgagtaatcgccaacgaatccgcagatctcaatgcttccggcctcaatggtcacggatataactttcatatccaggtgaaaggcgaacatggcaagcgctttatgtgcgcgatgcatatattcgaactggttcatttttccgctccttgtgctctctctacggcatcggcgacggacagcaactggttagccagatcgcggattaccttagggtcgtcaaatacgcagcaaccgctatcgtgggtcgccataagctctactccagcagcgccaccactgaacggcgacacgaccaattcatcgccatctgaatcgcggtagcataccgtttgcagtttcggatcgctcatttgaacagcgcccctttgattttattccagaatgagaacggagcatgcttgggctttagctctaccacgtcgtgatcgtagaagcccaggagcacgccgcatttcttctgcggtacatcaccaatcacatcacccatgaagtaccagctatcgccatccttaaagtacaggccgacgcatgcgccaggtgcggcgtgggtagcagtgtccggcaggttgtaggtcttgccacgagattcgaattgttgcatttttgtttctcctataagaacataccagccaggcgcaggcggttaatgatgccatcccgtttagcgcgcaggccatcatagtaatcttccagttgcgcatcccatgacggcaggtcaagcataagattcatctcgttgcacaccaccttcagcgcgtggaagtgttgctctaccgcgcgacggtgaaatgctgcattgagtgggttgttttggttgccgatcatgtttatgcccctctgtttcgatggggtaatgatagcgcatcaccccgattgcgttttaacaaaaagtgctattgctgtgggatctggaagcagagttcccgccagttgcgatgctcgcggccagtgttgccaaggaagcagactgttcgcgcaatgtggccgtactgctccgacccgcgaagccattcgcccaggtagtcattcgcgtcgccgtcatccggcaggcagtggcgcgggcgcatcttgaatgcgaagacgtcgccgttaccgtcgatggcaatgtgggtggccccgccctggatggccgtctgtgcggttgcagtcgtggtgcttttgtcgatgccagccaggaagttagagaattcgttcatggtcatgctcttttgctccggctccgcctcgacaagcagaagtgtatcgttgccaaccatcgcaaagaagatcgccgctgtcatattcgacttcttcacaatcttgccttcgcgcttgcgcatcatcactgcgtcatcttccagccagtagataaggccattaagggtgttgaggtattcgcgagatttcattgtggtgctccgttgttcgtttcgatggggttactatagcaagccaccccgatcgtgttttaacaaaaagtgctatttgaagttgtgaacctggttcccgccgctgtggtcgtcaatgtcaacgccgtcgcaggtcacgtaaaagccgcgaatgacggtaaagcgccagtggccccgccagtggaagtacacgccgaattcacggcccggcactgccttcgtcgactccttcgggatctggtatccggcgaaggtgcgaagttgaagcgttctgttaaagcgtggcatggttgatgctcctctcgttggcgatgtggtgataatacccgatccctctgacctggttttgccaaaaagtgctattgcggatagtcgagactaatgattttatcaggctcatcgtccatcatgaccaggacgctcgacgcacaaatgaattacggcttcgtcactgccttggcggtatcagtaacgtactttatttatgattcagaaattggaaaaaatgccatcaaaaggaagtcgccagtgacgcattctaaggagccaggaaattcggcttgcgatgcaataacgatggctgtgataacctcactctcatcgactggcgtatctcctgggcgcatttgtgctgcgctgtcgtactggtcttgatagagtttcacttgatatctcctgctttgacgttcagtttgatagcctggatgagcacgcgggccgtgattggttcgatacgcacatcaagatcatttccggtcagcgcgtgaatgattccgataacccgttcccggtcggcctggatttgctcatcgctgctaaccgccgattcatcgcgttcaatccagtattcgatcacgccgtcgcgcgtcctggttctgaacttgccatgtttgccgatgtgatgcttcagtgccgacctgatggcgtgcgatgtgatctgcttgccgtgcgtggcgctgaactcctcgacgtcgaccttgccggacagaccgccatcaataaaatcctgttcaatcaggctttgtatggttggcccttcccgcttgccgccgacctgcttccgctcgcgctccggctccggttcgtcatcatagccgaagatatcgccagcgagccaggcatgataagcggcctgtttgtctggcggataggccatccacacttcgggatcgacctgctcaaactcccatttttgttcaatctcgctcttgttcactgtaattctctccacttccgttccaattcagtaagcatactaagccaggcgtatcaaggcgtcaagtcagtttgcgtaagaaagtaagatatacccctaccctcctatatatcctggcggcgcggaacactgaattttttgtaggctgtcgcaagcgaaaaatggtagcgcatcccattactatcttacgtgaactggaatattcatatagagagaataatagaataataataataatattaagtttatcatatacttatatgtatatttatatgcttatgctgcgcactttttgatcaatttttacgtaagattatcttactgaactgtgcgtgaactggattcggttactgtgaactggcaaccgttttggcaggattcgaacggcgaattatgtgcatggtgcatgcatctatgcaattcgttgcacatcatgaaacactccatcatcacattgcacagaatgaaacaatcacaatcaatcatgaatcgtcaaaagtaatcaccagggaatcagatgcaatcacagcctattccactattccgaatagatggaataatctacaatcggaggaatagcacaaataatcaaaaccctgctggcgggatcgggtatagtcatcacatcaaccagtcaggagcgaacacgatgcaaacttgcaaatacatcaccaaagcattcgcctacaaatcaaccaggatcgcagtgctgcacgtgtacaccaaaaaggatggcgaccagtacaaaatcatgaagcacgtcatcaactatgttcgcgggcagaatgtcgaatcatggcgtgtcatggggagcgccagcacgttcactgatttgcgcgagtgcatcggcaagttcgaaacgctggtcaactcccatcgcaaggcgaccgggaaagaaccgattaaattcaccgttgaggattaaaagcatgaaaactggtgttgcgtatgaaagccgtcaatctggcgtgcgatgggtgaagggcgaggacggcgtgatcaggaaacgcattccgggatctgacgaatggacgttcagcgctgcaactgaatttctggttgatatgtgcgtttgcgacggattcgttttcgaggtgaagcagggagattaacggcgacgatgccaccgtgactggttccattttaagggcgctacgcaattccgcgccgactttgaggaaaatgcaaatgagaatatttacccgtagtaagtgggccgtggttgaggctgcggcggagcacaaagagcgcaagcatgtggagcgcgttaccgatcgtgctactcagcgttggcatgactaccaggccgtcaaagcgatggtaggccagtgcctggagttcggggggtctggcgagttcactatgaacatttggcacgaaagcgcggcacattacccccagcgcgggatatggcgatacggccacacggagtacgaaaccacccgcgcaaccgtcacgtttggcgatcacattcaggccgtgatttacggtgatgaagttcggttccgcctggtgtaaatagcactttttgttaaaagccccgcgtgggcttttgctattatctattcatcgaaacgaagcagacaaaagaggcaaacatcatgaaactgaagcgcgaatcaatcaaacttggcaacgaatataacggcaaatggaatttcgtaatcatggataccgatgctgaaaaaatagaagccgttgaagaagcgctctgcgaaatgaaaactggcttctctgtcggcggcgaagagaaaacctggggcgactactgcgaccaatgcccatgctatgacgatggctatggctccggcttctggattgagatcgaagatgttccggcgttcaaagaagcatacaaggccgcgaaaaaatccatcaaataagcacaaattgctaaacgccgggccgcgaggcatggtatcattaccacatcgaaaccaatcaggagagcaaccatgaaagcatttggcgacgtcgtaatcggggacaaaattcaatatggcgcaagcgacctgttccgcaccgtcaccgatattgagaagggtcgcggcgttaacgggcagaccgttttcatcgtgctcgacggcgtggcgcgcttcgcggttgatgctcgcgattgggtcttctgcatggagaaggggagcgcatgagaaagcggagggccggggaggtggtttgcacctgcgaggcttaccccttccctcatcggctgttcggcggttcatgcaacgggatcgccatagtgatagccaatgttggcggatctgattgccagcattgccagctactgaataacgggcgttgtgaggtccttgccgggatcgaaaacccgatcgagtgccactatgtcgacgacttcatccaccgaaacgaggttaaaatctaaatgagaacagttaccatttaaaccagctttacctacatggtcggcgcgccggatgttgatatccagatctcgcgtgagatcgccgcccgtgacgtgacggaaaagtttaaggcggcggcaactgctgcaatcatccactattacgggcgtcaccctgaagacttcaaagccgacgacacgccgtttgtcgtcaatacggttcccgaaagcaaggcgtggcaaatcaacgacaagcggacggggtatttcatcttctgtgcaacaccctgccgggtcgacagcaacgatatcgagattcagagcctggaggatgccgcgccgcgtgttcagcgcacaatctacatctgccaggattacacgacctgcgttccagaatagcacgaattgctaaaacagaatttggggatggtggcatactatccccacaccaacgaaacgaggaaataaaacatgaaccatccaaagactgattcgatcctggttgtcctgcatgcgcacggtcgcgttgttctccgcatgaaccgacaatccggctttactcagatcacgatcaccaaatcgaatggtcgctatgttgtcggcacggttccgggcgctcgcctgattccgtcctcactggctggcgtcacgctgacgctggaatcgaacagcatgttcattgaatcgtggagaagctaatgaaagaaggcgattgcgcatacatagaagtcaacggcgaaatgcatcactgcaccgtgcttctgaaaagcaagggcgtttacatgttcgttaatgagttcggcgaggaggtcgcgacagtgcaactgttctggtcgacgaagaatcccggcgatagctccctgactggtctaccggatcacattggggcgaaggaaagcatgaagtgctgcgaggctccaggatgcggggctgtctataaggtcaaggcggcggatcttaaacgcggctggggtaaaacctgttcgaagtcatgcgccgccagtttgcgagaatttaaccggaggaaaagcaatggctgataattacgacgatgcctactgtcaccgtttcttaaccgcacaggatgcggggcttaaccgcgaatattgcatcaaagtagccaatcaggaaatgacgctatcggatgccctgggaagtatggatatggatgccgaaagtctgccgatgcgtgacgatctggtagagcaagaagaaaatagttgcggctgcactggtgaagaaggttgccgcgaatgtatccctttctggtgaggtgacaatgaaaaagcgcgttgtgtggtgcatgtttgacggttccgggattatgggtctgccgtgggcaattcgcggttgcgatgtatattgctttaacgcagattccggcgaccacggcgagtacaaaatccgcatggagcatgcaaaaatccagtatgtcaacatctggattgacaaagatttcgacgtgaagcgcacaatcctgggcataccggatcctgacattattttcgctttcccttcctgcacgctgttagcgcatagcggggtgaagcacgcccggcagactcaggatgttctatcagccgccgatgatgcgaagatgatcgagcaattgggcgaccaatataattgcccctggatggtagaaaacccggttggcaaattgtcgacgctttggcgcaagccggatttttatttccaccctcgcgacttcggcgggtatgttgcgccgcatgaggaagtttggcacccaaaaatgccgcactgcgacaattacacgaagaaaacgtgcatctggcacggtaaaggattcgtggagccgaaacggttattaccgccggaaggtgtggaaggcgtcgatttcttttgggcgtggaaattcctgggcggcaagtccgaaagaacaaagatgcttcgctctatcactccgcgcggattcgctcgcgccgtgttccaggcgaactttaatgaatagcacgaattgctaaacgtacccgcttaattgcgggtatagttattccatctaaatgcaacggggaaaaccagaatgaaattcacgatcgcagtaatgaccgcactattttctatgcatgggcctggtgctattatcttttcaatcatggttttgtgggtttgtgggattgttgacgtcatgcaccacaaaacgatgattaatatcagagtgaatcgcctaattagcgatatcgaaggcgcttgcaaaaacactaaatttacggttgtgaaatatgatatctaaaaaactggctgacgtatgccgcgaagttctgaagatgaataacggcggcgcaacgatggcggcaatgcaaaataagatcgaatcgcacgttggctttaaattgagttgcagaaacaaatccgactttctggatctggtaaacctctatatcgaaatgggagaaaggaaataaaatggcaaagtcaatcaaaattaaatgcacctcaagccgtgctgttaatatccaggaaaacaacctttattccgctcgcattgacgacgaaggaaacgtgtcaatgatggtatataacagcgccgaactgaagaagaagcgcgtttacttgtcggtcggcattagcggtgagttgttcattgctggcgttggcggagtggtggcgacgtttatcgaactgaaaacgaaaaccctgaaatgcgttggcctcgaccacaaaaacccggtgaaaaaatccttcaccgtcggcaagcgttaccaggtggaaagtggtcgagcgctgggcggcgtcgccgggtacatcttcgaccgtgacggttgccgctggacgctctaccgtgaggaagtcggtttcagcgtgtcggacggaaccacgtttgaggcgaaatacctgtaacggattcggggccatgcgccccgataacctaagcacattttgcaagtgcgtttagattatcactggatctcggatttaagacggcttatcattagccgcacgattaaccaatcaggagcaaggcatgtttttaaatgaccgcgtgtccccacaagatattattgccatcgcagagaaggaaggcatcagccccttgcgcgtcgccatccgtgcgaacgggtatcgcgactccgtttctttctggcccaagccgaaagatatcgacgtaaacgcggacaagtatcccacgatctcgatcgcgaatgattacgatatcgtcggcaaactggcgctcaacgctgctcgctccgttcaattcccggaatcatcggcttatatgcatttcctaggaaccgtgtccgccgcgatgatgggtcgcttttgggtggagtaccacggcagcgagcaaccaacgacgctttacgtcattacgtcgcagccgccttccgctggtaagtctgcgattaactcgctggctatcgatccgatcgtcgcagaggttgagcgaatcaacgaggcgcgcaagaaagagcgcaagaaaatcatggcgaaattgtccgccaacaagcaggccatgaaaggcgagttatcgcaatccgatatggcgaaactgttcgaagataaagacgaacttgaggagaagttagaaagcatgtgcgatctgacgttccccgtttccgataccacgccggaaggccttgcgaaaatcaacaatcgacaaggcaactttgcggttatctcggacgaagcgacagcggttaacagcctgttagggatcacgtatggcaacgacggcggcaagaagacgaacagcgaactggtgttaaaggcgtgggataagggccacgtatcgatcgcacgttccgacgtcagtaacaatatgtcattcgtcgcgctgggctgtatttgcgtaattgcccaggatgaaaccatcgacgccatcatgcaagctggttctcgcggtatcggtgtatcagagcgtttccttttggttcgcgagcaaacgcggttaggtgagcgcgtgttcattgacgaaaacgggaattcgacctatgagccaatcgaccagtcactgaaggcagattacttccggctgattcatgacattatgagcgagtcgaacattaagttgcaggttactgacgcggcaatgcggagactgaacaaggcccgccaggagttagaaccagagttgggcgacggcggcaagtattcgcatacaatgcttcgcggcgcgatgggtaagttcgataagcaggttatgcgcctggcgtcggtaatccacacgatccggaactggcaaccaggcgggaagcgctcgaagaagatcgacacggcgaccattgacgaagcgatcatcatgttccatgaattgagcaaaacttacttgtcatcggctgactcttccggctttgctggtgagggagcggaaattaaagcgctgtatgacgttatcgccagtcgttgcaaacaggcaaaaggtgttatgaccgtccagggcatttataacgcctgccgcaacctgaagatcttcaaaggccaggccggggtgagcaaaaagattaaggaacgcttattgccgaagatggaggaattaggctttatctgcgtgatggattccgaagtctttatcaacccgtcgttcatgaggtaattatgtcaagagcaaaagttagcacgatggaagacgtcgccgagttccggcgactgtttatctatagtgatggaaagttgttttggaaggttagcacctgcaatcgtgtgaaggttggcgatgaggctggtggcgagaatagtaacgggtatgtggtaataaaggttaggggtgtatttcgcaaggctcaccggattatatgggagatgcataaagggccaataccagaaggtatggagattgaccacgaaaaccatattcgcaatgataacaggatcgaaaacttgcgcttggtcagcagtaagggtaacaaaaagaacacgacaaggcgatgcgacaactcaagtggcgtgactggagttcattggttcaagagagaatgcaagtggaaagttcagataaaggttgacggaaagcaaaggcaccttggtctattcgacaacttagatgatgcggtcgcggccagaaaggcggcggagcgtcaatatggcttccatgaaaatcacggcaatgaaaaggtggttggttatggcgtttcttcttgatgtataccgattctgcgagtcacgtaaagaattcaaccgacaggatcttgcgaggttcgtgtattcacacagagagagtgatagaattgcaaatgcggcgaatgtcactcgcagaatatttgcgtcaatggtctctaaggagtttttagcgcgaagctatacgaatggatacctggacggaaaaaacggcgtggtgtggtgcactggcccggataacagggagattgggtttaacttccggtcgtttgaagggatggacaacaaatacatgtgggagatgatgcacattgagcaactcgacgatgaagccctattcgggaaagcaggtggaagatctgataacggaggttcacaggcttgtttgcgtgaatcagatcacaccagaaaattacttgcgtgccgcgctcaccttgctatatcaaggcatggccgcgacaaacacggttgaacatgggttgaatgatgaagatggcgtggcactgctgcacgtcaaacggtacatatgaaaaaaggggcttacgcccctttattttttcgctcccgccacataccgaaaacaccgacagcgaacatgattgccccaacggcaccaatcagccacggaatcatgcttccgctatcgtcgtttcggatctcgatcttctccgccgtaatctggttcgcgtgaatgctggaggtcgtcaccgcctttttgttggaagtgtcaaccttgccaactgccgattctttgaaggtggtttcctgtttgctggacgtgtccgttttgttcgtcacgccaaccgcctgtttcacgttctccgcgccgacttgcgccgtcatatccggcttgctgcccaccagatcggaaaggatcggtacgctggaagcgcaaccggaaaccagtgcaaccgcccacacgatgaagccgatcgccaatgctcgctgaaaatttaagctactcattttagatccttaatgcacagattgaattcctgatcccggcgattatgcaggccgcgcgatttttccatcttgcccgttttcgggttgcgatagtacgtccatcggtaaagctgttcgcacgcctcatatagccgcccctggttcgtcaacttcagcatagtgctgccggagtatgcgccgccgccagcgttgaaagtgaagctgtacatcgacgccctgaaggtgtccggcactgccactttgattttgctgtcaactacacgctttgcgacctggatgtgcttcgccaaaagagcatcgcactctgaccgggtatagattttccccttgattacgtccggccctgtgatgccttcgcagaccgtcgaaacgccagcgatatcggtataaactttgtatttcgtgtcctccacttttgggaggaaggcgacagcgatcgccatcgccaccgcgaatgtaacccgcgttttaatccccatgttatttactcctgatcttcaccgccgttttgatatccccggtttccagcgcttcacgaagcgcctttgaatctcgccagcgcaaccacgcgccgaaggagccgaatagaatcatgaaaaataaaccaatggctgcaatgataagttgcccggtcgcagatcctgcgagggtaacaccgccgctaccattggttgccgcgttgatgaattcccgcatgatatgcaacctctgttagttaagtgataatgcgatgatatatgcgttgggccaaataaagaacaaaaaaaagggagcctattaaggctcccaaactttaaagcagtgataataaaggcattaatccgataattttaataccacctctgacaccatatcaaggattttttgcgcgtcgtcttccggctcgccagtggtcatatcaaaatcaagctcgtgatacgtgtcgctaatcaagtcctggcgtcgaatatgcttgcggctatcaccatcaaaggtcatgccgtcacgatggaggcggacgacaaacacgttaagcgcctcatgcaatgcgacgtgctccacctcctcatcgaagccgccgtcgctgacaacgcaattaaacggcgaaaccagcgctgaattgcaaagcaacttgccgaactgatttttgcctaacgtcggctttacaaaattttcgctaatgtgaatcatgaattcacgcggagaacggtcgcccaaaaagtcgtacttcacctctttgcgcttgcggtcgtggtatctggcagcaaagcgcgaaaaatccgtagcccccaggacggcgcgagcgatggcaaacatcggctctttgaagctaaggatcttgtattcccacttccgcgaaataatttccgcgatggtgtcttttccgattccaggcgctccgtttagaatgattacatttttcatttgtctactccgtgcgattttaaatgatcgtgaagattgtcgccgtagtcgcagacctggtaagtcgtaatacccaggccgcgaaagtgcgcaataacgttgggggaatcatcccatgccgcaacaatgcgatcaagtccgattttgcgtaactcctcctccttgattaccgtatctttacggttatcgctggcgcggcgcatgattagactgtcatatttcaccccgtagcggtcaagccaaatcatcgtgtcggttttcacctcatcggatcgcccggtcaggatgataacggtcattccggaacgataaagcgcattcgccacatcaatagtgctttggattgggctgtcgccaatggccgcaccattaaattcgctccagctttctgtaaggtggagatcttttttcggcagcatgtgcaagcggtggttgccatttgacaatgtgccatcgagatcgaaaatgcagatatttttattcatcggttttccttgttggcccctcgcggggccgttgtggttacatgttcgggcggtagataaagcggcctacttcgccatattctttgctgtacagaataaccgccgcctggcgatatgagcgccaaccaccgcgagcggagtaagcgtctttggcccctaactggccgtgtacttcgtcaatccctaacgagtgctccgttacggtctggtgatgccaatggcccgaatgcgtgtagatgtagtcgcattgcccgaactccttgcggaagtcagtagccattgcggcgaggcgcgtttctgccttcttcatcgtgtggccgtgagtgtagcccagcatcgttttaccccatacggtgcgatgcagaatcgcagggcttacgtcaacgaatacgcgcggctcattttcatagaacgctgcgagcgctgcacgcaaccagatcatgccagcctgatcgtggttcccctcgatcacctgaacctctacttccgagtgattactcagcagtagcgacacggcgcggcgcaaggagcgaatagccacatagacaagtttcgcgtaacggctgtcctgatcgagaacgtgaccacttgccggggttactgcgtccaggccgtcactgtgaaggaagtcaccgccgaccagcaagaccgcctttttcgactgcggggcaaccgaaacggaatagtcaaagaagcggttaagaaccctttcggctgtgctggtgtcgtagttctcgccgcattcgtgcttgtgggccattgcgccgatgtgcaagtcgaagatcggatacagggcaagctgatcctcaatgaaaaacttcgattcatccttcggctgcggttcagcgcgcgggaggtcttcgcagaatgatgcttgcgccgcctccattaaagcgatcatgcggtcgcggtctacttctgacttgacccagcgcacaacttcgtcaccgttcgcacgaatcatggtcgatgtgcctttgaccccgaacccgtccgggatgtgcttcgctacgtggttgttaccgtgcaaatgcccctggcgggcaagtcgaacgccgcgacgctccacactgcgaacgttcatgccgaactcttcggcgatctcgcggtaggtcttgccttcctcgcgggcggctaaaaattcttcgtctgtgattttaggttgcataatttatcccaattgaattgcgtagttaaagattgcgatagtgagaaccaccgccgtaatcaggatcgcaatatatcgcattctcaacactcccgctacttgtaatattttttggtctgcttcgactcattaatgaacatcttcagagcgtcggcctccgcccgcgtcgcaactgctatacgcgtgcgcttcagtgggcgctcatgaagataggtaaatttcccattgaacacaatggagatatccttgatatcgaaatgctttgcgatcatcacgatatcgtcactaatgccagcctctttggcatgctgccagacggcagcgcggccagattcgacaatcattattcgtcaccgtaaatgcagaagcattcagccatctgctcgtacatgtgaatttcttcgatgccgtgggcggctcggaagtagatcgcgccgatttcaccatcaaggccattctctaaaggcttcgccacgtagtcggccatgcacaggcgagaaaggttaatcaggtggcgagatacgatgtgcggcttaacttgtgcgatcttgatggtgtcggcgatggttttggtgttcatggcgttagctcctgattggttgatggaacaataatacccgctcgccgcgggcattgtttagcaattagtgctgtttcgcgaaatattccgcgccttcacgcgcccgaaaatccagcaattcgcgctcaagaatcgcgggccagtcagcaagcggcgtgccgttatccatgaactcttgataagtgccgtcgatgctatcggcgaaggccatcttttcttcattcgtaccgatgaatccgtacttgtccagcagggtaacgacgatgtggaggtattcggtgaaagattcaagctgttccatttttcagatcccacgtttgcgcatgcgctttttagttaaagacgggcagatttcgcttaccggaacgtagaacgttttttgctcctcgcccggcttgagtttgcgcatgatgaaaatcacgctgcccttattgttgttgtcgactggtttcccgcttaggccgttaatgaaggccaggcgaccggatcggcttagttgcgttccgtcttcatcctccgtgacgtctgcgacaatccaaatgatctcagccgctgccttctgtgcgtcgcggaaccacgccgtagagttgtcgccgggaagcaaaatatcgatctggttgtcatgctccatctgctcaatggctttaagcacgaagggatccgggaatgagtaaggcgggttaagccagacgtgcttatttttcccccaccagcgcttgagacaatcggtcttttcgtcgtaaaacttccggcagacggcgttgctttcttcggcggctgcgtccaggtcgtatggcccgtaacgctcctccatgtaagcaataaggctgcgatcggttgaccacttgtcgcggacgatatccggcgtcttgctcccggcgtatcggttgccagtaacttggtagaacttatcaggcttgacggcctgatagtgtccgccagtggcaagcgcgtttcctatgaacgtttcacgctcaagctgttcaaacgtcgtgaacgcgtcgtgagtgtctttgtcttgggtgtcttttgccattattacttaacctcgcaagttagagtgttctgataaacgctaactttaatatcaatggtgtttttgttgacagtataaaaagccgttccaagtggcgtaaacagcttatactggttttcaccaatgccatcaattaaaacgccagcgctcttgccgctaaccaccttcatataatcgctcgtaacctcaaatgcttcgttaccgcaaatatatgtttttggtttttcgctgcaaccaataagaccaagagacagaacaattaaagcaagcatctttttcatctttcaatactccgttattcgtttcgatgggagaatattacccgactctcgccgggtagttttaacaaaaagtgctatttgattgcgtcttcaaacgcgatcttaaactgctcgaatccataggccacggcagcgaacccgccacggcttcggacggatgcgaggaattcccgttgctccttactcactggcgatgcctgggatttaccctggcgctttagctcaatggcggcgaacgggtatttgccgcccagcccaatcagcacaaggatatcgcttacgcctttaagcaatcccatttgatgatctgcaacggcgctcgccttgtgcttgctgccctcgttgaccgtatgccagaacagataatcggggtattcgtaacgcagccacgaaacgctgttcatctggtcgattttttcaagcgggcaagcctttacaggcccgccgtaatattcgaggtaatcccctttgtctgtaatcactcctcgcctccaaagtctttgcgggaaataatgtcctccttcttgccgttgatgcgatgcgttacgcgcttcggcgcgcggaagtattctgcatactccaggatcttgcgggcgtttttcataccgcccaacttgccacgcattacagcatcatcaacatgctggaagactgccttttgtcgccacaacttaccgcaaatcgcactttctgactcagggaagaatttttccctagccgtgaaccgctcgccgtcatggttgagcaacacgtaattaaagatgatcccgctttggtttcgtgtcaatcccaaatcaaagcctacaacctgataccagtcattttgcgtgtaatgcttcccggtgaggttgtcgttaggatcctttaactgcacgccacaacatctgcactggcgcgcaacaatgtcgttttcagcgtggcatcccttgacctttattttccctgtcctcggatccttttggtcttcgcagcgctgtgacgtccaaaaatactcgcaccgattgccgttgctatccttgtggatgcagcggcgggcgtactcgctattttcgcctttgcagaccgggcaaattttcgggccgttcttgctgctcttgcgcttctgatactgcgcctgctcaagaataggatcgaaatacaactggcccaggtcatccattgttccggcaaaatcccatacaaggtgatcttctttcacccacgaatagggcgcttccttctgccagtctttgagcaatcgcattcctcgccccaaaagctgaatcagcaacgtcagagagccgatcttgcgaaggattacagaaaaatcccaaaacggaacgttaacgccagtcgttagggccatcacctggaagatgtacttaatctcgccccggttcgccttgtccagaatttcaccgcgtttcttcgagttcgtcttctctgtgattatcgcgtatgtggcgtccggcggtaagtagctcgccgcctccttacagtgtcgctggcccgcgcaagtgataagaacgccgtttcgcgtctgcgcacgctcgaccaccttctgcataatcagcttagtcatttcgccggaatcgtggattttcttctccatcttgcgcaagtcttcggcgctaaaatcctgcgtgccgtcctgactggagccgtgaaactctgacaggtcatagcccaggccgtcggcctcagtgtcaccaaagatagtcggaaccaccgaaccgaattcgacaaggtagtttgtgttaatgtccgtaatctgctcgcgccagaaaccaggctggctcttgtcctcctgtaagatcggaatgacgccgcgaaactccgaaccagtgtagccaacgatgcgaagttctcgccccgtcttctgaaggcaacggcgcattaactcgatgattacgatggtatattgagtgcgaccgccgccaaattcaaccgtttcgaacttttcgttgtacgggtaatcggcatcgacgatctcaccattcacgcgatacggcttatcctttgcgcggctcatgtactcgaaggattcatcgttcgcgatcgcttctgcgaggtcttgccagtcaacctgatggcattcgtcgattgccaggactgaaggaacgtaatcgcccagcatcttaaacaggccattaaccaccgtcccttcggagccgacgacgatcgggaagtaagccgcctttgtgcctaacccggcgcaataaacggagtttggcacgtcaaggttgctgatttcttcggaatcctgcttcacgatctcagcctgcctggcgagaaccatcataggcaagttcattgttttgcactgcgccgcgagcatggcgatcatgattgtcttgcctgcggatacggacgccttaatgtagaacggatgctcatagttcgcgatccgcttcgccgtctcgatgtacgcgacagcctggtaagggtacggaacgacattcccgaccgtgaaccgcttttgaatagatgggatcttgtctgcgtaggcttcaatttgttgttcaattgtcagcatggttaatcctgatttgtcattcgcatggttgcgtgtataatacagagcaaattttatcgtgtttaacaaaaagtgctgtgaggttaaattatggaacaaatggcaaaggtagacaagagaactttgaacggcaataacgggacgtcacgcgggaaagataagaagccccgcaagaagccgacaggctattacgtcctgaaggatgaagtaagggcgggcctggctacccggatggaattggtgatcgaggcatacggcggaatcgccaaaacagcaaaggagttgggcgttagcatccaggttgttcagcagtggattaagcgcggcatgatttcagcagatggtgcttacctggtgcataagagttatcgccgcaatgactgcaaaggcttcagggcttcattttgccgcccggatctcagattcgacagcaacggcaagccgattacgcgccgctgcgaccgccgcgaaatgcttcgagtagtccgatagcacaatttgactaacaactaaacgcctaccgggttatgattctcgcgtgggcgttttttatttggaggttatgacgtggatttttacgacgaaaaagaggttttgccatacatgccggggatgtggcgcgaggcgctacaaaatatttgcggcatccactcccgctatttcaacggcaaacaccaggactgccctaactgcggcggtaaggatcgcttccgctggactgacaaattagagaatcgcggcgacggcggggcatattgcagtggctgcggtgccgataaggggatcggatggttaatgaagttgagcggcgagccgtatagcgagtgcatcaacattcttgggcgatacctgggcaaagttccgcaagagtacgtagttaagcgcaacaagcaggttactcgcgataacgggtacgactacggcaagatggcagatcacgatcgcgtcgtggcgataatgaacagaacggaggccgtcgatagcactcctgtaacgctctatgagggcattgaaaatgagttcgttgaatcataccgggttggcgtaaaaacacacgagaacggcaggcaagagctatttcatgcactcccgatgcaactggtgcatgaagacgggccggacgatgaatactgcaacatcttattcattgatgaggagggccgcgagaagatgttagctggcgacctgactttcggatcggtgatcgtaaccaatcagagcgagggcggtaacgggccaatttacctggctcgctcttgggtggaggcgatgcacttcaatatagcaagctcgtttaagtgtgacgtgtgggcatgcatcatcccgtccaacgttgagatcgtggcctaccgatataaagggaagggtggcggcgaaggtaagcgagaattgcgagtcgtatgcagcaggaaagatcgggatatgctggcggcggctgaagaacgcgatatgaaagttatcgtgccgaacaatgacaacttcaaaggcggattcgaacgaaagctctacgtggcatcatcccttctctgattaaaacgtgaacaaattttaggtaagattgataatttcagtcttacctttttttatgccaaaaattcagcaacttaccaactggtcgaccactttaagtaagattaggtaagatgcatcttacgtaaatttcgctcactttttgaccaatatcgcaccatagaatatatataagtatatgatatctaactatattattattattactctctatctatctatctgtgtaggtaagattttctccgggtatatgtattttgctttgcgatttcggcccaattttcctgttaatatttacctataggcatcttaccatcttaccgatttggattaaccgcatgaaatatataaagaaaatcacgtaagatgcatcttactaaatcttacgtaaatttcgctcattttttgaccagttgacgaatagcactttttgccttgcacccggaatcgtcatgcgtatacttaacgcaacgaaaccacaaacggagtgataccaatggctgaagcaatttttaaggcatacaccaacgcggaattatccaacgatgattaccacgatcctaactcctggtgcgccagatacgttagcggctcaagcctcggcgagatttacgcaacctccccggcccactggaaatacaaggagcgagaagaaacatccgcgctttcattcggcacttgctcccatacctgcatgcttgagacgtccagatttaatggcgaatacctgcgagcgaccgcgccgggcgacgttaaggatctgattacttcgaagtcggcattgtctgcgaaattgaaagcgtgcggcctgattgggacgtccaacaaggactaccccgaattgctggaaatggcataccgcgccgggattgatgttaacgtgtggtgggcgatcgaactctgcgacgaaagcgccgccatcaactcaggccggaagctggtcaaggattctgatttcgatgcggtcgtgcaaatgcgaaacgtgatgctggctaacccacggcacgcggcgtgcattgaatcggatacagcgcaacgcgagttgtcaatcttcggcgaaattttcggcgtcccggtaaaggttcgactcgatcatgttgacgtcgtatcgaatcctgaactcatcaaggagtgggggtttaacccggatgaagttttcgaagtggtggtgattaccgactacaaaactactcagacctctaaaccggatgacttcgggcggctggcgttcaagctgggctactatctcaaaatggcattgcagcgcgatctgttcgttaagacgtacaacgaaaaacgcccggttgttgtccgcctgctgacgcaggagaaaagatcaccgttcgcgcctctcgcgttcacgttaacggatcagcagattgagatcgggcggaagcagtataaaagcgtgattcaccagtacgacgaatgcgtcaagcatgacgtttggccgtcatacgaatcgaacgcagcggaagtgaagttgcccacgccgcaattcgtgaaatacatgttcccggaagtatacggcacaaatagctaaacactacggcgcacttgtgatatagtgcgctccaccaatcaggaaaaggaaagtttgtcatgcgtacatctgaaagtttcaaagagatcgccgttgcgttaatcaaagcgaagtctggcttcgtcgccgcgaagaaaagcgggaagaatagccacctgggaaacacctacgccaatctcggcgatatccttgacgccatcgggccatcgctggaaaagaacaaaattatggtcattcaatcaatgatggataccagcaccgacaaggttatgcaccttgaaacgatgtttctgcacgaatctggcgagtggatggcgtttcagttcaacatgccgatcagcaaaaccgttgagcaagcgtatggctcgacaacctcatacgctcgccgttatgcgttagccgccgcgctgggcatcaagcaggctgacgatgacgcagagatcgcgaagatgaagccgcaagacttcaaaaaacgcattgatgcgtgcgaagacctcgaatctctccgcgagatttacaagctggctaaacagaccttgacgcctgcggaatggaaggtgacggaagacgatatcacgaagcgccaggcgcaactaaaagtgacgccagcgaacggatttaaccccggaaagccgcaagaggttgctaaacgtgagccggaacaggtagaatcaaagcctgaacctgaagcacaagatatctcatctttcaactaatttaaccgggcgggaaaccgccccataggaataaaaatgcatgttgtaacaggggtaatccgaaaagcgccttacgtaaaagagggcagcaacaataacgggccgtggaagatgtatgcggtcgacctgtcggagcgaatgaagatccgcaatcgcgacggccaggacgaaactgtatacaccaactatcgcgccgtcttcttcgcgaaggaaagcatgattgcgtggtacgatgaagcgttgcaggtcgataaggttattagcgtaacctgccggacacttcagatcgtaaaccgcgagcacaacggcgcaacttacagccacaatgaaatgattatgccgcaactggaattcagccagcgcgaaccaacgcagggaggcggtaatcagcagggtgggtggggccagcctcagcaaccgaagccgcaacaacaacaaccgaagccgcaaagcggtggtggtaatcatggcatggatttcgatgatgatatcccgttctgatttgacaactaaagggggctgaaaagccccctttttttattgcttcattgatgctattatctctgcgctattcaacaaacgaaaagaggtcttaaaatggcactatacagacaaggcaaagccgcgatggattcaagcggcatcgttaccgggactggaactaactggcaatcatcgctaacgcttattcgccccggctctacgatcctgtttttatcgtcaccaattcaaatggcggtagttaacaaggttgtcagtgacacgcaaattaatgcaatcaccacaaacggcgcggttgttccgtccagtgattacgcgatcctgttaagcgactcactgaccgtcgacggactggcgcaagatgtggctgaaactcttcgttactatcaatcacaggaaaccgttattgctgaagcggtagatttttttaaagactttgatttagccactttgcaagcattggtggagcagataaaaggggatgcagcagcaagccaagatgcagcggcggaaagccagggtgcagcagcagcaagccagcaggcagcagcagcaagccaggaggcagcatctgacgccaaagcagtgcgcgatgaaattcagcagatcattgatgattctggcgaacagtcaacgctggtagcattggcacagcctgacgggtttaaacatattggcgaagccaattactcttatatcagaagctatactggcaacgcagaaaagataaaggtatcaggatttgctgttgctggcgatggcggtcatggtgttttcgacctaatcgacgatgatgacaatacgattattgatgataactgcgtacaccttcgagatgcacttggtaggctatggaagcgaagatttttaggaaatacaattcgcatgcgctgggctggcgctaaaagtatggcagaaacatcagcgccacaggatgcagcatttgaaaactgcctgcttgctgctgcgcaattgtcagatagtggatatccgcaatcaatcatcgcgggcgtgccgcgtggcgtagtgtatcttgctcaaaggcactatatgcgctgcggaaacttcccggaatcactttcatggaagtaccctactacaggtggtggtgacagattcggctttgatatgacatgcgcaattggcgaaggggctgggtttttcttggttcaggcgaacaacccatcagtaaggctacgcgtggacaactcgcaggttgctttcagtacgaccaattacactgatgaacaaatcgccacacttgttcaaaacaactacattcttagaatggagtcgatggttaacgccccggacttgcatatccatgcggccaattaccctggcacagtgttgtatagtaccggcaagaaagactatagcgctgtaactgctcagtggcccgatcttgttagtgttcttccgtcaattcaggccgttggcgatgttgttctgaacattaaaacctgtggacgtgatttttatttcacaaataccggtgcagggatgggtcactggaattcagtatggacgcagaacaacagagcgcctggttacatatcgaattgctacgatttaactatgacctatgaagattacgttccacacaacgaaacttctggcggcctgatattcagcgaatgtggcactatgtcactaaaaaatattctcattggcgctggtggcgttggccatttgtgcatttgggatagtcgcaacgtccatataaacagaaatatagccatatgcggaaatacaacatatgcagcgtctaacactgctgatgatctgtatgctctagaagtttgtaactctgaggtaaatatttctggcgctcacgttcagaactctggtagatttatgcgtgttggcttcaattcgcaggtaactttccagcatatgacagcttgggatgtatcaacgcttgttgaaatgacaaacaacctcagcagactgaaataccgcggccagagagttcttgcggttctagatccaagcagggtgtttttcaatggtggttttgctcaaaatctgaacgcgtcacagtttggttggccatgcgcaccaatcgttaagattgacgaaacagttggcggagacttccagtttcactggaacttatggacgaataacgcccatgctggatacgcagacaaaaccgaagctgaactatatttcattgaatgcaaatcgaccagtaatactggattagtgtcttttggcgaagctgcaaaactggagggaaacacgtctaactactttatttacttgcaagataaaaaccagcttgggccggtaaacacaagggcaacaaactttgttagggttagatacggagacacatctcaatcgtcatttgcgatgcgtgaagcgtctcatccactggatgggacaacgtttacagcggggtctatgttttcatacccataccgcaggccaggaaggcacaccgttggttttacgatttccggcggttcagtatcagtaacagttaacggacaagtaagacaccgttatacttctgatggacttcacacgcttgcgcttgacttgcgtttacaggagcaagttttaattataacaaccggcactgtagtaacatcaatgccgcagtggcgatatattctggagaactaaaaatggcacttaaaggtaattttcttattgagcgcccgtctattaagttagacgggaccaccgacacgataacttttaattacgcggtaatctccacctttaggggggaccgttactcagttaatctggatgttttcctttgcaacaatatcaatgatgaacttgtggatggtgtttttcaatcatttgcatttacaccagattgggaggaaagtaaaaacatcattaaacaagggtatgaatacataaagaccctgccaatgttcgcaggttcggaggatgtaaagcctggctatgatgaatattccaaataatggcatacgcaacaatttgcactaactgcggactgcgtaggttagatcaggaattacaatcaatatgatttaaattgtagtgatcgattgtgaaatgttatttatgcaataaaagggccaaatggccctttttttttgccaaaaataaagaccccttgcggggtctctgttagctgaatgagttactgtttgtgcggaacgcggtggccgttatgttgtcaaccgtcacggtatagtcggttactgcgtcgcgcccggcagccttgatgaagaagctaacattgttgttattagcagcaaggtcggcagcgaagcgaagctcaaccgcagttgtaccctgaacaatgttaccagcatcaacataaatgcggcgcacaacctgctgaccaccgatgttaaacgtaacgtcaacggtataaccaagctgtgaacttccgctgccgtaagtctcacataccaaagtacaagcaagcactatggtcattccatatcccctgttttggtaatatccgtcacgctgcactgtctggttacggcggagtgtcattccgtcatagcgcttagcaaccgcaatatcaccgatgaacgcgtctgcttgtacggtgcctttgaacgaaccgcttgctgcttcaatgtggccacggaagatcgcattgttgaactgcgcgccgccatccttattaatgctccacccgctctggccgtccacatagttatttgactggattacgttgccgatcttggcgttggtaatcgagccatcctgaacgagcaagctgttaataaacacctggtcattctgcacaacaaacggaagcgtgtaagcgccggatgacgcattgcggaggatagcaaatctatccgcaacaaacagaacttgcgaaacaacgttgcttccttgcgcggtaagctgtaaagccatacctgaactatattcttgtccgttatacttcagacctaacttcatggtgtacatagagccaacaccgttaacattagcccacgaatcaagtttctggtctagtgcagattcattgtcatcaatccttgctgataatgccgtttccgccgttgtccttgcctcagtttcattggctagtgcctcgttaacttgagttaatccagcattgaggttttcgttgaactctgccgatatctggttaacctgctgaaccctggcttccgtctcatttgctatgagaacttctgcgtgtttaatttcagctttcctcttgccattctcctttttcattattctaacgtctgcatcattagccaacgcattttggatgatgctgttagcgtagtcattgagttttgccgcgctatcctgcgcgctctcctgaagttctttcattgcgtcgctatcaaggatttcatccaggatcgcatccgtgatggcgttaacgtcagtagaagacatgccgcgagcgtaatcagtccacgctgaaacgttgccgatacggtctacgcttctggctttgtagaagttcacatagccagcgggcagaattgaatgccagtattcagaagccgggtaaggaatcagggtaagcaggcttgcatcctgatcggttccgctttgcgactggtaaagctcaatgtatgccgtatcctctgcaccttcaggcatggcccacttaacgcgaatcccaaagatttcactatccgacgcgaaaaggttaattggccctttcggcgctccaactttcccggtcagcgtcgcactagccaaagcagaccacggagacgcgatattgccgccgctaatgcaccttacgcgcgcctggtattcgccagcataaatcccttcaatgtcaacctgcgttgtcgctgtgcgcggaacgttgttccagttgccgccatccttacgccattgcacctcgtaaagttttgcgtactgcacggcagaccagccgattaccatcgtctctacgctcatcccctgcacaatgcgtgagaatgaactaatcgacacgttttccggcgctcccattgaatcagggtcaacaaccgaagttgggcgttcgtcagtgattacgccgttgtcgatcgcgtcgtacttgttcgggttgtattgggtggccgtgatggcgaaagtaaattcgtcgtcatcgctccccttctcaatcctggtaacaacgtactgttcagccgccagttggtcactttcgatcaggaatacgctgtcctgcgcaacttcgaagttatatcccacgtttagcgtcaaggtttttccgtctgctgatacgctggcaatggttcggcgtaatggcttaccgtcgtcggtgttcagaatcagcgtatcgcccgccttcgcgtcgcagcggaaagccaggaaaacctgcgttcccgttacttccataatgcgacctgacaacacaaggttaaaggctgattgccaatgcggatctgcaacgtaaatcacatcgccgcatgacgggatcatgccttccaggccagtagaaaacgaaacagtggttgcgcttaggttcgtttgcagaatccagcgcccacggcggtttgcttctgttcgtctggtgcaaccgatcgctgtgatgcttgtcgggttgtgaccgaaccgcatggcagcgtcagcgttgaatactggttcaacgtcctgttcgtactggttctctgcgtcgtcgaacatcacgttgcacgacgtgtacatcgttttttcgctcggaaaagttctaacgaatacgccatcaacgacgttatcagcagtgaacaggtaaaccggatcgcgtggcttgtcgacgataatagaaaggctttccccgttgtagaaagtcattccgcggaaggcggaacaaacatccctgaccaactggaaggcttcgacctgcgactgcacaaccacatccatcaggtaacgcggttccatcccaccgcgattgtccggcacaagctcgtcacaatattgcgccacctcatatagcgaccacttatcgaccgggatccctaactcgcgctggtctaacccataacgctgattcatgatcaggtcgtaaagaacccaagccgggttgttgctccatgcccatttgaaagttccgtcccacgtcccggcgtatgtcctgttaacaggatcgtagttgctcggaacctgaacaattttccacttcttcttgagcgagattgtcgggatctggttctggaacagatcgctatcaaactcgacgtaaagcattgccgtcagcgggtagcggaatttagcatcaatcacctctgcgtaggactgaacctggaaggcatcgaccaccttcaccccgtcagcgtccggcgtaattcggcttacgcggataagaacctgcgacgtgaagtcttgcggcaagttgacgcggatgctgcgatcgtaaccgccagtcgtgtttttcccgtcgattttgtcggtcaagtaggtttgataactcgcaccgtcaaccgccatttcgatcttgtactcaacgaccgaaccgaccatatcgccgttatctttttgcgtcagcacgcggggccataacaggcggaagcggatagcagaaagattcttgttcgataccgtcagcgtgtacggcgtgttaaaggtaacgtcgcgtgcaacctggaattcagcgcttgattcactgaagccctggatgtaactctgcgtttgcgtgccggggcgaaattctgcaataactccctcatagttatagctcccgtcttcgttctgaaccggaacgccgccgaaatgcaactgcttcaggctgaagtcatccactacttcaccgtcagaaacagccagtagtaacttaatcttgtctttcgagatcaggttatctggcatttctaccggagtgcgcgttttgcttgaaccccctttgcgggccttgatattagtcatcgtctagcctcctgttaatagtctcgcaattgtacacgacaaaaagcccggaggctatgcccccaggctaaaaagtgaatgggtgaattagttgttatcttctgcgtaagatcccgaaccgaacagcgcgccgccagccaacctgtaaccgtatggcaactggattggataacccgctgccgtggtgttaattggtccgccgaaagcatacgacggtttgttttccggagactcgctcgctcgcatgttgccgcccatctgcggcgcgatcatctgcattacgccacccaataccattgcgccaccagccataaatgccgccgatgaaaacgcccccattgccgccagcgatgcaccgccagtaaagaaggccgcaaccataatcgcagcgccgataacgatctgcaacaatccgccgttctttctggccttcgggatggggatgattcggatctccttcgctacggcgaacgttgcaaagtcattcgtgctgattggttttccgtccgcgacgataccaaagcgcatgttagaaccaaccttgctctgcatgaaggctttaaacccttccacctggtaggatagcgcccgaatgcattcgccgactgaatcgactgcgaggttatggaagacaccgaaccgacgcccaagggagccggaaagtttaatcgtctttgtatgtgatgccatgtttaagatccttatgtctgcaaattaaaaccttgtgctgctcataccacccggaatagatatcgcggcgggatagcttgccgaaggcgtggtgaaggatattattgtttccaacgtaaatcccagcgtggttccacttgtccgcctgaagctggaagataatcatatcgcctacttcgggatcgccagtgttttctatgaatccatcttcgcgccagtagtcgcggtaaagatcctctttgtattccggcttccaccattcgaacggcagtcggcggtcagtcagcgtgacgccgtggcgcttgtgaaaatccatcaccaggccgtagcaatcatacgcgcccaaagcccaggggcgaccaatcagcggcctgcgcttcggttcgataatccgcatatcaccttctggaatcgacactataacccacgacaagccagattcatcacagaagcataaatctgtggcgctcggaacggtggttgccccgtcgccagtgtgagagtgaacgaaggcgatcggctcaccttccagtgacgccagcgcgtactgtgtttcgtccggcattgattcgttctcaggatccggcgaaacgttatcgagtcggtgatatttctgcacgcgtgatttctgcgttaccagccctgcgcactcatgcgggtaaacttccttcgcatgctgcatgatctgcattttgatttttggagttaacatattaccgtccgcttttcaaggttgcagtagcgcaaccgccaaaatccaaagcctcatttccgaatcgcaatctgcacgacgaaacaaggccaccgcaaacatcctggctgggatcatcaaccttattcccgtatttgtcaaagtatccgttttgcccgttgtaactgcatcccttcccggttttgtaccagccgcgttgcgcccaataacaaacggtttgagtctgacgggccggaatcatcaagccatccatatcgaagacggatgttagctcaaacgtggccttctgcgggtcaacctgtttaggtctttcgatatagtaaacgaaccgccgaaaatcgccatcagccacgtttccatcttctttcagcaaatccttgaccaaaacccataccgtaactttcgcttgcatgaggccgttgtaggcgcgaataagagcactcgcttgcgcatcaatattgctaaccgtcagcgttggcttttctaccgtgccgtcacttgacattgcgataccgccgatcccgaacgggcgcgggccgtattgctcaccgcgaaacgtgatcgccttcggtgtcagcgttccaccgttaaccgccgccaaaagttcttcggttgagtaggcgatattctcgttgtggaatcgatagatctgcccgccgaacttcgtggcgtcaatgtcaatcagcgttaagatctcgccagggaacagcttttgcaagcagttcgcaaactcttttgaaacgttagttgtcatataaatttcctcctcttatcgactccagatcataggccaaaaaaaagcacccgtaaagggcgctttgtgctatccggctgaagagaatcgttcggcaaactccgccgttacct

SEQ ID NO: 20 - DNA, 176860 bp, unidentified
  source 1..176860: mol_type = genomic DNA
attaaattttacttgatcttgttagatctttttgataaaattttaattaataattattatagatcaaagattttaaaaggtcaagcattttcttcaaatttttatattaccccgtcaggccgctttgatcccgttccccgctaaatagaggaaaggagatcctatgtctacagaaatgattttaaaccaaatctcacctacaaactttcgggttgatattcctgataacagttacatgaaaggtttgactttacaagttcaaggggttacactaccatcaatgaacctcccagcagttgatattcctgcaaatatgatggttcgaggtaaagtacctggttcggcttttgagtttgatcctttgatgatccgctttgtagtcgatgaggaaatgagatcgtatcttgggatttacatatggatgttgagcacaaacgattacaacgagtttaactctgttgcgtgggatgatcctaagcaatcattcgctgtgcatatcctggataactcccagatgaaaacgatcgccacatttagattttatggtgccttcccaacaaacttgggtgaggttgaattgggttatactaacgatagtgatgaagcggttacgtgtatggcaacttttggcttccttcatatggaagttgaaattgacggaaaagtagtcacttctcaaaagagaatgagctaatgatttatgtgattagtggaaaaaagcgaactggtaaagatacggttgctaaatttattcaagaggcgtacaatgatgttcagtgtgaagcactggcatttggtatcaaaagaacgctaagagtagcaatgcagcgatatggttacgataaaccatacattcgtagtctggttgaaggaaaatattctgatccggatgctattttttacgaaggtgatcgagagaaacctcttgtgatgtctaatgaagatgttctaaatattttcaaaatcgggcttgaaatcctcaaagaacgtggatacaatattgtttatagtcctgatgatattgataatctgattatgagtaacgatactccctggagtatcagacgcttgatgcaagtgtttggaactgatatcgtatgcaagtatgataacacggtttgggttcgttacacattggaaagattcgtcaataaatatgctggtgacgaatacaatcatcttctggtaactgactgtcgtcaggaacacgaatataaatacctgaaacgcttgggtgctaagtttgtgtttattgtaaaagataccggaattgttgatgaacattccacggaaaaaggtttgacacctcaaccgggagatagtatcatcactaacgaaggtactttgaaacaactaaagagcaaagtgctcgatacttttaaattttaacaatgggtaataaaatgtctgatattcaaaaactgcaaaatgaagtactggtactgaaaggccgcgcattcgatctgaacgaagtaatcgcgcaaaaagaaagtgaactctctgttcatcgtcaacttctgtccgacctgtgttcggtactgggtattgacgcaagccagccagtaaccccagaagcagtgattggcgcggtatccgctctgatcccttccgttgaagtcgaaaaaggcgcggaagatgaagccgcctttggcgaagaagcgtaaaaacaaatttattacaaaggggcttcggccccttttttattggggtgttttatgaaatcatttcttgaaatcacaaaacctgttgtagatcctggtatctacatgtgtgctaaattcgatcaggcttcatgtgaggctttgaaaaatgttcaaaagacattaggtatcacaaagaatgctgtttcagccgaaaagatgcatacaacgatcgtatacagccggaaaacggttgatttgttcccgcaacaggacatcacagaacctgctaaactggttgatgttgaaaagtgggacacaaaatacggtagcactatcgtagggatcctggaatctgaatacctgcatagccgtttcaaagattctattgatgctggcgcaacatacgattatccggattacaaaccgcacgtaacccttgcatacgattcgatgcttgatgatatcagcggagtaaaaaggttgttgacactgcccgtggatttgactattatctgtgaagaggctgaatcactggatctggataagtcgttaaaagatattacagaacacattgaacagcgtggcgataagtgggttgttttgaatcacgatcgcacaaaagaacttggtgaatacgattcgaaagccgccgctgaaaagcgtttgcgtcagatcgaatacttcaaaaatcagtgaggattatatgaacagaacacgtttaatgtatcttgttaacagtgtacgaaaagaagttagcgaggcgtttactagcgcgttaggtgactggtatacaatcaaggtagcggctactgctgaccacattgcagatcgctttaaagaccgttcagtatcgattaaaaaagatattgaaacttatcgcgatatcatgatgagtctagcaaatcattattcgtgttatgttctaacctacgcggtgaaggccaaaacagaagggacacaggaagttattgtttatcgtcgggtaaatggtaaaatctttgcttgtcctataactgttcaaatgttctttaacgaaggcgaagagaagccagtgatcgctatacggttgcgaacggtgatccctgagtatgtttctttagctaacagaaaaacaatccaggtcaactacgttccaccaaaaattaattttgaatacgacggttatcgtcgggttatgtcccgcctggatcgtctaatcgcttctaaagattgtcctccgcaactttggatgttgaaaaactgaaaaaagcccttgcattcgtgcaggggctttgttatattggccttgtcgaaacaaaggaggctatcatgaaactttactggttaattttctcaaacgggtttgttatgaaaggaagtgttcattgcgcaaaaacttattgtgaatggaacaattgcactttcaagatcctgagtgttgcggcgtctcaacctgtaggggattactaatgactggtgataagtgggttgataaaactttgttgttgactttggtttatattatggtaagatacttaatatagaaaaaggaggatatcatgagaaacttaatgaacatcgcagaactcatcgcatacggcagctcactctatgttttggcgcacggtgacggaaaaggttacttaattttctttggtatcggccttgctatctctttcatcaaaaaattctttaagtgagaaatatattatggctaaaccatccggcaaaaaatataacgtcattgatgtttatagaatgactttaaaagactttgaaaacatgtgtcgggcttatggtagttctaccacccttcgcgaactggcagagtctgctaaaaaagaacgtcctcatgtttgcccgaaatgcaacggaaaaggttatgaaaccattcgttataacgcatatccgtctgggttgccagattctggatgggtcgaagatatgaaagatttcaacaaagaatgtgacctgtgtaatggtcatgggcgcaccaaagataaatttgttgcaaaacctgttaaagtggaatatgtaaaatcatgaaaatcgtcgatttgattaaaatggctaatggccttgtaacaagcgatcattatgccgactattgcgaacagtacgaggtgccactgcaacgcgcgatcaatcaatccgggtatgatggtgttagcgaaattaccaccgaaaacctgaaaacattcatcgtgtttgctaacaccttctggatgtatctaccggataatcctggtattcgtcaacctgcattctttacgctttgcaccttctgtgaaacgtatttgcctgattgtgaggatttcgaagaaatctatggctaaagtagagttgatgtatcttgataaaccaactggatctgttttcccttgtgggtttgctgatagtgcggaacaaatgatgtctatcgcgttttctcccagcatgaagccgatccctggtttagatgaaaatgtaatgaatgagtgtaaccagaacggaaaagtatggtatactcgacacgaagggaatgttgtttatcactccaccctcgaaaaccttaaatctgaaataggctatacaaaatgaatattgaacatgtatttgcacaggcattagaacagaaattaaacgcagaactcgatctgtaccgttatgacatggaagaacagattcgcggtgatcacaaaaacagtctggaacatgaatccagtcgccgcgaagtgtggaaacataccttctttgaaaatctccaggctggtgtgacaaaagccagtgctcgcgctaacaacgcacttgaagcatttgataacgcttttgcgggtgaataaatggaactatcagcgggtattatctttgttaaagatggtgccgtgttgatgggccatgccactgaaacgccccattgggatattccgaaggggcatgttgaaaagggcgaaactcatattgacgcggcgatccgcgaatgcttcgaagaaacaggatttgaagtgttcgcggaggaattggttagcctgggtgttctcgattacacgaaaacaaaaaaccttgctttattcctctatgtagggcaagattacccagtagcggaagaatgctattgtgcatcaactttcgttaagaacggacggactatacgtgaaatggatgattttaaatatgtcccgatctcacagattccgtcacatgcacgtaaaacgatggggcaactactgcctaaaattttagcaagatgagaaatatatcatggaaaatcaactgactttaatcgatatatgcaaatcaattcgcgatgctgttttaaccaaagcatccgaagtcactgtttactcttcatggagtgctgaattcggctatgaagaaattgtaaacttccctgaccgcctcaaaaataccaaatggttccgttatatcgatcctaatgagttttcccttgatgaactggaagaacttaatttcagtcgctgggatgaacatagcggcctacgcctgatccctttgtggttgcttccatacatcgatccggaagcaaaggtcatctgcattgatggtaacgaagttctgtttaaagatgcagataatgatcatcgtttcggtatgttggcctacggtgtgaaaccaaaggcataatatgaaatacgtcgattttaatactctatctgaaatgggccttgtttggcgcattaaccgcgaaatcttacaccctctggggcttgcgctttcccgtgatgtagaaacaggttcatcacctggcgcgttaatagctgatgatggtgtatggcatttcgacgaactcacaaacgaaagaaacgcagagaagttttctaaagttttggatttacatcaaagcggaaatctgttagattatctacagaagaacgcgaaataggggcttcggcccctttgaggatcatattatgaatggtaagcgggttattgttgttggcgaatcaaagcataacgaaaaaggcgatcatctgatcattaacaacgatcggggtggatggtacggggcgacacaaataaaaagcggttacgcaacgctggttgaaaaagatgtggttagattggcaactgctaacgatcctgggtattatggtactcgcgaagagtttgaaagcgaaaaggatcaagagatcgcagaattgaaaacacaggttcataatgcgcgtgtgtatgctgcaatgtgtttcactgtagcggttatgattacgattatatactggatggtgattttataatgacagacgaaattgtaagaaaccgtattcgtgagttaaaaactttccaaagtcgcgatcatgcgatcatggttggtagttacattcattggttcaagaacaacgatctggatctgaatccgtcctatcagcggccctacgtgtggaagcagaaagagcaagatgctttcatgaagactttgattactgggtttccttgcggtatcattgcgatcgcggttgatagtgaattcaacgaatctcgatgggtagaagtcattgatggaaaacaacgcttgacaactatcatgaaattctggaacaatgaaattggaataccgatgcctaacggttcccgtttgttttggggtgaaatggaaagacatgaacaacgtgcttttgaaaacatttcattgccagcgcttggactcgatgagtgcaacataaaagatcggttgaatttctttttgaaagtgaactttgcaggggttccacaatcaccggaacatatgcaagcaattttaactatgtatgagaatgcaaaatgaattttacaacagcgccttttgaaactggtaaatggtacttcaaaaaacgtcagagtcgtatccatagctatacttgcaagaaagaccatctttactatccgcaagtaatgcaagctatgtgtgataccgaaggaaacattcactctgttattgttccttctaataattgtaaactgagtctggttcagcgcaaaattcctaaagaattctatgttctttatgaagagtttacccctactcacctggaagaatcgttatttttcaaacagggtaagcgttacaaggtttctaaccgtgggatcattgattgcctggctgaaatcgatttagggaagtatggtcataacacatcgttacgccgcttcctttcttatggtagcaaccgacaggaacagcagaacgttatctatatcaataaagctgatatgcatggtaacgcgatccacattctgggaaattcatgcaccagtgaagtacaaagttctttccggactaaaattcctggatggatgttgatgtttttggaagaagtaggtgaaaacaaaccagccgtggcaaaggatccggtcgaaacgatgatccagaatcatgaaacactggaagaaacaacccgccgtgaactcattcaggatgaagttgtggatcttccaaaggcagaaggaatcatggtaagtcatgaagatttagccctgcttgatgcggttaagtttctcattgaacaaagttctgttgattatggttcccgtgctcgtattcaactgagtgcagaaggttacacgtatggtgtagattctcctgaattcctgatcaagtgggccgaaaaacgccgtagtgagttgatgaaatatagcgatgaactctttaataaaatcaatgagttgaaagcaacaatcgaaaaattaccaaaataatcaaaaagcccttgcattagtgcaggggctttgttatattacacacatcgaaacgaaacagagaaaggaaaacatcatgaacatgaacaaaaatattgccgctgtagttggttgtgaagtttctaacgcagaacgctatgacaacggtttctctttctgtgttccgactgaactcgatgcatacaaagccgcttacaaataccgcacaatgcataaggtaaacgttacttacgcgcctaacatcgaaatgtggttggttcaggtttacaacaaagtttaagaggttattatgggaaagcgatataccgtgatttggtttcataatgattcagaagttggtcgtagaacctgttacgattggggaggcgcaagaaatttcgctgaccaaaaacgtaaagaaggttactcggtagaaatcgaatgaatttccatgaacgcaaggccgcacgaaccgattattacatgaggttcgtgtatggctggaaattaaggaaatgtgttgcatgtaacggttcggggcggtatgataacaaccgttcccccaaatgcagtagctgtaatgggtctggtaaagaattttataaaagtgaggtttctaatgagcgtatcaaatgaactgactaactacttcaatattcgttatacctctggtattgatgactgggctagggatgaagaaatgactattaatcatgcatgtgcagttcatatgaaacgcttgcatgagcaagggaaattgaaagaccttaacctttacggcgacatcggatccggttactgctattcattctctatcaatgataaagagcgcatgaccgttactctcactaacttagttattcatgaacctggtaatgtcgttgcctgggggatccataacgggcgatatactgaaaatcacagcatgaaattagcgctgatgaatcataagttgtttggtggttgtgttcctgatatctttactaacgcacttctgcgtattttgaaatctatgtgaggcatatatgagtgatgaaattgtatttgatgatgcgacattaaacaagttgcataatgtcgccagcggaacctgtacagccatgcgggagaaatgggcggctacaatcaccgatgataacaagatcggtgttgttgatgaaatgggccgcgcgtttacagttacgtataattcttcttggtctggtgctgacaacaaaacaaaatccaactgcttgatgaaattcatcgacatgatggatccatacatgatcaaaaagctggttgaagagatccgccgtcttaataaatttgaagcggaatcgaaccactggaaagcaaatcatgcttgtgaggttgaacgtgctcgcgtactcaaagagcgtcctgatatgcccttagagcgcatcaaagcatatgaccgtatggttgagttggaagaagaaaataaacgcttacgtgcgcgtatggaagttctcatgagcgcggaaatgatgcaaaataacctaaacatgattaccgctatgttgcattctatccaaaacgatactaaccaaacaaaaaaattgttgtgtgatcgcttcaacgtacaaggatattattaatgtcatggttcaaacgagagtgtaagcacgaagctactggctatcgaggtgcagatccttacatattccagaaatatagtcaggtagatgggatagggcgaattcatttacatttatacgctagatgcgacaaatgcggaaaagagttttcttacgctatgatgcacctggatcgggcgcttaccgaattgtgccagtattctacgatgcgttcggaaattcaacgggttatagataataccccaatcaaacgataatttttgcaaaaaccccttgccaatggtgaggggttttgttatattgcattcatcgaaacaaaacagaggaatcatgaaatgactattaaaacgagaagtgttgaggttcagaatttatatgcggttcgcacaatcctggctgttttgatgggagtctctaccggaaaatcttcttatattgatagtttcatattttctctatacaatccacgttctcgctgggatggtgatgttagttggactgaacatttttgcgaccggttgaacgagatcgcaaacgaaatcagaaacgggaaatactggaaaactggagtcttctttactctgattgcagcagaagatgttaagttttgggatgcgataggggttccgatgaaaacatggaaaaatatcgaactcgaagcaaaataaatgttgcattaaaatctggttgtggtatcttacatacatagaaacgaaacagacaaaaaggaaatcatcatgaaacttgttcgcgaatcaatcaaactgggtaacgaatacaacggtaaatggtactttgtcatttacgacgacaacgccgaaaaactggaaaaagttgaagatgcattacgtgctatggaaactggtgcttctgttggtggtgaagtgatgacctgggaaaactactgcgacggttgcccttgctatagtgatggtttcggatctggtttctggattgatattgaagacgttccggcgttcaaagcctcctggaaaatcgctaagaaaatggcataattagcacaaattgctaaaactcgataaccctgatctgttattgtacacacatcgaaacgaaggaggaaatcatggaaatcatctacaaaagccggaactacaaaaaagaagatgttgcagcagtttacatcaagtaccggaacgtgaaatgtgagtacagcgggatctggggttacgaaatcgttgtcgaagaagtcaacgccgacaacaaaaccatttgcagtttcacggtaaactcggatagttctctgttcactacagaacagcttgaaaaagcgtatgatctccggaaccaggcttttaacgcggtacgtataaaatgagattccgtccttatatcgaattccttcgcggtatcagtgagatcctgaaccgcgaaatcaaacccagtccgttagccgttgagctttaccgactggaagcaacccccgaagatgcagcgaacgattacggagatcagttataatgttaacttttgaagagtacaaagcacagcgtgatcagttaagcaactggcacagagagatcggcagggagttgagcgcgtaccctaaaaacgaaatgggtatgacgatcgaatcaatccgcaatacgccggaatacaaagcgaaacgtgctttgtgcaacaaggttttccaacaacttcgtacccttaacgggaagtacgttaaaacgtacaaaaaagaactggctgacgaacgtaaaagaagattcaactaatcttttctaatttccatcctacggtattcttagagatatcgtagggtttatcgcatgttgtgatgacttcacccagataggttttcagtttacgcatggaaatatttctgtctttgcaaaactttttacattctccttcaactaaaaattcttctccattaggggaagtaaatttccacgtaaccgcgcgggaattaccttttcctcttcttgattcagattgtgctttgcgtatagtatccgctttttcttctccgtgtatctctttataagaccgatgatcgttgtatcgtgggttattctctcctttatgtgatgctataccttccttgaatcgccttttatgtgattctgaaattttctttgctgcatatttctggtgtgtttgcgaaatcttctttcctgtttctggtgtacatgaaaaatcaacactgttgtgtatgtgtttgttataaaaatgtgggttcttgtccaccttatagatttcgtgtaaccttttctcaagtttcatcgccttttcccttgacaacccagatacgattactttatatttgtagtgtcctggattttccttctgatcttggatgaaatgactatcacgggaactactgaaatagtgtttccctaaatcgtcggaagcaagcattgactttttaggttttcttgatccataatagtgcttgttctctataacatttgtgattctgtaaacgtaatacattatgaggttcctatgagacacgttaaagtaaacgccaaacatatcaaaacgcctgttggacttctactggaagcgaaaggaaagaaaatctatcgttccgaagaggttaattttaattttgatatgaaaacaggtcatatgatgacttggggaaaaactcctgctgacgatcctatttatagtcattttccttttattctcgatatcgagattacaactaaatgcaatggcccctctggtaaactttgcggtttctgctacaagtctaataaccctaacggcttcaatatggatcttgatacattcaaatctatcattgataaaatgccctggttaacacaatgcgccctcggtgctgatgcacagggacaaacaaaccctgatatgtttgatatgatggcctatgcgcgttctaaaggcattgtgcctaaccttaccattgctgatgtatcaaaagacgttgcagcgcgtttagcggctgttgctggggctgttgcggtatcagtatacaaacatgctggattcgatgtcgcgtttaattcagtggctaatctggcggaagccggacaacagcaaatcaaccttcatttcatggttagctctaaaacctatgatgatgcgtttaacgtggttgatgcggtgaagaatgatccgcgcttgaaacaagttaacgcgatcgtattcctgggtctgaaacaaaaaggccgtgggaagaactgggataccgttacacgcgagcagtataaagcgctggtagagtattgccttgaatctggtgtagggttcggttttgattcctgttccgctccggcctttgtagaggctatggaagggcatgaaaattttgaacagtacaaacagtatgcggaagattgcgaagctactatgtttagttcgtacatcaacgagaagggtgaattcttcccttgttcctttaccgaacgttgggtcgagggtggatggtcagaagggcttaacgtcctggaagccagcgactttatcaaagatatctgggaacatccgaaaactaagaaattccgtcaggaattgattggcaacaaggatcataacggttgtcgtaactgtccggcttatgctgtatgtggtaaagatatgcgcgtacacaaagcccctgaattggatgtgtacgcggtggaattgaaatgataaaaattaatccaataactattgacattcccgtaaaaccgcgtacactggaatcgttgatcgagaagtatgaatattctctggctactccggcgacagcagaaatggcaatggcggaaaggcaaagcattatccatgaatgtgatatgaagggtttccatactgatgaagatatggcgatgattgattatctatggaaagttcgcggcgcggtagtcgatttgattctttcaaaccaactgatgcaaaacgaaacgcgtcgtatacaagaccgtatacgctctcagttgtatggcatgagtacagaacagaaggaaagaatgtatgcaagaaataatcgatgaacttatgtatgtgtataaagagcgatgcaaaaacgggcgcatcactgaaccaaaggcaaaagcgattattgaaaattattgtgcaaaattacaagcacaagacgctagttcaaaacttctgaacagtctgatgatcctgaaacttttgattgcgtccggtgatgatatgccgtatgatgcagatagtgcagaaggattccagaaaagttatcgttcatggggagtgatttattcccgctcactgggttcttatgactctgttatgtggaatctgatgcaccttgataagctgatctgggaagtgctgaaagaagagggtatatcatgacattcactcataccggaatggttgaaacgataacagcaggtaagaagcgtatacccttgatgaaatcagggaaatactggaagagtgaagaacataagtttgatcataatggcaactcatttggttcttcttatgctaaactacacctgaaaaccattaaaccaatttaaaggaaactctatgttaactaatgaacttagcggggctattcgtaccattgaagggatccttcatgatttgcgtatgggtaacgaaatttgtgtaagcgacattgaagcaaatctggttgaatggcgcggcgctctgtatggggcaacacaaggaaaagatccgttgtttacggaatatgatatgtatacagtaaccattgacaataaaacttatcgttttcagtggcctgatgatgcatacgatcatatcaaaacattttacagtactggaggtgctctttttgctaccagtattggtgttaacgaattgccttttcatcctgatggattgcgaccttccgatcatttagggtgtacaactgtgttactgggtatgtgcggtaactattctgatcccgtttactggattgaagccagtaaaaccaacttaaaaagagtttaacatgaaatatattattgctttggtgttagtcgttattgtcgttttagcacaagctggatgcaccgatgagaaagaagccgaacgtattctgactgctaacgggtttaccgatatcacgtacacaggccgcgcctggttcgcatgtgatgagaaagacacctacgcaacagggttcgttgctaaaagccctacaggggtgaaaattgaaggtgctgtgtgttctggattatttttcaaaaatagtacaattcgcttcaaataagtgttgacgtagatacggggttatgagactatagccctgtcgaaacgaaacgcactttaggagagaaaaatggacatcatgaacgaaatcttagctcacatcgaagccaacaaagaagcaatgaaagctaaagaaggttgggttgttgttgacgattgcttcaatcctaatatctggactccggttttcattgatgagaacggtaacgaagcccacgggttctatgatgctgcaatcttcgatactgccgaagaagcatgtgatttctgggcctacgttagcggtgatgctccatttacaaaatacggtgtgtgccgttgctgtgaactctaattaactagccccgaaaggggcttttttgtaggtaaaattatgattacgaaagcacaaaggatcattaatcatttagaaacagggttcccgtaccagggagatttaacccgcgatattattgatatcctttctgaacacgacggcatgaaggccgaaatcgaagaactgttacatcctgatgctaacgtgtttgcttcattgatgagcgatgtagtgaacattgacgctgatgaacttggatgcattgaaacaacaaatgatggtgataaaaccatactgaaacaggcttgtgaacggatcgacaaccttcatgatcgtttgttcactttaacttttccgtcaaaaaacgataaaccttgttgacatccagaaaataaactagtaatctgtagttacaccaattgagaggaatatattatgaaaagtgcttttgaaaaacgtgctgttaagaaagatgtgaaacctggtgcgatcatgtatgaagtattctgcgtgaacggagaaaatgcggaaatgggtagcaagatgattgttactggattcccatacattcatcgcggtattgggctgtttgctaaatgtatcaccctgtacaaagactgggattatcacacagaattctctcttaaagatcgcagtatggacgggtacaacggatataacttccatgcactctttctaacaaaagaggatgcacaggcttacattgatgaagtcaatgaagaccgtcttcctccctatatggaagatcgtagaaacgagcaaatcgaacgtaaacgtgaatatgacgaatgtttcggtgacctttactaattaattatcgaacctcttaaaccataaataccctgtgtacccaaacagggtatttttacaagaggtgatttatgtttaaattcagtcaaaaaagccttaacaaccttaaaggcgttaaacctcaactggtgaaagtcgtagaacgtgctctgcaactgtctcctgttgattttggtgtacgtgaaggtctgcgtactgtggaacaacagcgcgagaacgtccgtaagggtgtatctcaaacaatgaactcaaaacacatcacgggtgatgcggtggatctgtatcctagcgtgttgcctcaaggctggcaaacaaaccctaaagtgtggttgcctgtcctgaatgctgttaaacaagcaggtgatgaactgggtgttaaactgcgttttggtatcaactggaaaaatgatccgaaccttccgatcgaaacaaaattcattgatgccccgcatgtggaattagcgtaacaaaggggctttggccccttaaaggtaaaacatgaatagtgaattttatgtaaagacaattgaagaatgtcgtaagatgcatcttatgcgagagttggaagaaccaacgcataattacggccctaacgattttatggtattcgaaaccaggctggatctgggcagagaaacgcaaaagactaaaggcgcgtttgattttatgaaacgttcccatagttcccttaacatttacgtagcgcatacgttaaatgcagcacaagacgccaaacagctaaatggtgctaccggatgtgatgtattgaccagtaaaggggcaattcttaatcatttccgtggacgtcgaatagagcaccaggcaataaaccttatttttgatgagtgtgatcttacgcgcaatgaacgcatggacattgtgtataatacactcatgcattgtgtacaaaagaaacatccattagcatatattcacgtaatttcgctgggtatgtaatgaaaagtcatggctattcatcaagaaccatacatgaagagattcaagggatcgaatctcttctgaattttgtagatgttgatacatctacaggtaaagtgtattggaaagttcagcgcggccctatgtctcctggaagtgaagccggaagcaaaaacgagtattcccaaattcattttaaaggttctatgtatttgcgacaccgaatagtgttttacgttgagaatggttatcttcctcctatcgtagatcatgtatatggtgttgagaatggagatacagcaagaaatttacagaaagcgacgaaccagcaaaatgcgatgaaaaagaaatgtaactcaaacagtagtacagggttgaaaggtgtttcttatcataaagccaatgggaagtacaaagcgcagataaacatagatggaaaaagaaaatttttggggtactataacactccagaagaagcaaaatccgtttataaccggaaagcaaaagaggttttcggtgcattttttaacgaaaccacataaggttaatgtatgtcaaaatacgtattagacaccaatgttttgattagtaacccctattcaatctattcattcactcaacctggtacagaaatcattattacctctgctactatgggtgaattagatcacctgaaaacgaaagaacgaacagcgcacgaagcacgattggcgatccggcttctgtcaaaagttattttcggtcagtcatatgatgcgattacgaaatcaggtattcctttaaacctgacaaacccagcactgtctgacactatcacccttaaagtggttgattatgtcggaaacaaaacgtttgctcttgacaagcaagacgaacgaatcattgaaacttgtatgcagcaggatgcaaccttagttactcgcgatattatgatgttgctgatcgcaatgtcccgtgggtgtaaggtagaacagtatactggcgacgatacgttaaaagatagcgatgtattgtattccggttatgtagagatccctgatttctgggatactgtggaagtgttgggatatacggataatgtagcccaaatcacttacagttcgcttcctgacgaagatttttatcctaaccagtacattacctcaaatggtgagttagtcgggcgtgtggtgactgctgatgagatttgcttgaatgtcttacctgttaagcacgaacaggcgatgaaacgcaaactcatgaaagctatccagccccgtgattctctgcaagcggctttcgttgaatccattatgagcaatgaaatcgatgttgctaccattatgggcggcgctggttctggtaaaacaatgcttgctgtttccggtgctatgcacctggttaatagtggacattacgctaacttgatgtatgtgaagtcagatagcccgttatcaagtgaaattggcttccttcctggtacactgggcgaaaaactccggccttctatcgaaccttgtattactagcctgaacattctgtttaaggataatccggaatctgaaaaatacattgaaggtttgattgaaaaaggggtggtgcaattccctagcctgtattatttccgtggtcgcagtattggtcatccggatccgggcaaaggttctgtgctgattgttgatgaatgtcaaaaccttagcaaccatgaaattaaatctatcatttctcgttgcggagagaacacacttctgatactatgcgggaacattaagcagatcgacaaccctcgaaacactgccgtaaacaacgggtttgtatgggctgttgaaaagctgaaagaatacgaacactcaagccatatcattcttgatacagtgtatcgttcccgtctcgcggcgtttgtcgaagacaatttctaatgatgggggcgaaagccccctttttgtgaggtgtatatgattactgtcatccatagccaaaaactaattactgtttgtagttgctgtaaaagtgggttagaatacgaactatctgatatacagcaaaagagagaatcgatttacaatggatttttctctgctgctgattatgtcgtgaaaaaatttatcacatgccctaaatgtggtaactctgtgaaattatttttgaattgaggtttccgtaaaatgaaactagaaaaacgttattatgtagcaaaattgagcgatcttaaagaactgacaccagaagatttgaaaacgttcaacgaaatttgcacgaaaatcgaaatcgggcgcgggattaatggtaagaacccgtttgatgcaatcgtgatcgagaatgattggcccgaatacgataaagtgttggaaatgctgacttctcgtattgttcgcgaagaaaccgatcgcaagtttgaaaagatgctggacaacaaagaacgcctcggatactttttcgttgttgaaactcaccaggggacttttctgatcaccagtgatgcgcacagcacaaatcgtctgacgaaatacagtgggtacaaataccgcgcattgttcagccctgattgtggatttgacaacagtgagatccttactactagctggagcgtctactttaaacatgccgttatggtatcgttagatgaaatcattgcgctatacgatcctaacaaggctatttcaaattataacattgctgagtttatcgccgataaactacgtgacgcgaaaactatctaaaatagttgcataaatataaagtggggtgtattattgcccctctttttgcaacataggtattaaaatgaagaaaattattattgctgccagcattttcttgtgctctttttctggcaacgctgcgacggatccgctaggggatttcattgcggatttgcctactcatcaattgcctttacaaaaggctactgtgaagcctccggcaaacaaaaattctccatcctacatcaaggatttggataacattacaccgaagcagaaagaggttttggagtatgcttatcgagttggacacaactatgatttgaagactgcaaaacctgtagaaaaagataaggctaaacgtttaggctatcatttagcggctattgcctggatcgagtctcgcgcatgtgagaatgtcggtaaaggtaaaaaaggccatcacgcttatggatgctggcaagttaccgcaagtagcgccagcgcacgaatggataagtcatatcctaaacgcgtagtaatcaaaaagctcgaaactcttcaaggtggatcgaagtatgcgatctatgaactggagtactggcttgattaccacaaaggcgacttgaaaaaggcgctggcgagctataacgctggtttcaagtatacaaagaaagaagcccgtgattatgctcgtatggttaatacaaccgcgaagctgttagaagaaaaacaaatcatttgacaaaaagcccttgacttcggtcgggggcttttttattatgagtgcatctaattgagaggaatacattatgagcgtttcacatcaagtcattgtttcacaaaaatatgattaccctaacctgctgcgttgtgtgcaagcgatccgtgatcatttgagcaaacaagataacatagctattaaagaaattactttgagcaaatctcttgattgctttaacatgtacttcacttatgatgatgaacagcgccgcttgttcatttgtgaactcatggatatgtattatgatatggaatacaaccctattcctaaaaatgggatgtattttagtatcaatgtctggggagaatcacagaaaatcatggatcttgtgaaagaagccgtgtatactgtcatcacaagttcggatactgtgtatgagcgcccgaacgatgcttatgaatcacgattcactttggttaaatgaggaatacattatgagcgacctgatcctgaacgaaactaaacgcgtactgtttaaagctggttcctacatcgtagcgactccgaaaggcaatacttcccattgggcggttgctgattggatcatgtacattgacaaaaacggggaatgggtacaatgagaaatttagctttcgaagtaaccgtaattgatcaacggatcaaagaacttcatgcacagatagccccgctgcaagaagaaatttctaccttgaacaaggagaaaagagacctgattgaacttatcgatcaggatatcattaacaacgtcaaggatggggaaaagatccccgtgatgttggaatatcgttcttctagtgtgtcttatcacgcggcgacacaatttttcgaatctatcggtctgggtatcgatggtatggatccggacattaaccaatactgtttgcggatcgcgatggatgaagacggttcgaacattaatcgagtgttaaccgctttagaaatggttgaaccttttgtaaggccgcaagcaaatgggcgtaagcgtttcgatctgttcgaacatactctgtctgaatgggattgctactggctgacatacaatccagctaacaaacgttgggctgttgaaactggtagtgggatgagacgaaatcaggatccgacattctctgatatgtctctgaaaaaagttcttgcgtatatctgcaatgcgcattattatacccctatcgaagaggatgaataaggaatcatcatgaaaaagttagcactgcttttaactctggttgctggatttgctcacgctggtgatgctcgcctggatgagttatgcaacaatcgtgatatcaaagatgtcgcggtatgtaagcaagtgatcgcagaacagttagatgttgcttatatgtggggagaggaaaatgctcacctgtataaacgcggtaagttgctgaaacaaaaagagtttttgcagtctgaaccaatgatgaatctatgcaaacaagcgccaaataaggaacggtgtgaaaagttccgtacttatttggttgatgaatttaatgctggcatagggctttactaatggctatctggatttttattattatggcggcggttgtggtgtttttggcgtacaatgctggtaagcatgagagcactgggccttgttactattgcggggatgatgactatgtttagtgctggatactttataggcgttgttatcggttttataatttttggtggtgttttatatatgtgtcatcaagaagatcgccgccgtgaacggaaaggtaaacaggtttgacattacgtatttttcttacgttcttttaataattaaggttaatttatgaatgatatagacaaagcaaaactctataaaaagttagataagtttgctgatgctcgcgaaaagtttttagatgatggtgatttggctcatgctcaagaaactaaggattggtttgatgatattactgatttcatcgatatgctaattgaacgtgaattatataggaataataaaaatgatcattaaagaagtgaaaggtaatgctgtcaatatgtatctgaatggtgaaggccatttgatccacggatgcaactgctattgcaatatgggcgctggtattgctcgcgaaatccgcgatcgtattcctggtgcatttcaagttgatgccaatacgttaaaaggttcccgtgataagctcggaacttgttctgtttacattggcgaaaaaggcaacattgttttcaatgcatatactcaatatgatttctggacacctgggccgcgtgtcgattatgacgcaatcggcaatgcttttaaacaggctgtagggcttgctgacgccgttaagactggaaagcctatcatcacacctttaatcggtgctggcctcgctgggggagactgggaactcattaagcgcattattaatgaggtgactggcgattacccgatcattgtcgttcatttcgatcctcgtaaggcgaattaatcatgatggatcctatcaaagcaggtcgggagattaagaaagcgaacaaacggatcgccgtaatcaaaggacaacgcgccgcactggttaaaacctgtaatgcattggcgcaagcgatgaaagcgaataacatcgacgttatgcaacgtaaagaaactgttaatgttctatgtatcgttgacaattgtctgagtaaggaaatggacgaactgaaaagcaaaatcaatatgtggtatcttgatattcatcaagcacaagatagcgaaatgggcggttatacacatggctaacgcaaacattatagaaaatgttcgctgtcgggattgtcatttccctttaatttgtgtaatgaacattaccaaacccccttatgatgagtgggattggtggatctactgttcaaataaaacatgcaaaaaccatgaaggggaagggaaattccaaaataccccagattttgttgagaggataaatggctaaactatattttcattatgcatcaatgaatgctggcaagagtgctcgtttactcaccgatgcatacaactaccaggaacgcggtatgcggatcctgatgtacaaaccagcaattgatacgcgagaaggtaaacagagtatctcttcgcgtattgggttggaagcaacatgtaccatgatcacacctgatatggacttatattatgatgttcacaacaatcatttttatagcgacagccagaaactagtttcttgtgtgtttgtggacgaagcacaattcctttccaggaaaaatgtcatggatctgtgtcgggttgttgacgaattagatatacccgtaatgacatatggactaagaaccgattttcagttgaacctgtttgaaggttcttatatgttgctggcacttgctgatgagatcagggagttgcggggggtttgtcattgtggaaagaaagcaactaccgttgcccgtattgatgcaaatggcaaatttgttgctaatggcgaccagattgagatcggggccgaagacaaatatgtttcactttgtcgaaaacattacttgcaactaaagaacaaccctgatacagtggaagcataaaacaaaaggagatcattatgagtcgcacttaccgtaagaaatacaatcctcttcgtgaccgttcatctaacgaaaagatcgaagaagtaaaagagtattctcgttattatgctcaacatggtattgatccggatgggttgcgttggtactcaaccaactggaaacacaaatcaggatgtgcatacattcgatttgataataatctgtgtcgcgacggtaacaaagctcatggcgatctgaatgcaatgctttctattgcagtaaagaaaattgattcaaaagtacgtacccgtttacgtcaggaactgaaacgtatgaaagctggtgtgatcggttgggacgaaaacgtagaaaacgtgaacaaaatacgcgctttcgaaagaagtttgtgttggtatgacattacttgattgactttacagcaaaaatattataacgaggcttcggcctcgtttttgctataaatatatacaggagtagacctatagtgggtctatgagtaaaagagtaattgttatgaacattaaacgcatatcaatggctgtgctgttcggattgttgatgatgacacccacaacacacgccgccgaccgtccggttcagaaagaatttgacgattatatcaatgcggcccttcaagtatacatcacaacgatccctcccagcgtaaatacaagcgaactattctacaactacatggaacgaaaatggcaccaaaaacaatgccgatctgaatccgaatgcgcaaagctagggattagggtcgcgtatgagtttgcaagtatccatcgttcataaagggatcatcatgcaatcatttaaacaaattacagaatctgagaactcaagcaagatagatgcctttattggcatgtgccttatgtccgttacctatatgcatagcgcacattttgcaacaggttcatactcacaacataaagcatatgagggtttttacgaagatatgcaggatttggttgataaattcaccgaaatccacataggaatcacgggaagatacaaacctgtgctaaaaaccgaaaatgtgcttgacacggtggcgtatctccgtaaaatagccaacgaagcaaacgagatctacgaatcagtagatagttctttgaagaacatcctggacgagattaagggcttgtgctatcaaacaatctacaagctgacaaaactttcttaaaaatagtttgacagcgtgaaatgtgatgatagaataactatcgaattgaacaacaacttatggaaattatgatgaacttaaacactatcgtgaacaacccgaagaaaacctctctgatcgctctgggcgtagtcgcagcactgtggttagtgcctaacatgtataccattgtgcaagacggtacggttaaaactgaaaccttcatgggtaaagtatcaccgaaacccgtactgcccggtttccacattgtaaacccgctggcaacgtttgatacgttcagtaccaaagacatcgcgatgaagttcgacaaattacaggttccgtcccaggataaatttaaatccactgtggatatgaccgtaatgctgcaattcgacggtagcaaagcaccgatcaaccgtatcaacgcgggtaatcaggatcaggcactggataagtatgtaaccgaaaaactgctttccactgttcgcgaatttggtaaatccgtaccaaaagcgcaagacctgtttgatgcgaagatccaaaaccaactgcaaattgcgattcagcaggaagtagaagattatgcacggccttacggttacactgtgaaacaggtattcttgcaggatatcaccctaccggaagttatcatggaacaggtaactaacacgaagatccgcgaagaacaggttaacgctgctaaagctgaactacaaaaagtagaacagacttcattgcaagcagtaaaacaagcggaagctgatcgccaggcccgtgaaaatgccgcaatcgctaacgaacgtgatgctgatgcccgtctgtatgcagcgaagaaagaagcagaagccaacgccgccctgcaacgcaccattacaccggaaatgatccgctggaaagaactggatgtacagatgaactactctacccgctataaaggtggcgtacctcaaactgtaatgggttcggattatgctggtaaagtgatttttgattctcgtaaataatgttttaaagccccctctttgggggcttgacatctaaaacgagaatactataatgaacataaaacagatcgtactgactacaatcatttcgctattctttggtttcattggtggattgtttggtgtgttgataattgcgtctgttttatgattaacctttaaacgtggagcacgttatgaaacacaaatatgataaagctgtagtaattggacgttttcaaccttttcactatggtcatgagaaaatggtaagggaagcccttgctgttgctgatacggtttacattctgatcggttctgcttatgcatatccgaacacattaaacccattgaccgctaaacagcgtcaagcaatgatcactcgctggtctatctgcaaacttgatgttggagatgcagccagaatcaaattcgcgtacattccggattacctctataacgaggaaaaatggaaatcccgtgttcgtatggcaatcgatgaaactcgaaatgatcgaattgcgatcgtcgggtacgaaaaagacaaagattcttactggcttaaagcattcggatggaatcatattccggttgaacctgtgaaggttggagatcaggatctgtcctcgaccaatttacgcaaaattatctgggaacatcatgaaggctgggacgaagatttgttaaaatatgcgcctagcactacggtttcctttatcgatgaatggacacaaacaaaagaattccagcgtttgtcccatgaagatgcacactggcaacgagagattgacaagttcaaaaaatatccgtatccggattctctgaactgttgcacggctgactcagtggtcgtatgtaataaccacgtgttagtaatccgtcgtaagtttgcgcctggtaaagatgcgttagcgcttccgggtggacacaaaaacggtaacgaaacgttccttgattgtgcgatccgtgaattgctggaagaagtacgaattaaagtaccagaaaaggttattcgtggttctatccgtaattcgatgctgtttgatcatccgaaacgttcggtgtacttctcaaaaccgactgtagcacaatatatcaagctcgaacctaataacgatggttcattacctcgtattatgggcggctctgatgatgcagcagacgcgttctggctaccgatgcacgaagtgatcgcgatgcgggatctattcttcgatgaccattatcaaatcatcgtagcatttaccggaatttaaaacaaagcccttgacttaggtcaggggcttttgctatattgggcctacagaaacaaaagaggcttattatgaaacatccctattgtcttgttacccgtccgatttgtccaggtgggttgcctgttgcctgttggcagttgattgaaaagggtgatgcgtttttaaacaaacgcggtgagaatgttttcgtttacggtgttaactcaatcgataatgaaactatggttatcaccgatgagaaaacaaatgaaaaatatacgttgacatccgaacacgattgtcgtaattttaacgtatattggaaatctgatgaagaatttgaaactgtgaggaaatgattatgatccctgttattagtgctcgtgaacaagtagcaaaaccccgtgctgttaaagttggtgattttctggacgtgagttttacctgtggagaaactcagaagcaacacaaagaatctttcagcgtgatccttgtatctaaagattctgatggttcaatggtttacattctgcataaagtaggaaccgcccgtgttcagggtcatgtaatgattatctcagtatatcctggcggagataaagtatcttctcagtgtttagataaagtgactgctcgatatctgagagatagtgttttcatggcggagattagcaaaatttatgttaattctcgttctgctgttgatggtattgttacccatgtaggtgatggattagtgttcaccgaaaaatctcatgaatcggttagacgtgctgttaaagttggtgacagactcggaagccctcgccgtgattatgtggttgaatacatcacctcttctggtgacatcatcgtgaaagctgacaaaggttctaccgttgtcatttcccgacgcgataaaaagctgattgaatcactcaatcaggatctggaatgggtcgatgaatcagaggtgtacgctgcatgaaacctcgcttgattatgtcggatatagtgattgtcaacaacgaagaatattatgttgcagacattaacacgaagggaacccgcgagattttggatctggagtgtgttaggggtggcgaaaaccgattcgttgtgataacatacaacagaagcagtaaagaaacgttgggtgtgcctgttcccgttcattactgtgaaaaaactaattgctggagacgtaaatgattgatttaagtgatgtgaaagttggtgatacgttgtatgatgctgggatccgtagtgaccagcgacaaaatcgcaaccccaaaaccctttacgtacaaaaagttgcgcgtcagtacctgtatgcatctttccgaccggaagatgggtctgattgttgtactaatattaaaatcaagcgcaattccggatgggctgaggggtggatgggttatcaactgtatcgtagcgaagaagaatacaaagaaatggtgtatcgccgcgatttgtgtgataagattaaaaaagtatttgggaatagctacggaacaaacattccggatattactaccgctgaattgcgcgggatcgcaaaaacattaaaggttgaattctgatgaaaatgattatggaaaccgtattcggttctcacctgtacggactggaaacaccaacaagcgataaagactacaaagggatctatctccctcatcctcgcgaaatcctgttaggcactgcgaagaagtctatcgatacatcaactggtgataaaaactcaaagaacgatgttaatgacgtagatcgtcagatttacagtctgcaaaagtttattagcctcgcatgtgatggtgataccgtggcgattgatatgcttcatgcagatgatagcaagctgatcgctaactctgatatctggcaatatctccgcgctaaccgttcgcgcttctacactacggaattaactggcctgtttggttatgttcgtaagcaagcggcgaagtatggtgttaaaggttctcgcctggcggcactgcgtgaagttgttgatgtgttacaaatgattcccgattactggtatggtacatcattgctgggtaacgtggatgaatctaattacggcaagcgcatcaaagttggtgagatttctaaccgattcccgaccaacgagttttgtcgattcgttacagacaaaacactgaaatcaggttgtcaggaattttatgaagttctggggcgtaaattccagtctacgatcaccgtagcggaaatgaaaaaatccgtgtataaactctgggatgaatacggggaacgagcacggcaagcagaagccaacaacgggatcgactggaaagctctttctcatgcgttgcgcggtggtatgcaattgatccagattttcaaagaaggtgatattgtatatcctcttccggatagtgcatttttgaaaatggttaaagctggcggtgttcctttcgcaaccgtacaagaggcgctagaatcaacgatgtgtgaagttgaaaagctggcggctgtatctggttatccgaaagaagttgatcgcgatttctggaatgatttcattgaacgtgtgtattctgaacatgttgtgaggtactataaatgacatatccgaaattatctggcgctgaaattgatgttctgtgtaaactttacggatactcgtcaaaaatgttggatttagatttcaacgatgttcccagtaaatcagggcgtgattccctgattcaaaaaggttacgcatcaatggcgtttagttcaccaacgaaaaatactgatatgtgtttagtgatcacccctctgggcgttgacgcatacaaacacggaattgaaacggagtggcgataatgagtgatgttattttgaacgttaaagatgtagtattgggtgatactaaaaccctagattcggcaatggaaaaggctgttgttaaaattatgcgcaatagcctccgcctggaagttaacgagattacagaaacttgttatacaggtgggctttgtggtcaatctctttatcgtgatgcaaaaagtgtgaatattcagctatgggctgatattggcgaagaatcatacaaaatcgatgaggttgatttcgacgtatgaaaataattgacctttgcgctggtgttggtggcgtgaggctcggtttcgataaggcattcggcggggtcgaatgccttttaacgtctgaaatcgataaacatgcacaacaaacatatgctgataactggggtgatgaaaatattcagggtgatatattcgccattgatgaaaacaaagtaccggatcatgatattctgctggcggggtttccttgtcaggcgttcagtaaagcagggttaaaacagggcatgttagatcctcgcggtactatcatctttgaaatactccgcattatacgggctaaaaagccctctgtgctgttctttgagaatgttccccagctattaacccatgacaagggcaacacgtttaaaaccatctacaggctgttacaggacgaaggatacgatatccattatcaggtaatgaatacaaaagactttggattgcctcaacgaagagagcgtgtgtttattgtctgctttcgcgatccggtattctttagttttcctgttcctccacgtaccccaacaagggtaggtgacattctcgaaccggataatgatcaatacaccatatcagatcgtgcctggaagggctttagagagcgtaaagagcgaaacaaggcaaacggcaaggggtttggctatcaggccgttacagttgattctgtgtgtactgggacgataacagcccaatactataaggatggtgttcaatgtctggtattacaggaaggtaagaaccctcgaatgttatcacctcgcgagtgtttccggttgcaaggatttccggattcattcaagatgcataagagcaaaacacaggcgtacaaacaagcgggtaactctgtatctgttccggtgatcgaagcaatcgcaaaacaaatcaaaaaagcgcttgcacaggctaaagaataatagtatagtgtccttgttgaaacgaaactgacaaaaggaatataccatgacttttaatgacctgtttaacggatgtactggtgctggcgcgaaattcaatcttctgaaagattatccgctgggttctaatcctggttatgtgatggttgaagttcgcaacggtgaatactataacgtgttcatgtgggatcgttctttctcttactgctggttcggtgcgaaatataaaccagattatattctggagcaaatcgaaacagtgaaagctaaaaaccctgaactgtatgcattcgcagagtctattcgtggtgtgttcggacattgattaataaagccccgaaaggggctttttcgtgaggtttatatgattaccgaagttattgaaatggttttatacgcgttaacgtttgttctcttgttccttagtgcggagtggactagtcgcggaaatgtagtaatggcccgtatttgtgcggttgctgtgttctggatcctgggtttactgctggttagcatcgttagggggtggtgatgatttacgtagcttcttatagtgctgattatgaattcactgaaattgcccatgtttctgaatcattgcaaaactgcgttgatgcgctgaacaaagttcctaatttcccttatcttggtgatcatgttactattgatgtatgggaaaatgaaaaaatcattgcaaaaagttcaacattcgggcatcgtgatgtatgggatgaagaatcgcaacagtacaacgagatccctgtaacttttgaagaagttatgaaaaacatgaaggaagtgaaaaatgaacatctatagcattgagttgatttttgatgaccgttttgagcaaacgtgtgattgtgtatgttctactgttgacctgaacgtcgcgatcaaatacattaaacatacaccgcttccgtcgttgcattactattgtgtaactgtgtttgacgggtttaccggaaagcaaacgcatcgttgtactgttgggtatgacgaaagaaaacatttcaccgcttttgaatttgaggaaatcaaatgaaaatccgttctggttttgtgagcaatagttcatcaagtagctttattgtacggttcccgaaggatccgactgatatcaacaatctccgcgaaatgatgggtgattgtgttcctaactgtggttatagctggatgacttgcccgacagcggaagaagttgtacagcaagtacaccgcgacctgggtggtcatatgggaaatagcttcgaatcatactatgatgataagcgttatgaatgggaaaccgaagatagcgccgaaactcgatatcggtctaatcctcaaattgcgcttgcttatgatgggcgtgactggtatgatctggaaacagaagagaaagacgctttgatcaaaatgtggctgtatgaagaatacaacgctaactttggtaatcagaacggtgtattcatttatgaatttacttactctgatgaatgcggagaatttcaatcccagcttgaacacgggcaaattttccgtaatctggaacacactatgaagagtcatcactgatggaatacgaaatctgtgtaaaaatgcccccctatcaactgggggaagaaataacttttagtcaaactctaccagtaccaattgatttattttctttgcgaaaatatcttgaacggtttgatctgaatgagtatactattcaaatcgtaaggattaaaaatcctgttgcctacgctctgtcttttgacgttggcgagtctcaaacaacaacgatggatgattttgtttcattgttgagtagtaagtttggatgcgatgatgcattagatattattagcaaaaaagtaaacgaaattttaatcaaatttacctataaatgagaaaattatgatcactaacattgaattcaaaaacgccgtagccaaaccaaccccgactaaccacgtttttgtttgtgacgtatccggatcgatgtataacgaactcccgcgcattcgtcagcacctgaaaaacaacctggcaacgctggttaaacaggatgataccgtatctattctgtatttctccagccgtggtcagttcggttctgtattcgtgggcgaaaaggttagctctgtatccgacctgagcaaaatcaatgatgctatcgatcgttatctgcgtccgaccggatgtactggcttcgttgaacctctgcaactggcggttgaagtcgctaccgatctgcaagcggataatggtaatctgaacagtctgatcttcctgactgatggttatgataactgctggcgtactgatgatatcctgaaagcgtgttctactctgccgttgacgtttaacaacattgctttcctggaatatggttattatgtaaaccgtcctctgctggaaaaaatggcagaagcaaccaacgcattacacaaattcgttgaagggtttgatgcatatgtacctgcatttgatgaaatcattaccgcgcaaacctccgcacgtgttgaagtcaaagttggcgatgcaacccatgcgatctacctggatgaaggccgtgtgtatgtcctgaatgctgcaaatggtgttgttctggttccggaacatatcaaaaacatttgggcgctgggtgaaaacgcgatcaatgacgttgacggcttcgatccggcaacagcagaaggtgaacaggttctgtatgtggttctgtatcatgcgcttcataccatgaatccagatctggcatggaaagttctgaaaaagctgggtgatgtgcgcctgattaaagcatacgataactgctttaccaaacaggattattccaacgctaaagatatgatctccgaagcggttgttgatccggctaaacgtctgatggatggtgttgattacaacatggttcctgatgaaaacgcgtttactctggttgatgctctcgaactgctggcagaaaccgacacagtgatcgacctgtcttctgaacattgggcgtacaatcgcacaggccgtcagactgtccagaaagatgatgatacactggataaactgtcagaacagattgcaaatgcttctactccggaagaacgaaaagcactggcggctcaactggtagcgcacgaagtatggaaaccggaatttacccaaactacaacgaaagttgcagtgaaacacctggtgggtaacagttcccgtccgaacatttctatcaatacggatctgcaaggttacgtaaccattccggaaagcaaacaaaaagagtttggattgccggaaaaagtagaaaccaaacaagtgcgtaactttaccattgttaaagatggtatcgtgaacgttaaggtacttccgctggaaaccgatatcccgactctgaaaaacttacgtgcttctggtctgactatcaagccgctggctaaaattggtgaagaccgtatgtctgtactggttgactttacctctctgcctctggttaaccgttcgatgactcgcggtatttctggtaaggaatttgttgctgataacgtccgtctggaaatcctgaaaggccgtcagaaggtaatgaagttcttccgtgataacgcgattggtttacgcaacgcagaagggcttaaacagcgctttggtgaggcggctggtgaatggttgtctgagcaagggatccgtgattacggcttttctccgaaggttgagcgcacagaatcgactgatgtttacatgtcgaaagaactgaacgtgaaaatcaaaggcgtttcatcacttccggctgttgctgctaccgttgcaaaacgcgccgaaggtaagaagaaacttaacaatggcgacctgatcattctgtgggcttatgatactgtatctaaagagatcgaagcgcttgacaagaatgacctgatcgagtatcttgataagcagacaaaggaaactattaaagaggttcgcgcccttaataatcgcctgagtcgtgtaatgtacggtattgtcgtcggacacgcatggtttgcggatctggattttgaagaaaccagcgtaagcgttaccgcaacagatatcgttgcagcggaattctggaaagatgtgaaatttgattgcacaatcgttctggaagaaaaagaagttaaactctaatgagatctcgcccccgaaagggggctttgaggtgacttgtggaattacttgaattggactttaaaaatcttatgaatatatgcgaactgaatcaaggtgacatcctttatttctccaatcgtgatgggtttcgtaattcccgtcctgaaaacatcggctttcattcacagctacctgatttcatcgtcgttgatgatgtccggttaacagataacggctggcaggttgatgtagtcggattcaaaaataacaacggtgctatcgtatggcgtcctggttctattgatgaatcggtgtattttaacaacattcgtgtaaacatcgatgaaatcggaaccgatttgagcgaagtgcgggaatctccgtatgtgttcagcaactggtttaaagttggtggcgcgtatcgttctgataacacaaccgttgtgtatgttgatagtttgatgtctggtatggttaacttcaacccgtcattacctggcaacaacggcacgatgatggacattttcagagattataatcgctctgggacaatgttaccttccgaaaaagcatatgttatcaatcgttgcttgaaaggactgtaccaggatatgcttacctataatgaaggtaacgtaaaagatgcgcttcacgatctgaataagatcctgaaagaagtttcaatgaaaatggatacccgcaaatgatttctttattcgcgttcgtttcagttgttgtattggttttcgctggaggtgttatctatcatgggtgcgaccgtcgtgaagataaggtcattctatggggtatcgtcttcgcgctaatccctctattcatgattggtaatatggtgatgcgatgaaaattcgttctgggtttgtgagcaatagctcaagcagtagctttattatcgggatcggacttgttcgccctggtaaagaaaaggaagttgctgatatctacggtgagaataatatcgagtcattaatagatatgatcaccgatgatactcgttcgaagtggggtattcctcaagtcgatagcgacggtacgatctcactggaagcattcggttcccatagcgttgagatttcgtatatctgggataagttgaaagaactggggatggacgatatcaaaattgttcacttcaatgaacgcggcgatgaaccagaatatgatcatgaatacggaagatacaattatagctggtatgaagacgccgacgcgttcgggcctgaactcgaaagaaagtataatttattacgtgataaccgcgaactgttcattgaaggcgatgtgaattgtggcggggattacgacggttaaccactggggtaatgcatgataacgatagtatactgggaagaagtcgaaagcgaaatgatcgatggggaactggcggaggttgacggggaatccgaaatgcttactgctactgaaacaatcgaaaatgctttcgaacgaatcaaagcgcatcaaaaagaaatggaaggtcgtgatattcagtacatgatgagtttctgggtcggcggcgaggcgttatgtcatgccgtaattgcggaaagcacctcagttgatacatgtcgtgaaaagatcgaacagtacgtgaaatctttcttgcattgatgaaaaagcccttgacttcggtcggggctttttgctatattggttctatcgaaaacaatgaggaatacgttatgaaatatttactacttgcactgagtcttctcgcaacccccgctctcgcgttcgaggaaccgcccccgatggacaaagcaacgtatgatgcgatgtcagacgatgagaagtgcgaacacctccctacgtatcagatgatgtctgattggctcaaagattccgaagtcgatgagaagtttaaaaccaaagttataacccaatacctttacagtcagaatcaggtgtgtttaatgactttacgaataaaagttcgtgagttagaatatgaactcaaaaccggaaagaaactgaaataaggaaacgatatgaactgcgtatacatcatcattgaaaaatttacttctcctgttggtaacgttgaacaaacaacagtctgtgctgctctgaatgaagaagaagcaaagcataaagtaaaatatctcaatgaaaatgcaattattcctttcggtttcaaaggttatactgtaaaatatgaatatactgcgatttcgcttgaaactagcccttcctggctacttgatatgaaatgaggttgaaatgagtccttatacaaaatgtggggtcatgtccctgttattaaaagaagttgtgcggttttatagtcccgttggtaaagtgtggtgtgtatctatcgggggtagacaaattggatggatccgccgtggagacacaatcaaaggctggcaccaatacactgcaatttctattatgggctgtgaatatggtgagtttgataacttcatgcaagcattgtcgcttttcatagataacgctattcgtgaaatcagttcacagggttccaaagttacaaagtacatggatactctttatgtgaacgtggaaaccgatcgctattgcatcatcaaagaagcgctatatgatgataatgatgaggtgtattattacatcgtatccgatcaaaaccagatgcaaagttatatctccccgtttgaattgcgatatcaagaactaatgggattcattgaattctaaaagaaagccccaaccgaaaggaaggggctttttgttatgaggcggaaagttggagtttgatttgttctacatcatccggatcgtcgataatactgtaatagatagtcacagtaaccgcgttatcgtcatatagaggtataacctcgacagaaagattatatactctcggttcatatgtccggatagcagacacaacggatgttctgatagattccgctgtaagagggttcatgttctcaaacagcatatcactaatagcacaaccaaagttactatcaaatggacgtgtacccttgatcgtggttacgataccaatcaaactatttcttactgctgcggccccttttgaagccgctacgtcattattccaatctcgttgcatgttaggttctatatcgctatatagcaacctcagatttacacccatttagaccacctttaaaaattgctgtaagcctctcagagagacgatatggctatgcccacacgaacaccttaccggaatgtttgcgaccactgctggcttatccagggcggtagaaatcgatttataggttgcatagtcgattgcatccaataccatttctttatctttgtcgctgcaatcactccacatgatctgttcgccgtctatcattacgtaatcgataagatcggggatctcttcatcaccagtcttacgagggtgaacagataacgcgatcccgtcattgccgtatagcttatcgtcgaaatcttcaaccattatttgattgcgtttaagctggaattctattctttcctgacattcttcacagttgatgaacagttgacgggtatcgatatttttactttccagaagtgccagaatgaaaagatattctctttgatacaggtaaacatcccctttgataaaatctgcattgggggtaaactctgtatgtgtcagaggacgataatcaacattatatttctcaacgtgtttatattcatgctttctcatttaacagcaccttgttttttcaagtcttctgcaagcaatgcagtataaatttgcctttccatcgggctactattcatgataggttctaggttcaggccgtttttatttagcagatagttggtcttcacaaattcatccagatccccacgactaaacaatatcttgaacagggttaacataccactaaatgatttaccgcgcatagacacatcaaccgatttcgttagcatagtaacgattttttcgacatcatcaagttcgacgatatcaagaatattctctttcgtttcttcggttagtgatgtccattcatagcgctgttcgttgtatattacataactgatacattcaagaaacaactcttcgcttgtattgcgtgtacgggggaagttaaaccctaatgtgatttcatcattcaacttgtattcattttctagttgaatatcattaatcaccatgaaggcttcggagtggcccccacctttaccgcctatcacaaccttgataacgtttttaccgaacgaaccacaatacacccggctgaaaatgtattcctgttctgttttggaatacccaggataaagcagatccagcacttcatccagtatttcctgttgctctttaaggggccgaccttccatatcaatacgggtcagcattaatttaaactggtctttaactgtaaacatagggaatcgtttgatccctgatggtaatgttactcgaataatatcaaacataagatcctcaaaaggggccgtagcccctttattgtcctgtaattgcggtacgtgctgcaatggctaaaccttcctctacggattgtttgaacccttcccagccttctttatcagcctcaacaacccatgatgttttataggcaaaatcaacagtaaatgtccagatttcgttgttgttctcatagctcaattcactgttactgattttgacgggcaagcacttctgaaatacgtatgttgtatgcggtgaaccatcacgatcgtgtaagttaacctgaatagtacttgtcacttcatcaatgaaggcgtattgtcctgttacatcatcgcgaatagcggaaatccattcgttaaagattttcaggttacgggcttctgaatcggtgcggaacgtcaatgacaattccccattctcagggcgagtgaatctgatttgaggtacgccaccattataaacgtattcgtacccaatggatttaccagggaggttaactcccataatgcttaaacccatattatacatcatttcatcacggaattcagatagcagttgtccatacatgctatcaccaaacagggaagtaatcaaacgggggctaattgccccgatgattttgctaaatcctgttttgttcagcgacataatcgccttatcgacggtgtaactaaacaatttactcacaccgccagtgatagcattaatgaattcgttcgggttgtttgcgttgatagaactaatagatccatcaatcaaagtatctcgaatactaccgatcgtgttgtcaaggatacgtgatgcagggctggttgcaaatacaacgctaaacaggttgctacgctgaaaatcgcgattagccatacctgataaaaattcatctacgttgtaaaacatcatatctccttagtaatttgtatcaaaaatagaatcctgacgcatatcgatcagttccataaattgaatttcgacctcaagtgagatcggggtatttggtgattctcttaatgtatttacaatattatcaatagaacgaccaaagcgaacactggtaatacctgctggcccaaaggttgaatgaggtaaacgcaaggaatccccagactggaaatcacgaataaaccagacaggaggcgatttaataacctctacgtttgaaatgaaatcaaccacgtcattacccagactattatcaaaatctgacgctgttactgggttactggaagggctaattgcgttagcggttttagcacccagaacaccgtaatactgtttaaccaatgcagcaacttctttagcagtaccgccagaagttgtaccgtatcccagaacagtaaacagatagtagattttaatcagttccagcaaatcattacggctttcaatcacgaatgtattgtaatacatctttgttcgcttgtcagaaccctggaaagcggctttagtaccaacatcaagggcttctcttcggtctgccataataccgcctgaaacggattctacagcgccccataccatgtttgaaacaacacggctcaaccctttggttaagaaactatcgtttgcatcttgatagcggtggctgtttacttcgttatcgttcaggcttcgcggtagcaggatctggcaaacaggttccatagtaccaatagaactattcaacacttgtttgtacttaacattacccgtcgcagatgatagtatttgttttgggttctgtgctgcctgacgtaatgaacgatagttgtctttactaccaacaccattaaaatcatatgcagtgaacagaaggccgttattatacagacttgaagcattataagcgttatcgatacctgctgcacgttgggccggaaattcggcggtaacgatagtttgctttaatactgattctgtgatagcggcacccccagaggggataccgcgatttttaatatttttgagagtgtttatactgtcatcaataatagaaaacttcattatatgttccttatgccagcgctacgagcggtttatgctctgtgcgttgtactgaatgagttacgttgttgttaacagttttgttgttaacctgaatgttgcttgctttatcagcatccggtttatttgctgctaacggtggctgtgcgtcgatcggggcgctggattctgtacgggctgcaatcttgttttgcaattgttcgataagatcagagattctatctttctgtacatcgtccagattgccttcattacgacgtttttcaagctgttccaacatattgttaatgtctttgatatcatcggcatcaatattttcagcattggcgtaattggttgctttacccaacaggtcatcgccttttttctcggatccttctggcggttgtttgccttccttacgcgcttgtttcaggcgatccgcttcgatttgtgcctgacgaacacgctctctgttgcgtttgttttcctcatcggctaacttctgtgcttcttctgcactgccttcaatcaatttcacctgactttttaattcgtcggtgtgttttttcatagtatccagacgttctttatcagcatcgacaatcttctgatttctttcctgataatcagtaggagcaactttgtagattgaaccgttagggatctgactaggggtaatagtcaatgcctgacgtgctgcaatggctttatcttctttttccaatgcttcctgttgctctgccagttcttgtttcttgatcatgataatgtcatctttggacaactcaagaccaaatttctgtttatcacgtaaagcggtgatctgcattccgcgtccagcattggtaatgctgtcgataccagttgattcccccaatgattgaataagacgaccgataccctcagtgatcgcagtttgtacagtttgccctaacagcttcataggctcaacgaacaaatcacgaagtgattcgcctaagttgttcatattgaagttgttcaaaccttcttcaatctttgttacgatcgcctttacgttacccagatatgtaccaaatagtttttttgaggattccccttctttcaggatatcttcaaaccatttgcgtattgtgacgcgcaacacatcgaatgtaaagattaacgaaccaataaggagcgtccatttagcaaattttgccattgcttccagagagtagccaatgaaacggctaaggatctgcgatgtaaaccctttaatagaaaccagacttttagcaatactatccagagttttgcttctcttgtcttcatcatcaatgatgcgttttttcttagtgtctacatacggatcaggttcttccactggttcaggaagcggtttatgtttatcagtattttcatacaaatcaacaagtttattgatagcatgaaaaattgattcagtgttttcttccagcttaccgaactgaccattttggttaacgtttactgtattgtcaacagtttttgagttatcatcggttaaggatataggacggatcgggccgacgaaatcaggtagctgttcggctaaagattcctttttatcctcttcgtattgttctttgaatcccgcgaatttgtcacggaatttttcttcaaacgatttcaacccttctttgatatcaagcgtattgattgcactttcaagggtgttatcgttgatttcctttaggtcacgggcgctttcagcatcaagggaggctgttactttggtgaccgctggttgtctggtgctgtttctgttcagaaactttttcttttgttcttcgttgaaataagagttagccattatcattcaccaatgatgttaagccctttgatggttttcccctcatgaataatgtatacttcctggaggacaccacgcgatacctgatcatattcgaatcggtacaggcaattaattaattcgtctcgtttatcctcagttaattctactggcttaccgtcaacatatgcctctttgatgaggaaaggaaggtgagcatttaacaggctgggtttgtcaaagactaaccgcacattgttaaacgtaaaatcatagcaaggttcggagattttgaggtcatcaagatttagcccaatttctttaagcgtattggcataatcagcgttattgtgtgcatacatatggatcaacacaaattcaatttccgctgctgtcagttcacgcggtttgatgtcatcaatgatgaagcgcatgatcgcaactgggtcatctttcagagtcttaatctttacaaaatgacgatacgacatcttagggatctcaatggctgttccatccggaagatgaacggttttaacgtttgtcttcttgatttcaagccgtgtagtcataaatttatcaagagttttatttttcattattgcctcaaattgaacctgggtcattatttactatttagtaaataggatatattaggagggatttttatggctgaaaaaatcgtcaatcgagtcacgtcgattaaattatatacatcatacgaaaaatatattgacaatacatacactgaattgttacccgctcttgtctcgtttagtgaaaagacgatgattaatggatcttctgaaacactgatgcagatatacgatgcacagttaatctatcagcaacttatccagccgatcatacaggtatctttccagtataacggtacacaggaacaacactattacggattgctttactctaacgtagatactgacgataaaaaccgttctgtgctgcgtatgaacctctctccgctgcataaaacgttcagacgtaagtttgcccgttcatttagcaataacgccgtacagacgattacagagtgtatgacggcactgtatagcaaaatgaaactgcttacccccgaagttgacggcggtaacatacgtatccctcctggatgtctaaatggtacatatcaggatatatttgattatatcagggacaacgggcaaagtgtagtttcttctgacttctgttatctgtgggaagatggttccggtattttccttaaaagttcaactgacattctggcccagacaccgatcccggcatacaaatttaacgttgataacgtgtttgttggtgatactgtcatattcacagaagcccagtatattacccataaggataacacaacgctgtttaaagacgctagtttctttagtctgtcattgactgataaaaagatgtacggtgatatactggctgatacagacacagagaatacatggatcttcacaaaccgtaatgcaatctatgataccaactttcagaacccagattcagaaggtaaacctttccaggcttctaaaatgcaattgctatccagctatgaacgccggatccgattcgatataaagcagggtcgtttagatgttaaggtaggaacaatcattgaggtatttggggaagaatatgcaggaaaatatctgatcgttgaatgtgttcgagacgtatcaaaagatttccacctgcaaacacttgaatgtatacaggtgggggaacctaccagcgccgctactacgaacacaactagcagtacttaatcctcaaacaatccgaggtggagatcgaaaacattgttattggcctttctacgggcctttacgatgttttcgtaatgttcgcgcggtaactcaaccaaaaaacactgtctgtcttctggagcattatcaacttgtgcttccagaagcggatagttagcgggatcatcatagtcaatactgctatcgagatccaggatcacacaacgccagatttccggatccgctgatgttttcacggtttgaactagtgacgcatttttcaaccccaaacgatgcgaaagcatttcatgagcgaattcagggtcatcataacggatctcttcaccattccagcgaataagacgaacggttgcactcagtttaaatttgctcatttcattttccttgtcatcaattcacgtaattttttagttggcgctggcgggtttttaatgatttcctgaatctgatcccatgtttcgggggatacttgttccttttccatcacaacgatatttggattatcgcaacacttaccaacaagaacagaacgcccacaattaaggcaaattgtatccggacatttaccgagtttatcgaaatcaatcgattcaaggaatcgccgcgcggttgataatcgttctttcacttcttcttcttcaaatttcattttctcacctatgcaatttcgtaacacttcatgacttcttcgaataccaacggcatttctagatcccatgaatcggcaactgggtcatatgttgcttgatctaccagggaaaccggaattgcagaaacccaaccagaaccaccctgaacatcaacgcgcttaaccgtcatcaacgataaattgttatagaattcttcactgaatttttcgccaccattaccaagactctctaacatttcacggttaacgagtttgatgtttttaccttctaaatctttgttgatatcgatgaagttcatgtgatgttccttttgtctgtttcgtttcgatgagcacactataccaaacaagaacaagatagttttagcaaaaagtgctattaatggagaatttcagcagtcatcacgatccacatagaaagaggaaacccgtgaatgaataacaacaacccaaaatcatcccgtttattgtaaatcaaaacagttatgaatatcgaagccacccaaaaagcagtaaacagaagataatcactgagtgtgatcatttcttcacctcaaacaaaataccatcttttgttgccagatcgatttcggtttccaacactgccgaaagtatccactcatctgaaccaggtaaacgcctttctacttgcccgttatccagcttccgccactgtgcgccattaacgcgagattcataagaaacgttaactttcataatcagcccatccatttacggtatttgattgattggttcattgcagagataataccagattcttgcatgttagaagcgcaatagacttccgcaacctggatttcgcggtcatagaggtaaacactaccacgaaaagttttcaagtgagcaaatccacaatctttaaccaggttaaggaattctgctttcttcatcatgtgagccattttgtttatctccgtgtttcgtttcgatatggctaatataacaaagcccccgaccggagtcaagggctttttattaaaatagatctgcaaagacaacatgaatatcgtcgggttcagtcttatcgcgtcttatcttcttgataataggaaggaagaaactgtattccggttcccctttcttacgcgttttcgacttctggaggccgtcaacttccatttctacaatggccccaatgtattcatctttatgcgccatgatgtattcgcgatccagttcaccacgttcatctaatggaatgtatacacgggtaatgccatcatcatcgtaacgataatctgtatcagttaacccagatccggtattcgttcgagccattccggataaatcttccacaacaaacccgccgaccttatggtcttctttagtgtgcgcgtagatatcaatgatccgtaattcaatcggggttttgtttttcagcttaacctgatcggctactcgcgaatctttccatttgaagtttctgtttttgagaatagaaccttctttaccgtcattgcggtaattgttatagtcctgtttcgcttctgcaatgttattcaccagcttagactgaatcaaacgaacagaaggcagagaaagatccaggaggatatcgcgcaacaggctaaaccgttcatcataagtctgaacactttcagcttcgccgtaatacacctcatatggaataatatcccaaacaacataaacaatgtttcgctgttcttcttcggtgatcgtccctttcagagatttgtttacgatcccgttcccttcttcgcgttttgcttcggcctgttcttcttctggggtcgatactttgcgaacttcttccgcaaataacgcaatgtcgttatcatcatcgtccatgaaagcagataaagaaaaaggcatgtctgtttcaggttcaggtaatgttggtacggttccggaaggaacataaatcaattctccatccagaactacatcatatcccagataatcgcgcatctttttcagatcgatatcaagttgggttaacccttcgtactcgttacccgccctcgataccttacggtttaatgcttccaacaaatcagccatacaacgcgcaccatcggctttaagctgcgagtaagcagggaaaatgatgcgacgtaaagccttttcactaaacggcgtagcgaggcattgaggctgttcaggtataagttttttccatacccgatttggtaaggttgtgccagcaccacattccagatcgcggttaatgatacggcgtagcacttcacgatcgttaatgttcactgatgatacaatatccagtaaacgatcacgcgctgcattgcctgtatatttccggcttgctaaatcttccagcaatgctttgattgcatcggaaagcggtgttgtgcctggtttcccttctaccagagggaactggcgcacataaaacataatctgttttgtatacgtaatgcggaaaacttctttcaacaattcattatctgcgttacgttttaaaattgcttctttctctttagttttcagagtggaagcaagttcattaaggattgacaagatcatttaatttctcttcaatttcaaaccacgattttactaactgatgaggtgcatttgtttcttcacgttcaccacgtaacatatggaataacggcaactggctaatgacgttatgacattcgtttaagtttatcgcgagatcatcgacaaagcaaaccagacgattaccatactttgctttagcttccaggtaacgatgagtttttgtttcaccgtggcccacgaccatcacctctttaaacgcagacggaaaaagagtattcaggttagcaattcggttaaggcttgccgttggtgttgttcccagagcggtaacggcaacgaaatcatactgcgttttcagacggttgatcacaatcaatgcatcatcatacgcattcagataacgaatgaaagaactgttattgtattcttccataaggattttagccaactgctgatcacatccgaagatttcggtcatatcacgaaatttttcatctgtaaccatttctaatgcaatatcagtaggcatgttgtgcttagacaaaaagaacgggaggccgctttgccattttacggcgatcccgtcaatatcggtaagaataacaggtttcaagatataacctcataacgatcaaagaaaagggtacttttgaatgcgttcaattcacccaggaaataatcacgctcgaatttacgatagtattcaaattcaatacacagcatatcatcatttgttacaccaatgccaacaacatcttgatgatatttctttgcctgttgaagcacgaacggatcgagatccgaacaatcgaaataaactacgtaactcatattaacccttatacatataaacagcatctaccccagcatcaaaatcgactttatcaaagacaacgccgtttgatgcacattccttaacgtaggattcaataacaaccatgttatttgcgccgatggtaacataatacacacctgctttatagatgacactttgaatcaacgttgaacgtaatgcatgttgcgcatacagtaacgctaatggattgatcgcgcctttgaaaaggaacacacattctactctttctttttcactcataatagatctctcaatcgggttaagttgcgtacaaactctctttcagtcagtacagtttcatttattttattctttcccattgaatgtgtcaaggtactttttccggttgctgccagcgcacggcgaaacccttcattaaggaataacgcattatatgcgttttcaatcaggatttgatacgcctcagaggaacgatgaatagggatacctttccagtatagggtctggttagtccaccattttttctttttgcctttgaactttgcggccttgcctaccagagtacacacatgggcttgcatatcgggattactgaatttaaggctttgcaaaaagccctccattgatgcacattctaccccatcaaacgtaaatggatgaggggcaaagttgcttaacgcgcatgatgggtactggctacccgaaccaatgtccatagttaacccctattgaaaagattaaatcatacaaaccgcgcccgatgataacaccaacgataattgatatccatgttttccagttatccacgatcttcaccctctttcttcccttcctggcgagcgcgtttacgtcccgctcgtactaacgaatcatagtacggacgtttgcgatcgatgttttctgtgcgatacgctttaccaaaatgactcgttttgaatccgtagtatttcatagcaatgataccttatcccagtgagaatatccagttcttaccgcgtcaatatgagccatgtaactgtcgatatcttccgccctaccttccagaacaacttcgagttttctgccagcctttgtgcttacacaacgtaacaacacaccatacttcgccagactatacaccatatcacggctaaaataagcgtcattaagaatcagaacatgttctctcattctttcaccttatggagtccacgcgccggatcataacggtcgtatgttgtcccgttggttgatgccacgatagaaacatcctggcgacggttccagttcaatagagccagaacgatacgatctgccgcttcaataaaatattgtttcattatgctctctccaggcgcgttgttacttcacggctataaagccgcgcatacttacgaatgtcttcgttatcgctgttgttcttcgcgatatatgcatcctcttcggtatcgaatgatgcagggtaacgatcatcgtttgacaggtacagattaccgaagatgtctttctttacggtctgaactccgacaaacatcacaaaatctttttcagtgttgattgaactcattatgcaccaccagggccaaagttatattcttctggacgttctacatatacttcacgaacgacacgcttttctgctttcaggtcttcgatctcccgatcacgacggcgtagctcggcaatcagttcgacaatgaggtgtttcgcatagcgatcttcgctgttactcatgaaccccattactttttgttctaattcttttgtactcattattaaaccctcgcaccaaagctacgttttttgatgactgtaacattatgaacaccacccgtcccataagtgctggttttcagagtttcagcgtgacgcgcaccaagtaccagagttttaaccggagtaacaggagcagcgataacgataacagcggcccaacgagcaccaacagctttatcagtacccatatcgatagcagcagaagtatttttaccagccgccagaacgtaagcacgggcttcacgacgagttttgaagaaaaccagttcattcatgttgtaagagcgtttcataatgtcatcctcataaaagtgttttcttgtctacgggattaactataaggtaatgtgagaagagagtcaacaactttttatgtaaaaacgaaaaaagccgctacctttcggcaacggcttgatttttaatatttttcgtcaggctggaacaccgcacgacacgcccacatagaggcttctttcagtcggtctttcgccagttgaatttgatggatacgttcaagcacctcatctaattcttcctctatcagcgaatcaatatctgaatttgatagtcgctgttcgatatcttccaggattgcacctaatgcattttcagcatctttgatacggtttactgtttctacttttttatcagtatggggtttataacccgtgatatcagaaattgccattatagactctctgtaaaagtacgggcaataacgtcgcgttgctgttcaggagtcagtgagttaaaacgcactgcataaccagatacacggatcgtcaactgcggatatttttcaggatgttcaaccgcatccaggagagtttcgcggcgcaacacgttaacgtttagatgttgtccaccttccactttaacagttggctgatattcgatctcgatctctcgctttgcaaacggagtaacgcgagctttaccgatcacagaatccatagttaatgtttttgatactacgatccgaacgtcgttaccttcttccagatagattgtaccagtatgcaaaccttctaaaatttgaaatgctttcattgtattacctttacttgattacataatacctgaatggattgaaatgaaacgccagcattgcacgatccaggttaacagggtcgctaacttcttgtttcagcttccatccagcataaacacgcaaacagaattgcaccttgtggatccgtagccacggtttatagacatacaacccccatgctgattcattccacatgagcagatatccatgatttacggggtttggcccaccttctgtttttgggttgcctttccagttgaatttgcttgtcgcttcacgtcctaaaacgtgatatgcgaagttataagccttgtttctccacaaccagccaacacgctgcatgtataccccaaaagcccccagatgatagcgtatagacgcccaacggcggatatgtccaccatcaccatcaatagggttatcgaaggtttccatccaccggaagcctttaggaagatgccctgttttctcgttgtagaacggcacaacaaacggggcaaacagaattgctaatactccagtaataatgtcaagagggacgagtacgatccaacttgcatactttaaaaagcgcatagacaccccaaaaataaggctatccgaagatagccatttgattatttgtttgtgctgatgtatacaaatgattcatcaaattcactgctaaccgcttcatttgtaaacggaatttcaggatttttgaaaccaccactgataagatactggataaagaataccgaagtatcaagagaaatcaattggtgattgctcggagatatatctgttctacgaacgagattgacaatctcccaatcaaagaatcgttcgctatactctttcttactattcacttgcggtgatgcaaagaacccttgtttggaatatgcctcaaacgctttatgaagttcagaatcaaaatcatcgaactcttttacaaaaagttccatcaactttttattgcgattcgttggattgctattttctccgatgatttttctaattgccggagacatttcaaacagtttttgtaaatttttcatgatatctctttaaatttcgtatgcggaatcaatacaagattcgtaaagctgttctggtgaattctcaatgagaggtgttgttttaccgaaaatctcctgatcgtaaggatcatcatctacataacattcactgaatttgaagttttttcgataatccccatcggataatccagctttccattcattaaatgtcataccatagcgttctttgaattttgcaggagacatatcaacaaaaatctgcgtatattcgaccgcgttatggtatttcacagtttcacgaaatttcatataaccctcattaaattggtggcaagggtaggatttgcacctacaaccaacagaatcaaattctgttcctcccgcttctctaagtgccttgccttgtttggtggcccctcccgtgacttgaaccgggaacctaaccattatgagtgattagctctacctattgagctaaggggccgatatttttagaactgtttgcggtagatttcgcgaacagccggatcaacagctttggcgtatttgcatacatcctcgaactgtacgatgtattccattacttccgaagcacgggaattcagttttccctgatgagcatcaatgatcattgaagtcattacatcgatgcgggtcggtgcttcgaggatgtcgcctttgtcgaaaagttttttagattttgcgacggtatcggcgatgattgcttgaatttgtttagccatgttggatctcttattcgtaaattgcttgaatcgctttatagtgtgcggttacatatttaaccggatacttgcgagcttcttcttttgttgcctttcctgcaatcagttcaggatcaggcacgtttgccatttgtgcatgaggaagcggtacgcgcttacccataagcagggttttatattcttccggtacatccggcccacatgataacactgtgccgtagatcggttcctcgccgtgttgacgaacaccagtcacaataccagaaggtgatacaatttcagttccagccgctttagcgttggtttcaatcagaacatattcaaaggatgcttttacactcagttcagacatacatttactcattggttatttgatccggaaatgtttattcaattcttcgggatcaagttgtactacttcggcaccgtattgctgtagacgccatatccactcgatgccaccacgatcgtatttatgtagatatactacacgcttaatcatacctgttgcaacacaaaattcgatatttttcgcacattgtgagcaaggggaatgagttgtatacaaagttgcgtctttgatttgttcatgagacgccgccagcataataacgcgcatttctgcgtgtacttcgttgagatctgaccattgtgaatgttcagggcgcttttcttcactcagtttcccgttatcatctaataagtgattgcactgatctgtacaacgatgactaggatcaacggtattatttgcgcctacaaacacacgcccgttaccatttctcaacgcagcaccgacattaacagagacgcattgagagaacttagaagcgcttaccgctctaagcataaacataatatcatcaatcttcatgatataccacgtgataaagaactttccagtaaacttgaatctttccatcatctaacactcgatgatgtgcagaaacagaactaattactactttttccggactcggacgaaaacaacttgtgaattttcgaacaagacaagcaatgaaagtatttgggttgtcgatttcgtcaacgatagtattaacagttacttcaccgaaatgacaagggatattatatacttttaatgcttccaggagcaccatactcatagagccaggatgatcaagcatctttcatcacctttagtagttgtttgataaaatcaggagtcgcttcaacgatatactctgaaccgttgattgtagtaacgcgaacttctgtctgatttttgttgatatcatattctgcgatcggacttgttactacatcaatatcagttcccttgatgtatccgaaaacgccgccataataacgaggatccggatatacagattcgtccgtgatcaccgctctatcaattacttttactttcataatacagccgaccatgtaacgtagccagtaattggatttaacaccagcccgaaagattgggtgctgttagtatccaagtcatgaatataaacaatgtaggagtactgagaaaccggagtggcgctaacttcaaacccgcctggtgcttttccctgttcctgaattttgttagcaattttttggcacaacaaacgaactttttggttaaaatcgcccagattttctacgcgaatgcgatcaccaagttcaaccatgatgcctttatcttcacgaataacgttcataatgtaatcctcttttgtgtgggtactttaacatacccacattagatgtcaatcagaaatcaccataatcgacttgtaagcacggaatcccgtttgctcgccacattccgaccggagtgtctctatcgtccactgcaataacaggataatacttatctaaaatcttgtcaaacaaaatttcttcttttacttcaaaatctgtcctggtatcgccttcttgacgcataaaaatttcatccggttcaacaccataacttaacaggctaacccatgtatcatgtgcgcattgcggattaccttcacgcccagatacaacaacgcatttataccctgcatttttgtacaggtgaaacagttgttgtatcgggatgtttggcggatcattgatcactttggtaaagtcatacgggctacgttgccctacttttgttagcgtaccgtcaacatcaaagatcacacacttctgattgtgtggattaacaatttccattgctggtacgaacccacggatcttacgatactggttaaacatttcccaaacacgcgaaacgggtaatgcatcacgaccgcgtttgtggttacggcgaagcaattcaacaatggacacatcaaaatattcaatatgaaaatctgccttgtgttccaatgcaatttcacgccagtgatttttatcactttctttcagatgcgtgttgtgtatgatcacgtttttaccatctttcagagtagagataacaacgtgatcttgcatttctgcaatcatttcttctttcgctttggtgtatttgtatccgccagcacctttaccagcattatacaaagagctacgcagatcatcgcgagagatcgtaacagtattacccaattcacgggctttctcatgcgcccaggtagtttttccactacccggaacgccaatagtcataaacagattcatttcactatctcatattcaattagttctttgttatgctcattcgtaagattgagccacatatcacggttccagtcattttctatccatagaccttctttatcctttttcgcagtatacacttttccttctgttatgtcacgaaaaaaggttttggttattttgatttgcatttctcagggtatcctaacgtacacagaacattatcggtttgatccttttgtcttttaacgtcattcatccagctacgtaaaatcaatgaatctggatatgtcaatgcaacataaggattaccatcatatggcattacaaggtattgtttcccgtcgatttctctaacgtctgcaattactttccattttaccttcactgggttaacctttgcgggtagcgtaggaagtaccttaacaggtggctgttccgcacaaccaacgagaaaaacaccaagtaatactatcattgctaatttcatttttcaaattcctgcatgtattcgtcgaaggatttgttgattttgatttcaatcaatccaggtttctcaaacaaaaggtgtttgcgccctgcatccttaactaactgctgatctttggatttttgttccacgtagataacagtattgcttgtatttgtctcttttactttcttcacatcatcttgcaaagatttgatatccttgcgtaacgatgcgttttcaattttggtatcgactgcaatgtaaaaaagggctatcaaagatagccccacgattacaggccatacccaagatgatatcttaggcattatgaacctcatttatattgttcaggaatgaactgatcgtaatttttaaccatcatttcaatgatgcgatcgaccagtttttgtggatcggtttcttcgaagtacttcataagaggcccgaagatgatccgaccgtcgtttgacaaatccgcgcttagactgatagcaaaatctttacgcgatttccctttattatcttcaatggctttgaacgcttttgcactcaaacgattgagactatcaaggaaaagtttttcgaaatcgtcaatctttttcagagagaccagatccgaactgaatagctgtttcaggtcatcgaccgtattctcaacaatatttaggaaaagatccttattgttggtaatgctatcttttgtgcgatgcagattgacataccagtttgttttgatttttacaaaccctttcgttgtcagaacaacatagccttcgaatccttcattctgatatgcttcttttgcgaatgcatccagatccagtacttcgatattctcacgcttaaccagatacgcacgtaacagcgcgtcagcaaacagatcatcataagggatgtattcacccgtgatgttgtgacgaacgttcagaatacgcagatcaggagaatcataaccaacgacaatacggtttttcggggaaacgtattccatgttcaccgtatagttttctttagcgatctcagttaagcgggtcagcaattcacgatttgccattaacacgctgtgcgcatccatagcttgttctgatttaaccgaacctttagacttgaccgccagaaatccaccgtcaaggaaagttgagatcaaggaaccatcttctttaatcatcacgtctaaaacttcgcctaattcaataggagactcgttaagcgcttcccatgcctttacctcggcatagttaaaaaacttctccatagggcggctgatgattgatacgggggtatctccattcatttcaaacatgataccgcgacattccagagcaccaggctttagccagtctgtatatgaggccatgcgatagttaaagattcgaacaggtgtacccatcacggttacttgatcaacgaagaaaaatgtttcagattcaccgcacaactgcatgagttgtttgtaaagggtattgataattttagtttgtgcctttgtcatagtgctgtttattccattcagggttgtattttcgtatcatgttgatttcataatcatgatatgtattttcatcgtgagtagtcacgataagtttcacagtttttcgttttttgatagccatttccaatcgacacgtttttaagatgttgctggggttggcttctctccaatactttgcattgcgatacgtgtctaaacgcttccacatatcccgacatttaccaacatatactatttcatcgttaattgcaataaaataaacacaatgcctaagttcaccacacttaacaaaacttcgatcgatgcgaccacatttatcaagggttaagttgaattcagatttcatacattatatatccaaaaagtcaagtgatcttttcttaccacacaaaacattaaccacatgcgcgatgtaatcaccgtgacagggaagaggcgcacaggtacaaccaagcctcttaccatcaagttctttcaattcttcaatcgtgatcgccccagtacgaacctgattctggaaccaggggataaacgctaaaatgttttctcccctggttcctgtgtgataagggttgccgaacttcgtacctctttgaatatcgacatcccaatcagttttgtacttgtttactacccgacaatcacgcgtatttgctggcccattttgcatacgcttcatcgctgatttcagtattcaggtttccgacgaggtaagaacttacttcaacctcttgcggggcaacctgtacgttatcacttttgagccatttattcatccacggatacgggttagggatcggggtgaatggtgaatcaagcccgaccgctcgcatacgctgatctgtcaggtgttcaatataagcgatagtgcttttcagcgatacaccttctacatcaccaacagagaataaatgttcagcccattctttttcctgttcatatacttccaggaagatagccgttgcttcttttttcagcctacgggagatttcaaccatttctggatcatctttacccatttgccacaaacggattttactctgagtacctttctgatgcaatgcttcatcacgcgcaatcaggcgcataattttcgcgttgccttccatcttgccttgttcagcaaagttaaaggtgaaactaaacgacacatagaagcggatcgcttcgagagcgttcacagcgtgcatacacaggtacagcgcttctttgcacttagtggcctgtttagtgtattgctcgttataatacacgacagccggatcatttggtttatagccgctaacctgttcctgtagcatcatgatggttttcagcttatgacattcatcaatcagagtatcataataccgtgtcatcgatgcggaacgtttcataatcgcttcattacgaaggatctggtcgaactgtacagaaggatcaatgtgcaagttacgttgaatatgcgtgtaactacggctgtgaatggtttcactaaacgcccacgtttcgatccatgtttccatactcacatcggatgcaattggcaaaaatgcgaggttaggcccacgtccctgaatggtatctaacagggtttgatactgtaggttagaatcgaaaatgattttttcatgttcaggaagttttgcgtactgcatacggtcagtagacaggtcgacttcttccggacgccagaagaaagaaagttgtttttgtgtcaggctttcgaaaactttgtgtttctgcgattcataacgtgcaacaccagtatcttcaccaaaaaacataggttggtctaagtggttatgatctgggtttgtattcattactgttaacatgtctttacctttaaaaagcccccgaaggggcattaatcaaatcttgcaacccgcgcaatcgtcggcggcttcatcttcatcaccagcaccatcacgcgtattatgatagtacaaggttttaacaccgtagtagttagcatacagcagatcatcaatgatgtcttctgttttaactttcccgtcttcatagtttgccgggtcatagttggtgtttgcagaaatagactgatctacaaacttctgcataactgctacgtgagacagataccctttgttaccgcgtttagccatatcccagagcagatcatagaaatcaatctggttattttggtttggcacaacctggttatagtgtccttctttcgaagatttgatactcactaaaccgcgcggaggttcgatcccgttggtagagttactaacctgtgaactactttcacaaggcattaaagcagaaagagtagagttgcgcaagccgtattttttaatctggctgcgtaaccattcccaatcgcaattataaacaggtgctaccagttcatcaacagttttgcaataccaatcgataggcagtaatccgcgagcgtatttggtatcgttgtacaatccacacgcaccacgttctttcgccagttccatagaagcaacgagaaggttaaactgaaacgcttccattaactcatgaactttgtctgtatacgcttctgagtagtcgcaatagttgcttgctaaccatgatgcatagttggtgataccaacacccagagaacgacgctgtttagctttcagagcggcttttacagggtagttctggtaatccaacaggttatcaagcgcacgtactgcaatacgcgtgagtttcgggaattcgctgatatcagcgttatccagaacgatagccattagcgtacacaatccgatttcaccagccattttatcatcgtcatccagcggcgacgttgggatcgcaatctcacaacacaggttagacatacggacaggaaccgtaaaactaccctgttggttgacgtgatgagtgttgaaaatgtatttgcgtcctgtctgtgcgcgttcctgtgctaaaagttggaacaggtcaaccgctttgatgcgtttcttacgaacagttggatctttttccaggctttcatacagttcttcaaatgcagtctgatcagcttcatagaacagatcatacagacgatcgttagcaacatccggactaaacagcgtaatgtaatcacgattcattaagcgtttatacatcaactggttaagctgtacaccataatcaagatgacgaacgcggttttcttctacgcctttgttgttcttcaacaccagaaggttttcaacttccagatgccagaaaggataatacagtgttgcagcaccaccacgaacgccaccctgtgaacaggatttaacagcggtttgaatatgtttccagaaaggaatcacaccagtatgaacagcttcaccaccacggattttagaacccattgcgcgaatatgtcccgcgttaaccccaataccagcacgttgtgaaatatacttcacgatcgcagaggttacagcgttaagagaaccaagagaatcacccgattcaattactacacaactagagaactggcgcgtaggagtacgtacacccgccataattggagtcggtagagacagtttgcgatcggaaattgcgttataaaaatcaacgatatgcgtaacctgtgctaacccagtttcttcctgatgcagacacatcgcaataagcataaacgcatactgaggggtttcaaagatttcgccagtatcgcgatcctgaaccagatatttcccgattaactgttgggaaccagcatacgaaaattcaaaatccttatcatgatcaattgcacgttcgaaaacttgaatatcttgcttgctgtatttttccaggatctctttatcgtatttccccgcttcaaccattttaacgatgtgatcgtagaacgggataggatcgaactgaccgtaaacgtctttacgcaatgcaaacatttcaagattcgatgctacgtattgccaatccggttctttaacagaaatatgatctgctgcatacttgatagcgatacgttgaatttgtttggtagtcataccatcgcggatcagttctaatacattttcaaggaatgcacgaacatcgatattatgaccatcacaggcccacttgagcactttgtatattttttctttgtcaaacggctggcgtacaccagaggattttactactactttaatgtcattcattctcttaccttgttaagaaaggggccgaagccccatttttcatactgccatttcagcttttagagagccgtgattatgatacccttctaaggttatcgagtcaaagaattcttgatctaaatcaagtaagctatttaccttcggcatttttagaatcggtaatggcattggtgaacggttaggctgtaaaagttcttttgcctgttcaaccgcatttttatagatatggacatcaccaccagtccaaaccagatcgcccacttcgtacccgcaaatatcagcgataatatgcgtcaggagagcataggaggcgatattgaacggcaaccctaagaagacatcaactgaacgctgataccactgtagagacagtttaccgttgattacaacgaactgaaagaaacagtgacacggacgcaatgccatatcatcaagatcaacggggttccatgccgaaacgatgatcccacgatcgtctggggttgatttcagttgttcaatgacttttgctatctggtcaacaccactaccgccataataactatcatcatccccataaagagaaccaaacgaacgccattgatgaccgtagattggccccagataaccagaatcatatcctaaatcaatagcttgtttttcatagttatcatcccagattgtgcgcttatcgctattttcaccccaggtcatccggcgaagttcttcaacgttggttgaaccggacaggaaccattgcaattcatgcttgcacggtttgaagaatagttttttacaggtagttgcggggaaacctctgtttagatcccatcgggcttgtgcgccgaaaatacgaatagtacctacaccagtgcgatcagttgattcaacaccgttatcaagtacaagtttaataatatccagatattgtttcattttatacctttttatatcgatcgactatgattttttcaatgcgttcatgttctttgatgtactgagtttcgaaatcagaaaattcatattttaacaatgcatcacccaattcagaagcagtaaacgaaacatcgcgtttaaatgcgggggcattatatacatgatgtccgtaaatgtgtgtcaaaactacttcatcaaccattttattattgattgaatctaaaagcaaccccttaccaccaatgacacacacatttttatctgggtgtgttgcttgcattgtaccaatagcagcagacaacccgccaccgtggatcacgtaatcagcaacctcgccttttttggttttcaaaaaactaccggaaccagacagaacgcaatgaattctaccaggcaatttacccggaagagaggtaaacgtatttgcacccataatcagaacgctatcggcggtttcttctttgaagttctgtaaatcttctttacagtggccccacggcaagccttgctgatatccaaaagcgaaatcatcgtggtagatatcgtgccccaatgcaaacaccgcttttactatgctcatattgcgatccacattttattgtcttcaacagttacaatatagcccaatgcttcaatcataactttcagtttttctttgtacttctcatcatacccgcgaatcttctcgaattcaacagagaaaatactacacccctgatattttgcattgatcacgcgagattcaatatcaaaaatcatgatatccagaggacaccaatcaacagagtgaagtttttcgcgggttagtagtgttgtgttcttagggagtttcattccgtttcctgttcattcagccatgattcgatacgagatagttcttcatctcgcggggtaaatccatatgatgcgtcgatcatcccaatctgatcccaaacatcaatttccaggatctcagtcactggaggattttgtgagatatggtcacgacatacagcaagagcggtattgatggattcggtgacagtcagagtgtcaccctgtacagatacttgaataatcattcagaactccatgcatttttcaaagtaaatctttgttgggaattaataatcgtagcgcgaataacagcaagtttcatttcttcaaatttatttcgcgtcatatacaaaccaattaaaggaaaatagagcctttcccattcgtaagtgtcgcttacttctttaatagcgttgattaaaatctcagccatttgaaaatctgtaggtggaacccaaccaagattaatataaattcgtttttgtgtaccttctttcggattttccaaacgtaaccatgttggacaactcataatattttcctcaaataaaaagggaactgcgttaacagttcccattatagttcatttgattagtaagtcaagcgccacaattgaattgctgcatcaacttccttcttgatatcttccggagtgtctttgcgctgtgctttgactaacatagtcatcattttacgaatagtgttgttcatattcgctttctcacgtgctgcatgaacagcctgtgatttttccacttctggtgtatctttcttagccgcctgtggtttggtaggctgtgcgccgatttcgtctttctgtttcggtgctttttgctctgcttccttcttcacatgaggtgcggagaatttacccgccttgaagttagaattcatttgatctaaagcgctcttaacagtgttccagtcagagatcccacgtaaagatttcagagtatcagtgagtaggctaatgcttgcgcctttggtatcttctgcgatatcgattcctttcaaccactcaatgtgtttctgaccagagtacatgaaatcaaagctactgaatgagtagtatgctttacggtttacaacaatacgcttgaagttgatagtaacaccagcgccgttatcaaattcaacataaccgctggtaggcattacacgagcaccaatatcttttagtgctgcgaagtattcctctttaccgatacgattaacagtgcgttttggcttctcttctggcttcggtgcggcttcctgagcagccacacgtttaacaaaagatgctgaacgatgccccgccgcaaactctgcgttcatcttatcgatcgcgttcacaacgccttgaacactcggtttcagtttctgcaactctttgaacgtatcaacgatcatatccaggcaagcgccgtcctcgtcttcgaacatggttccgcgaagttgtgcagccggacgatacttcgatacagcaggatcatacaccgcgctaaacacataagcacctttgcgcatgaatacgtgacgatagaaacgaactttcagtgtaccaacttcaacaaagatatcgtttccgctaatgtcagcgcctaacagcttacggaatgatgcaaggtaatcagcacgtttgtatttgatatttttctgtacagggctgaaaatgctttccagttttttagacgggaacaggctttccggagtgatcttatctgggtttttgccccattgataatcacggcttgccattttatgttttttagttccaaccagtacaaaggtactaacagaaacgttacccagtgcagatgaatccggagcggctaacccttgtccattcggaggggtgcagttgaaaccgaaatcaaagtaagcatcaccagaagtgaaacggaacgaagcataaacaccgtgactaccttttgttacttcctgtttgaaagtggtaggcaatccagtgtatttggtgaagtattccgcaaattcctgtgcgttaaatttggtgctgaaatagtttttcgccactacaaagtaagcatcaactttttcttcccattctttcttttgacgtgcataacgtgcgcgaacatcaccagcagtctcagaacgtgcgccactaggcccagtttttgtaactacgtcgtaagcctggttaattttctgcattaattcattgctaccaccacggtcggggtgattgcgtaaggatgcacgtttgaagagtctggacatttcagcgctggtttcgctaccagttgcgcccaaaactttcagtgcttcctgataagtcattttggattcagtgatcatttattgttcctcaaataaaaacaaagcccacgtttcgttacatgggctactttactgtatttatggatttcggtcaatagattttttcgaggaaccaaacagaacttttgttgttcttgattcgcgtcaactctatagggttatctttgaatgcttcctcaacatctttcatagtaactatatgtttttcttcaagaaaattgttgtggagataaaaccgatctatttccagagcggtttctaattcaaaagatttttctaataacataatttcatcctcttaaataggggtatctaacggcccatcaaacaagagatatgtttatgaactataacaaaatttataactctatcatagaacatgctaaacaaacgcagtatgatggatatacagaatcacaccatatcatacctaagtgcataggtggaacagattctgatgataatttggttaatcttacagcacgtcaacattatattgcacatctgttattagtcaagatgtacccaggaaacaacaaacttgtttttgcagcacatatgttaacagttggttccaatagatcaaaggaaagaacagctaaccgccgctatgaatggttaaagaaaaaggcgtcagaagcacataggaacagagagttcaccgaagaaaccagacagcgaatgagtaaagccaaaaagcaacaagaaagggttgtatgtcctcattgcggaaaatcaggtataattggaaatatgactcgttggcacttcgacaactgcaaactgaaaccaggtaatgaaggattgaaacataagtttgagggtatcccgtgttcccataagaacggaaacgtacctaaagaaagggggaattgtccatattgcggaacagaatcttcattacattatctgcgttcacatataccgtattgcagaaataacccagatagaaagacccaggcaaaaaggaaacagttgatttgtccatattgcaataaatctggtgatgccagcaatatgaatcgctggcattttgataactgcaagtttaagacttcttaacttccattttagagaatcgaccgacttttgacataacaatatgtcggtcgaaatcttccggatctaaatcctgatgactgataacaattacgttaccatttatcccatccaatagcgcttttacggcaaaactaccatcacgatcaattgcaccatcgtacacttcatccaggatcagaagggataaatcaacaccagaaattttactggttacgtcgcgccacgtcataagcaatgcaaggttaatacgtgctctttcgccttgactgaacgatgcgtaactaaaatcattacgacccagcgatttaatcgattcgttaaattcgtcatccagagtgaactgataatcagcacccaacagatccagatagtacgcaatctgtttattgaagtaaggaatataacgtttaacgatgctcgctttaacgccggaatctttcagcagatccgtaacaatacctctgaaatatttttccttgacaaatccagaacgtttagaatcaagttccttttcatcttcacggagtttttcaactggggattcgtcgatcaccacgtcttcctgtgctttatccatgacagcccgaacacgtttagccgctgcaacttcattttgaagtgtaccgcgtagtgattcgtatttggatttcagcccatttagtgtacgttgttgtgttagtaaatcatccatgattttctgtagctgatcttgtttgttcttaatcagcgtaagtttctgagtaccgtttttaatattctcggcaatctcttccatgcgttcaggagtggggctaattggctgtttacaggccggacattcaccacccttgcgatacatcacctcaagacgctgcaactgttctacgttcattgagaggcgtgtatagccatcacgcagtttttgaatatttgctgtttggtcttcaccattgatcacacattctgcgatctgggtttgaagttcaactaattgcgctttaatctgttttgctgtttctacgtgggaatcgtagatatcctggtaacgcgccgtattctgatttgcttttgcccgttgttcgtcaatgaacttttgatgtgttgcgatctgctgttgtacgtgtccaatctgcattgaaagcgtatccagttcacggttaacaccacggatgtatgatttgttcagtttgtccatttcactgataatagacagagacagcaaatcttcaaccaatttacggcgatctggtgttttcagttccatgaaaggaacgtaaccagcagtacccagaacgataacctgtttaaagcccaccaggttaatattcaacattgattcaagctgtgactgataatcaccagcggctgaatcttccggcagtttttcgccattcttccagatctcaaatactttcggcttttgtccacggatgattttatattcatcattgccgtattcgatcaacagttcaaccagacattttttcttgttgatactgttcaccagttgcccgactttcagatcgcgaaatgacttaccaaagagagcatatgtaagcgcttcgatcatggtggatttaccaccgccgtttttacccgtaatgagggttttctttgctgaatcaaaatcaatgacgatcggtacgttaccaaccgacaagatattttgataagtcaatgttttaaatttgagtttcatcaattatcctttgggatatatcactaatcatgtttgtaatcgtgctatcaaagcagtatatcacggaatcttcatccatgctattcaggacagtaaatgtccaaacctttgtttcgtgatagttgtctttaatcagagtgaaccccaatgacacatactcgttataggaatcctgctgtactgcaacaatcacatcaaatccaaacattttataaagggctttatatcgcccttcttcgtttaaaatattaacgtaatcaactatttccattgctcgtaacctctgcatacaatgcactcattattgcagatacttcggtcttttcttctggagtgatctgcatgttgttgatgtactcactaatcaatccagatacacttttgatttcaaagtcagtatcaacttctgaatctgtgatcacgcgatcgacaatgttcaactcataaactgtttcttccagttttgtttgaaacttaggcaaatcgttatcaacttcgcgtacaatcaaacgaacagagcaatttttgtaatcagcaacatcaacatctttttgatccggataagtgatccggcgatggtggcacactgggttagcaatgaaagttaattcacgtttaccatcgccataagatagctcatagaagcccctggtttcgtcctcatcgttcgcgctcatggtaagcggtgtgccgatatagaaaacgttagcgccttcgttagcgtgatgatagtggcctgaatacacgatgtcatatttctttaagaaatcaggttcaagcccatgatccgctttactgttcttatagaaataatatccggacagttcaaagtgtcctaagcagtattgagattttgactttttgatgaaatcaaaaatctgctgtgtgttttcttgacaaatccacgggatcaaatcgattgattgtagtggagaagtatcaagatttactgtcatcggttcatcaacaacagtaaagcaatcatactgatcaagaatctctcgcggcgagttagggcggatcttgtctttaaactggcaatcgtggttcccaaccagaacatagatatgtaatccggcttcttccagtagtggcacaatacgttcacgaatgaatttcatcgtggtttgtgtggtggcctttcgcacatcaaagaaatcaccagcatggaaagcctcggtaatgccgtttgctttgcagtgttctacgatttgcacgaatacattgtataggttttcttcattccaggggttgtcctgacgcaagccagcgtgagtatccccgatcattaagtactttctcataagaccctcatagcccctttcggggctacttgtttgttagtgcttctgttgtgaagctacaatatttcgaattgatgctagtgaagtgttccacatcgtatcaatgaaatcctctgtatacggctgtttgagcatatcacggagtttcttaaccgcatacacatactgaaccttattacccctgaatagggcttcctctgcgtgtctacggaggcgtttgatctcagtccggttcttcttaatgaatttttgtgctcgcttcaatgcgtcggcttctacacgtgcctggatcttttgtcgaatttcctcttccggatccacttcttccacactggttagtacttctttctcttcatcaatcataagtgatctccatgatcatagtttcggcgtttatcatataagacaaaaccccttcttctacttcgaaatcggagtttcttacgtcagttggatcgatgataaccgggattcccacgttttgcaactctaattttacgaagtagggtagcaagtcaatttcgtaatcgatatcagttaatattttgtttaagtcaattattgctttcatagaaaatcttccaatgttgggaatacttccgcttccttgtctttggttttggtggcggaagcctcgtactgagatagtttgtcatgtagatcttgaatgaaaccttcgtctgcaatactaaccatatccgaatcttcgcagtcgtaaacgtgctcaaggaagaatttatatttcttcgcgttctcttttttctcgtacagaatacgtgttacgaatgcttgccaacatgctttgttaatgtaaccgtaaacgttggtataacgagtttcatcgaagttatgcagtcctgagattgcagcggaaattccgtcatcaatcatatccattttccaatcttcggaataacggttgaagttgtaacgacgtgatagcccgtttgcaatatccataatagcagcacctaactcattaggcattttgcgatcacctgtttcggcgatttgctttttccatgcacagaggatagggtataatttttcattgtctgcgtagatattggttgtttctttagtcatagtattcatatttcctctttgaagttaagaatattatataataactgtagacaaaatcaaatttcattctatattatttaaggttaaagtagatctaatgatctatagatcagatctaaattatataaaatttattgattttagtacttgacctacaatgatcattgtagtaaaataattattaattaataaattatagatcataaatttgatcagatcaagtattattgatcaaaaattttatggtcttttttattgacttcatttcgtaagttactacaataaccccgttctttgaaaaattgaggtatatatgagcagttttgcaagcatgtttaacttgaacaagttgatgcaagatgaaggggaacccgatgatactatggtcatcgatatctctaacatttccatcgctacactaatgaacaacttcaaaccaaaggaacaagcatccatcacgatcgaaatgattcgtcatctggtgcttgacactttacggtttaacgttgtaaaatttaaaggtgagtatccagaaatcgtgattgccttcgatgacagaaattactggcgtaggcaaaaggcctggtactacaaaaaacgtcgtcagatcgaacatgaagaatcagaatgggattgggatcgtctgaacaacttcctgaacccagtgttcgaagaaatccgtcagaatatgccttatcttggattaaaggttgaattcgcggaagctgatgatataattgctgttgttacgaaaaaagctgttggtgaaggtagacgagtattagtggtttctgctgatagcgactttacacaactacagaaatataacggtgttcgtcaatggtcgcctccccagaaaaaatgggtaacgcctaagcacggttcaccacgtaacgatctgcgatacaaaaatatcaaaggcgataaaaaagatagtatcgcttgcattaaaattagaaatgattatattgtgacgaaggttgaaggcgaacgcgccccagcggtaaaatcctctgagttagaggcatggctggaggcagacgaccctacaacgttgatgacccctgaatgggccgcacgttacaaagaaaacgaggaactacgcgatttcgaatttataccaaaagatattgaaaattcgattattgaagcgtataatactccaaaatccggaagtaaagccaaaatggaacgttacttcatggataacaaactttcccgtatgttcgaaaaactgagtgatttttgaggtaacaaaatgagtgtagaatttttacaaacaaaccctgatgtagcaaaacaggtaaaagaactgatcaaagaagcatccaacgtgaaaactcaagttgagatcttcaacggtacgttcaaggatatcaaatccaaagcaaaaactgatttcggtatcgacggaaaaaccttcgggaagctgttcaaactgtatcacgaacaggcccgtaccgctttcgaagaagaaaacaacgaactgatcgaactgtatgatatgatcgataaggcgtaaagcatgatcggaaataaaaccgaagtcggtttgtatatcgaaaatttggttgcctctgagggggcaacctacatagaagcaacgctacaatggatggatgaaaattccattgattatgcgatgctgaataaaacggttcctcgcgcgatccttgataagattagcgacgaagcgatcaaaggaaacatgcttcgcccatcggttgcgcttgaacatagttcatcaaccactctggacggcttcatgtgagatttaaagctccgtttgctgatagtgaggcgaattcacggcttgtgcctttgtctgtatacaagttatatctggcgatgaaaactcatttccaggggcgttttgatgtccttcaatacaactggcagatcaaagttagtgaaaacgcctttaacaagcgaaaggatagatatttctttgtaaaattagctcaacgctttacattcaaagaaatctattttatattcctatccaacttcgtagccaatccggatttctgggtaggcgatgttgatgaagatagtattgtcttttacaggcagtacataggaaagttacaaagactagataacgtgtttgtggatgacgttaaaaacgtgtacgaattcgccaaaatgaaagagatccccgtgtctctggtgttcaagtacagcgaaaaatcatcaacgtcctacataagcaaacttgtcctgtcaaatgtgatatcttacgaatcgtttttgatttttgactcatttttaggtatcataaataaacacgatcaagtagctgatgatattatttggtctgactttagcattaagttaaaggcatacagaaaaatatttgaccttactgaaaaagatatcataaaatatcgaaacttaatgaaacaaacgttaatcaaactaaactaaacgagaaaacagaatatgagcagcatttttaaacgtcaagatcccgctaaactccaggcacaggtagcaaatctgaaaggtggttccggcttccagaaagatgagaaagaatggaaactgaccctggacgcacagaaaaacggttccgccgttattcgattcctcccagcacgttccgatgatgaactggcgttcgtccgtatcgtgagccactctttcaagaaaaacaaccagtggtacattgagaactgttcctctacccacggcgattatgacggctgtcctgcatgtaagtacatttccgaaaacgatctgtatgagaaggctaaagccaacaaaaacgggccagaagataagctactgagccagatcggtcgtaaacaaagtttctgggctaacgtcctgatcgttaaagacccaggcgctccagaaaacgaaggtaaggtgttcaaataccgcttcggtaagaaaatcatggacaagatcaccgccgcaattaacggtaatccagaacttgatgaaccgggtattgctgtaacctgtccgtttgatggtgctaacttcaccctgaaagcgaaaaaagttggtgattggcctaactatgacgatagttcgtttggtgttccggctaagatcaaaaacatcgacgatgaagaagttcagaaagcaattttcgaaggtatgagcgatctccgcccgattaccgctgaaagcgaatttaaaccgctggctgacctgaccactcgcttcaataaagttatgggtagttcgatcggttctgctggttccagcgcttccgctgaccttgatagcgaactgagcaacttcgataacgaaatggctaagtttgacaatcagacatctgatgtgaaatcatctggtggtgttgcatcggttccggtaggcgaagatgacggcgtaccgttcgatctggatgattctgatagctccggtgatgatgacctggataaactgttagacatgtaatacaagcgggggcttcggcccccactcaaagaattctaagttagagaagaaatatatgaatgaaagtaatgtttttgttgactacatgaaccgcgtccgtaaatcttgggttgctaaactctcggacgaaacaaaagaactgtttaaagctatgcctcaagaggaacgttttaaacactatcgtgacattgatgaaaaagtggttgcggaacatcgtaaacttaccagcgaacgacgcgaagatccgaagcgtacaaccgttaaagaaatggctgatatgcttgacacagcagcggaaaccgttgtaaaatcacttattaagtaacacttattgaaaactaaaggctgaatatgaaattctctaaacaaactattgatatcctgaaaaacttttctcaaatcaactcttcgatcatgttgaccaaaggttcattcatcatgacgaaatcaatcaacagcgttgtatacgcagaagctgaaattgctgatgtgattgatgaagatgttggtatctacgatctcaactcattcctgaacatgctgaacatcgtcggcactgacgcggaaatcactcatgatatttccactggtgaaatcgtgattcgcggcgacaagatgaagatcatcgaacgttcagcagacgcaacaacgatcccgaaaccgaaaaaacgtctggtgatgccagtagcagatctgattttccagattaccgctaacgatttcgaaaaactgatcaaagcgtctcgcatgatgaaactgaccgacctgtccgttgaaccgattgatggtaaactggtcattaccgcgaaaagcaaagaaagtcaatcaactttctctgttgaagtcggtgagtatgaaggcgacaatgttttcaattttgatatgaagattgataacatgcagttcatcaacagcgattacaaagtagagatttcctccaaaggggccgcaaaattctcttctgataacggcgttgcttacgtcgtcgtacttgaagcaagtagcacattcaagtaagatagttttaaggggctacggcccctttcttttacaccatttattttgaaggtatattatggaacttagtgaaaatattgaaatcatcgaaaccaaatacggtaaaatctcccgatctcctgatgaatttgcatgggatcagcgctatcgcccaacaacgattgaagagtgtattttaccttctggtgacaaagccgctatgcggggcataatcaaatctgggcgtgttgagaacatgacccttgtatctgattcccctggcactggtaaaacgaccctcgcgcttgtgttggcccgtgaggttgatgctgaggtgttctttgtcaacggttcgaactgtggtgtaaacttcattcgtaatgaactggatcgttttgcttcatcaatgacgcagaaaccaggcggaaagattatcatcattgatgaattcgatcgttctggtatggcggaagcacagaaacacttgcgtagctttatcgaagcatacagtaaaaacgtttctgtgattgtaacggcgaacaacattaacggtgtgcatagtgctctgctttctcgttgtcctcctgttaaattcggtgttccgtctgatgctgaacgtatcgaactgatgaaacagttaatcaagcgttgtttcggtatccttgaaatcgagaatatcaagtatgaccctaaagtcattgcagcgtttgttaaagagcattatccggatgcgcgttctattatcaaagcgatcgggttctactcgaaacgtggtgaaattgatgctgggatcctaaatgagatcgttggttctgatgtgtctcatatcattaccctgttgaaagaaaagaactataaagggttgcgctctgaggttattaaatatgcgtcagaatacgatacctttatcggaaaattgactgatacgatttatcctatcgtgaatcaggattctaaaatcgcactgatccagattgtaggcgaaaacaacgcgcaatacgggctggcgatgaataaagaaattcatctgcaatatctgttgatgaacctgatgctttctatggtctgggaggcataatcatgagcctggcggaatttctggatgaagaagagttatccccgcatgaatccgcttggctttctaaagattgggataaggttgaagaactggtcaaagagtacggcaaggataaagaaaacaccttgtttaacatcatagacgaaatcaacaacggtaaaacgccgctggttatcgatgaagtgtatgataagtactttgtagacaacgcaatgagccagcacatagacacgatatacaacgcgtatgtgatgaatctggtaggcggtagtatctctgaccaaatgcactataactattatctcaactctgttaggaaggctaaacgcttcggtgcatgggctaaactatcggaagattttgaagagaaaattattatcgaaattcttcgcgaaaaatacagtgtaaatacacgtacagcgatggaatatttgcaggaacttaaagacctcggaatgttcgaggattggaaaagaaaacacgcaaaggtcgctctgtctttgttgggtattgtgaaaaacaaagctgaacaaaagaaattggaaaaattgattaaacaatggtgatgtatgttagaaattcaactaatcagcgacgattcttttttaaagatccgtgaaacgctaacccgtattggtattgcaaacaacaaaaagaaaatgctctggcaatcgtgccacattctgaaaaagcaaggtaagtattttatcgtgcattttaaagaactgttgaaactcgatggtcgtcaagtcgatatgacggaagaagacgaactacgccggaacaacattgcgcgacttctcgaagagtggggcatggttaagattgtaaccactgggttgaagtttgcagaagaaaacaacttccgcgtactgactcactcgcaaaaagcagattggatcctcaagtacaagtaccggatcggtcactaatcaaaaagcccttgcattcgtgcaggggctttgttatattgggtgtacaccattgagagggatatattatgactattaacgaaatcatggattcaatcaaatccaacgaaactttgatcatcccgattgtaaaagatgacatcttgttatcgttaacttgcaatctgtcagatacccgcacttacagctatgcacaacactactttcctggattttacgatcgtaacatttcagagtacacattgttatgcaatcaagttgaaaccactcatttctatgagcgtattaaaaaatctctggacttgatccaacaagcaaaagaagtctttatgaaaagaatggaggacgcgcaatgatccgcacttacatgaataagattttcgcggcccgtatggataacgttattgaccaacgtgcttatgatgatttggtttccctcgcaacctgtcaactggatgaacatacagtaacggaaaggaaactaatggttaacaaagctatcatgatggttaaccagggaattgcagaagcaaaatatcatagtgtcaattccagtattttcagcatgttattcgacgggtttaaacttgaacgccagcttgttcaactgagaaagatccgtgacttgttagcagaaggtttgttggttttagaacatcgagtaaacttgaatttgctgtaggtggtgttacaatggaacattatattaatggagaagacaagatccaatgaatgaattttacctatcagttgaacaaatgggagataccatttatgagcgcttcgttgactctaacggcaccgaacaggtacgtaagacgaaatatgcgcccgtaatgtatcaacacgctatgaatggcgtagaaaccccatacaaagacatttacggcaagccttgcctcaaaaaacagtttgacagcatcaaagaagctaaaaactggatgcagcgtatgcgcgatgttgggatggaagcgctaggtatggatgattaccgactggcttacatttctgacatgtaccgtaatgaaatcgaatacaaccgcgaacatattcgcattgcttctatcgatatcgaggtgaccgctccagaatttccggatccacgtgaagcaaaatatccaatcgatgcgattacccattacgatagcattgaagataaattctatgtatacgatctggttgagggtggccttgcggaatggtgcgcggaaaacgttgatcgcaaagacattagcgaagaagatttaaacaaaattgtttatcggtctttccagaccgagaagtcgttattgtctgcgtatatcaaagattggaaagagcgaacccctgttattgtaaccggatggaactctgacaaattcgatattgcatatatcatcacgcgatacctgaacattttcggtcaaaacgtggtaaggcattttagcccatttggtaaagtaaccgccagaaccactactgacgcttacggcaacgaacaattaggatatgatatttccggcgttgctcaaatggatggtatggcgctgtataagaaattcagctttaccccgcaaccatcttaccgcctggacgcgatcgcggaatacgaaactggtaaaaataaagttgagtatgaaggttccctgtctgaactacgccagcgcgatcaccaactgtacatcacgtacaacattgttgacgttatccgcgtacttgatatcgacggtaaacgaaactttattgaactggttctgtctgtagcgtactatgcaaaaattaacttcccaggggttatgtctccgctgaaaacgtgggacgcgatcatttataactctctgcgtgaagataaggttgttattccggaaaacagacgccatactaaaaccccttaccctggggcatttgtgaaggatccagttcctgggccttacaaatacatggtatcgtttgacttaacaagcctgtacccttccatcatccgacaggtgaatataagccctgaaacgattatgggaagttttgcggtacgtgctcttgaagagtatattaataagaccgcgccgcgccctagcgatgaatttagctgttctcctaacgggtggatgttccgccgtgatatcaaaggcgtgatccccgtagagatcaagaaagtatttgatcagcgtaagatgtggaaaaaaagaatgatggcgggtgagcgaaatcttgaactcatcaagcacgaactcgaacacttaacagacgcacataaccaaatgatcgatcctgactttgatttctatacagatttcagtgatgaatcgaaagcagttctgaaaactcttacaaaacaaatgcttaaagcagttaagcgcgtatgtgagaagaagatcgcacaagcgaacacagcacagcttaaccgtaagatttctatcaactccctttatggtgcgttgggtaacgaacacttccgatacttcgatctacgaaacgccagcgcgatcaccatgtttgggcagttggctatccagtggattgaacgtaaggtaaacgaatatcttaacgacctgtgcggtactacggatcatgcatatgttcgatactgtgatactgactccatttatgtttgtatggataacgtgattgcaaaagttggtggtgaggctaaatttaaggataataaccattgggttgacttcctggatcgctttgctaaagaaagaatggaaccaatgatcgataaagggtatcgtgaactttgcgaatacatgaacaacgtggaacacctgatgtttatggatcgtgaaatcatttctgggcctccgttgggttccgaagggttgggaagtttctggactgctaaaaaacgatatgcggctaacgtgtgggactccgaaggaactcgctatgaaaaaccgaaattgaaaatcatgggtatggaaacacagcgttcgagtactccgacctctgtgaaagtattcctgaaagaagcgatccgccgtatcctgcaagaaggtgaattatctttacacgaacattataaaaagttcgaagaagaatataaggaacttgactacagggaaattgctggtgtatcatctgccaacaacatttcgaaatatcgtgatggggctggctatccaatcaagggaacaccaaaccatattaaaggggtgttgttctttaaccgtttcactgctggtattgatggtgttacaccaatcatggaaggtgaaaaggtaatggttctaccattaagggataaaaacccgtggcaagctgattgcatcgcgtggcaatctggaaatagactaccagcagagatcgaaagtgatattctggcatgggtagattatccgggtatgtttgaaaaacatgttattagtccattgactaacatcacagaagtatgtaaaattgattatgaaaaacgtgccagtttaaacgatctgttcggtgactggtaaactctaggggcttcggcccctttcattaactagtgagatatatagaatgagaatgaataaatcggaaaaattaaatgtcaaacaaagcactactaaaaaaactgatcaaaaactcgaatagccaaactgcatctgtactttctgaaagcgacgtattcaacaatattaccatcacgcgaacccgtgtgccgattctgaatctggcgttgtccggtgcgtttaacggtggcctaacttctggtcttacccttttcgctggcccgtccaaacacttcaaatccaacttaggtttgctgactgtagcggcttatctcaaaacgtatgaagatgctgtgtgcctgttctacgattcagaaaaaggtgttactaaatcctatctgaaatcaatgggtgttgatccggatcgtgttgtgtatactcgtatcacgacggtcgagcagttgcgtaatgacgttgtaagccagcttaacgcgcttgaacgcggtgataaggtgattgtattcgttgactcagtaggcaacacggcaagtaaaaaagaacttgctgacgcgctgtctgataacgataaacaggatatgacgcgagcaaaagcattaaaaggcatgttccgtatggttacgccttatttggctgacctggatatcccgatggtttgtatctgtcatacctatgacacacaagaaatgtacagcaagaaagttatttccggtggtactggtttaatgtattccgctgataccgcgatcatcctgggtaaacaacaggtgaaagaaggtactgaggtagtgggttatgatttcatcatgaacatcgaaaaatctcgattcgtgaaagagaaatcaaaattcccgctgcatgttacctatgaaggcggtattagtatgtattctggccttttggatctggcaatggaaatgaactttgtacagaccgtaaccaaaggctggcgcaaccgcgctttcctgaataccgagactggcgaactcgaagttgaagaaaagaaatggcgtgagtcagaaacaaatagcgttgaattctggcgtcctctgtttactcatcaaccattcttgaaagctatcgaagaaaagtataagatccctgatcgtgaaatcagtgatggttccgcgctggaagatttatacagcactgatagcatcccagatcctgatctggatgatgacgatatcccagaatcatttgatgatatcgaagaagacaacgaaattttataaaaactatggggcttcggccccataaccgaggcaatgtatggatatcgagagcaaagcaaagaattatattgatgaagcgatgaaagatgttattcaggaacttctgattaacgatgaaaaaggtgttgcgcatctggtttatattcataaggtgttttgggatcatggtctgaaagtagaattcagtaccccagacgaagacaaagaagcgttgatcccgctggtgcatgatgcaatttatgcacagattaaagagcttgaaaagggttcagttgtcccaaagcctaagctgacattatgggatgtattcaaacaaaaggtttacaactttttcatgatgttcagcaacctggtataaggcaatacaatgatcgttgatacaatattttctaacctgatttataacgggacgtattttgtccaagcatggcctcatctgaaaaaggaatattttgaaggcaatgcacaagttttgtttgacctcattgataaacatgtacaggaattcaacggtattccgtcaaaaactgctttagaggttgcgcttgacaaacgaaatctaagtgatgtagtctacgaagacacgaaaaaggcgattcagtcgctgaaaaatgcgccagaagatttagattggctaatgaaggaaacggaaacatattgcaaagacaaagcaatgtatcgtgctctttctcgcgcaatcgagatccaggctaacgcagaaaaaccactggcagaacagaacaagaaacttcctggtgttggggctatccctgaaatcatggaggaagcattagcaatttcattcgatagttcagtaggtcatgactatttcgaagattatgaaaaacggtggatgctttaccaatcgaaggcgatgaaaattccgtttggtatcccgatcctgaacgcaatcaccaaaggcggcgcggaacgtggtacactgaatatcatcatggctggtgttaacgttggtaaatcactgggtttatgttctcttgcggctgattatctgcaacagggtaaaaacgttctttacatttctatggaaatggcagagcatgtttgctctaagcgtatcgatgctaaccttcttgatgtgactatggatgacatcgacgaaggtaacattacatacgcagactataagaacaaaatggagcgccttaaagcgggtaaggttgggcgtttggtggtcaagcagtaccctacatcgggtgcaggtgcaaaccactttagagcgcttgtgaaagagcttaaattgaagaaacagtttgttccggatgtgatcattgtcgattacctggggatctgtacttcaacccgtgttaaaggtgctgagaatacctatattctggttaaagcaattgccgaagaactacgcggtcttgctgttgaaactaataccgtaatgtggacaggcgcacaggttgggcgttctgcatgggatagttcggatgtgagtatgggtgatgttgcggaatccgctggtttacctgctacggctgattttatgttagctgtaatcgagacggaagagttagctgatcagggtatgcaactgttcaagcaaatcaaatcccgttatggcgataagaacactttcaacaagttcaagttggaagttcgaaagggtaatcagcgctggatggataccgacaacagcgaatacgggtttaaatctgactaccacggcaacactatgcctaaaacagtagaacagacacaaggcccgatgattaaacaggctgaatctacccgacgtgataaaatgacacagattgcaaaatctgacattcaattttaattgactggggcgaatagccccataaagaatgtaaggtaatgaaatgactaagactataacgattcctattccggctatcaaactgctgactggactaactctgatttttgcagccgctaaagtgtttggcttctcgcaaatgtcatggttctgggttctcttcccagttctcttacccgtctacattgtagtaggcgttgtgttggtgggtgctgcgatctatctgctgttctcactgcttgccagtgacaaggccgaagatatgtatcgctgggtaaaagccaaatacgaaaaacttttcaaaaaatcgtaaaaaggtattgacctgaatctccattgtggtaatataactcacgtagacaagatactgagttaaacaaaggagattcaaaatgaacgtattcaacaacccttacaacgaaatgctgaacccgaatgttgatttcagcgatggttattttgacgcaatcgtaaacagcatcaaaaacaaaggtttgctgttagcgatgctggaaaaaggcaaagatgacgttgaaggaagtgttgatttcctctggaacttcctccctatcgaacctggtttcaaagttggttgtaatgaggaacaagcgaaaaacgttcttcggtatctcatcaataacgcataaaaaattaagcccctttcggggcttttttgtatctataggtattgcattctttcaaaaaagatgataccttaatcataacaaaggaggacattatgaaaatcgcattcgttatcactttcttacttgcagcactcaacatcgtaactggtaattcttttagttggtgggtggtggcaatgccttacattttcgtgtatagcaaaatcatggtgattgctggcgtgaatcttgtccttgctatcttattatttgtatttgccgccctgaatggtgaagcaggttctacctggaaagctatgaaagagggtgttaaagagggtttgaaatgatgaatttagatttttgtaaggctgaaataaaagctgacgcagacgaagaagaaccgaagttcgatagtcctcatagttcccgctggatcgtagctgttgacgatgaaggttatgttacggtattatctcgaccattcattcatgatgcattctttgaatgtggacgcagcgcggaagatatcgggcttcctgattccgtcgaaatgcctcctggtgtatatgaatggatctgtggttttgaacaaactactgattgggaaaccggatatgtagacggatgggaattctaccctaacgaatcaacattattgtatagctgggaaaatggcaaagttaacgaaagcggaaaccaagaaacacaatcagataatggatctggttcactctgacaaagcgctaacttacgaagagaagttgttcattatcgaaaactttcatgaaggcgcgtttacaaacaattctgaattaggggcgttctttacccctattggacttgctcgcgatttcacaatcgatgcttgcacaggtggaagtgttattgacctgtgtgctggtatcggtgggttatctttcgctatggttcattacatgatgtacaatacgccgcgtgaaatcgtctgtgttgagttaaatcacacatactatgagttaggtaagcgtatcgtaccagaagcctcctgggtgcatggagacgccttaacaactgaatttaatcaggtgtttgatatggcgatcagtaatccgccttttggtaaaatcaaaacctctgattttaagggtaagtatacaggggcagaatttgagtataaagtaatcgaacgtgcatcacagatcgcacgtcagggaactttcataatccctcaaatgtctgcaaatttccggtattcgaaaacacactgtttccgacaagatgacagcaccacatcaagtaaatgcaaaaagtttcttgatgaaactggcctcgttatgaatcctggatgcggtatagatactgggtattacctggaggattggaaaggggttaaaccactatgcgaggttgtttgtatggagtttgaacctgaaaccaaatctgatttattcactttcacaatagagtaataatcatgcaaaaaagttacggtagtggaaaacgaacccttgacgaagaaaagaaaggattagatctgttaatccctaatctgtctattaatacggaaaagggaattgtgctatggaaaactcctaactctaaccaacgaaagataaagcctggtgatgttgctggtagccccaatgcaaaggggtatcacgttataaaatttaacaatgaacagtacagaagacatagactaatattttactatgttcatggatatctacctgaaatagtagatcatgtgcgtggggttgaatttggtgacggtatcagtaatttaagagaactaacacaatctctgaatgcgataaacagaaaagcaccatctactaactctagcggttacatcggtgtatccaaacatgaaacgaaaacaaaaggtgtgttatggagaggcagaatcacagttgaagggaaaaagataaatttgggattatttcctactcccgaagaagcacaccaagcagttgtaacagaacaaataaaacgtaatactaatttagaaaggagatcatcatgagtgatcaaatgattcgtaatatggatttaacatacagtgtgcgaatgattcgtttactgaaaaaaccattcacagagtggtctgcttacaagctggggatccttgatggacaaggcgaagtaattcgcaaccccaaaacaaaagaagagttagaagcgtattctccttttcatcgttcagtacgccatatcaagcgtagaatgaatgctgttccgtatatgagtgggtttatgaacttaaccagttcatatgataccctacgcaatcgctacaatctgacagaacaagagcatgaagaaatcatgttgaatgttccacgcctcaaagaatattatgataaggggcgcatgttagaggatatggtcgcgggtgattctggcggcgatacagaaaagattgcttctggtgtgactactggagcagtaaccaacatcgggccgaaagtattaggcgttacccgtgcagggaaaaggaaaaagaaatgataattcctccgctgaatatcactatctgggctactgctaacgattatacatggtttccaatttgtatcatgtatatgagtgacaacgcgaccgtttatcagaatcgtcgaaaaggttctgataaaattgatattgcaataaattattcgtttaaacaggcgtttcgtggttggaagttaatgcttgacggaacagaaaagcaagtaagttcttgacagaaaaatcctcttagtctatgatattgaaatcatttgattaggaggatttacaatggcggttggatttggccctgctgacggtgttcaagataccattcaggcaacaatagacaatgcgatagattttgcacgttctcaaatcagaaacggagaatcattaacgcattgttttgattgtggggatccgatacccgaaaaacgtagggctatcgtgaagggttgccgttattgtattgaatgccaaaaagaacatgacgaaatgatcagcgcggggtataatcgacgaggatctaaagatagtcaactgaggtaagaaatgtatcttgatatagaatttgcaacccgaatcatgggatcactgcctcaaagcgaaatcgttcgtaaatcaggggcattaagcatcaatgcgcgttgccctatttgcggcgactcaatgaaagacaagtacaaaaaacgattttggatctacccttctaaaaagggtgatcatatgaattgtggttgttttaactgtggttatggtgtgccgtttagcgtattcctgaaagaatattatccagacgattaccgtgattatctcatggaatcgtttaaggatcgcaattcgttaaagccaacacatacagaaccaccaaaggaagagaagaaatttattcctactcttcaattctgcgaaaggttagataccttgccggatgaacatccgatcataaaatatgtgcagaatcgttgtattccccgtgacaagtgggatcggttgtggtttactcgcgaatggcaacaactggttaatacggtgaatccggatacctatccgatcgcaaaaccagaaccgagattagtgatccctatcttcgataagaaagggaaaattgaatctttccagggtcgtgctttacgcgacggggcaaagtcgaaatatatcacaatcaaagcctgtgaagaatcaaccaagatttacggacaggatacgatagatccgctaaaaacggtttatcttcttgaggggccattagatagcctgtttgttgataatgctggcgctatcactggtggacagcttgcactttctgaggttccgtataaaaatatgcgtgtctgggttcttgacaatgaagcacgtcatccggatactactcaccgcctctttaaattgattgaggctggagaaaaggttgtaatgtgggataaatgcccgtggccttccaaagatatcaacgaaatgataaaaacggacggcgcaactaaacttgaaattatgcagtatttgaaagataatactgtttctggactcacggcaaaacttcgatttaagtcgtgggacaaatcaccgaaaaaatgagattgatatgactactgataaaactcctgtatttaattcatgtgcgcacctggttaacccggaagatctggaatttgtagattccgaatatcaaaaggttctggcccgtaatggcgatcctttacaatccatgctggatttacaaaaccatgcacaacaaagcctgtctgataccctgcattgggttccgcgtccggataatctggaaacttgtggagaaatccttgattggctgaaactgcaagacgacgcgatcgccgatgaaacccgcgaattgtataccgctctgggtggaatgtctcgcggtgttaaacctgcttccggtgtttggaaaccgtggaaagcaaatcaccaggaattgcgcaatactaaatttgcggatctgagtgaagaggatcgtttagaagttctgtttgaaatgatcgaccaattccactttgtactatgtaagtttattgcattgggtatggatgcagaaacaatttataagatgtacgctcttaaacaagccgaaaatcttcgtcgttgggccaacagctattgattattagcccactcaacccaatcggtatcttcgtaagggttccacccctttttgaataactcgattgatgttctaggaacacgggagattgttgcaatttgcaattcttgtagcattctcttgtgtccttgtcttttatagattccagctttaatatcgttaatataccagtcatagaaaatcccagcatacctccattcatgctttcctttcattgttatttgatttctccagggtttttgaccataagcaggatgattatcaccgcgtaacccatacatagagtttttgtctcccctatgggattctgacatctttttgcgttgttcttctgttgcctttgtccctgtcctgtcttttgatatctgagatatccactttctgcggatccatccatatgctttattatttctctgtgttgcgttgacgcacatcatattagcagcatatatcaacttattattgtgtggatacatcttgacaagaagttgatgggctacataatgttcttctgcggtaagttctactaaattatcatgatcgtcacaacctcccatacatcgggggatgatatgatgcttttctgtgtaacaatttagtgttctatctcttgctttttctataagattggtgtaaattttacggtagtccatcgatggtgttccttagtagatgttttgttgctggggtaatccatccgataggatgtctatttttcattaattgaactatctgttcgataggaaaagtgtatttgaacgtgtagatatctccttcaaatacgggagttgttgtataatgagcatgaacaactattgtgcttacggtcgatatcatgtataatctcctttattatatttatagtatcgatcaatggcactttttgatgctattagctgttggggttctttcttatggtgtttgcgcgatgatcacatatcttttcggttggtgtgtgtttcacgtaaatggcgttgaaagaaaacttttactgattatactatcagtgttttggtttgttggaatattctacgtttgttatgaggggcgagaatgattacaaaatattatatcgtcgttagtaaggataaagacgggtttaaaattcccttcattaaggaaggagagttaacacctttgttgtttctatctccggacgatgctaacgagtataaaaattcgattatcaaagaatatcatgataagatgaatccagttaaacaaagtggtcttagccgattctttcgaaaggaagaagttgaaaccgtaaccgaaaagaaaaagaaagatatgcgttggtttattgaacacgcaagtattcaaggggtattgattaaagtatgagcgaattaacttttgacgatctgagcgaagaccagaaaaatgcacatgatcgagtgattaaaaatatcagaaacaaaatccatactactatcacaggtgggccgggtgttggtaaaactactctggtaaaatttgtgtttgaaacattgaaaaaactgggtattagtgggatctggttgacagcaccgacgcaccaggctaaaaacgttctctctgaggcggtgggtatggatgcaacgaccattcactcagcactgaaaatcagccccgtaaccaacgaagagttacgagtatttgaacagcaaaaaggcaaaaaagccgctgatctgtctgaatgtcgtgtgtttgtggttgaagaagtatcgatggttgacaaagaactattccgtatcatcaagcgtactattccgagttgtgcggtgatcctgggattgggtgataaggatcagatccgtccggttaataccgaagggatcaccgagctttcaccgttctttgatgaggaaatttttgatgtcattcgcatggataagattatgcgtcaggcagaaggaaacccaatcatccaggtatcacgcgctatacgcgacggtaagccgttaatgcccctcatgaatggtgaactaggggtaatgaagcacgaaaacgctggtgacttcctgagacgttattttagccgtgttaagactccggatgacctgaacaataaccgtatgtttgcttacactaacgcaaacgtagacaagttaaatgcagtgatccgcaaacacttgtacaaaactgatcagccgttcattgttggtgaagtggttgtgatgcaagaaccgttagtgacagaaggccgtgtgaatggggtttcgtttgttgaagttatctataacaacaacgagcaaattaaaatccttgaaatcatcccgcgttctgatactatcaaagctgaccgatgtgatccggtacaaatcgattatttcttgatgaaaacagaatcgatgttcgaggatacgaaagcggatattcaggttatcgcggatccggttatgcaggaacgtttaggcgattatttgaactacgtcgcgtttcagtataaaaagatgaaacaggaaaccggatacaaagccccctggtattcgttctggcaaatcaaaaacaagttccagacggttaaggcgcttccggtttgtacgtatcacaaaggtcagggaagcacgtatgatcattcatacatgtatacgcgcgatgcatacgcatacgccgattatgaattgtgtaagcagttgctttatgtaggaactacccgcgcacgattcactgttgattatgtctaagggcttcggccctttgaggttattatgaaaattattgttaaagtcaaagatgtagaaaagattttgcgagaagttgaccgtattggtagagaggggcttgattatctcgaagggttcaattctatcgatatcaatttgttgtttgcaaaattgcgctgcattgtcaacgcaaacaaagaagttgggttatactgtcctaacgggccgacctacacgtggggaaacatttcacaagatatcgaattcacttttgaagagtatgcagtgatcattgatactttgaaaatgggtcgtaacattcgtgaaaacaaaaacatgcttgaggggttttaaatgaatattcaccttccgcgcctttatgctgaatccgttgccgatctgattttgaaaagtgatcgttctacaatggaagattaccacgattgggaacatctggacaattttgcagaggctgtagaaaacatgatccgactggaaaaatcgattgctcgttgtgggcttcgtcagttcgggatgatggcagtaactccagacatgatcaaatccgttgatgttactccggaagtcgcgctatcattggcctatttcatggaatcgtataagcggggtcgcgaatgagtcatttacccgtagattttgtatttgattatgaaagtattggcccgtttccaaaaggaaaactagctgaacttagctatgttccgtttgttgatgatccttatgatccgcctacctttcaggaactgattgctaaaggaagaaagtacaaatttgacatccggaaacaaccagaacgcatcaaagatgaaaaaacgatcgaatggtggaaacagcaatctaaagaagcgcaaagggttttgttcccttccgatattgacatggatttgtacgaaggtcatcgacaattctttgctgatttagcggctgacggtgtgagtcgttggcagtcatacgattatacacgcggccccgaattcgatcgttctatgctaaccgatgttgtacgaactatgacagggaaacttgacacgtttgaagatatgccgaccgtgttctggaatagccgtgatgtgcgtacagctattgaaaaccgtttactgactcgcggagtgaccacgtgtccactacgtaaaggcatgttagatggattcattcagcatgattcgattcatgattgcgctaaagatgcattgatgttaatctatgctaaacgttatgccctggggctggaagaacctccatccttagaagagacagacgaaaacagcataggaaagaaacgatgatcacattaactattatggatcgccattactacgggaacacgattaacgaagcgaaagcaaaagcctttgatgatatcattaaccaggatctggttaagattgaatctgatcgctatgtcgtgcaaccaggtgatagcctatattctatagcaaagaaactgtatggtgttggtgaactttggcctgatatcgctaaaatcaaccgtgattctattccggatgcacgtctgatccatcctggtatagttcttcgattgccaaaactggtaaaaatttaaaacaaagcccttgacttcggttgagggcttttgttatattgggttctcagaaaggagattgatatgaattttactaaatttgaaatccggctgttgattacgctggctatttgcggagcggtatcattgattagtttgttaacgtatatcgctgtaagaacaacgatatggcttcatgactggtttactgtacttgacacaattaaggggtgatttatgcgtatagcgattattggggcggctttgggtgtaatcggcgaccgtttagtaaactgtatgatcgaagagttaaagtcacaaccttatcctttttcgatggaatggaacaaccaatttcctaatttggttgaggaagaacccatgatccataaagtcaaaccgtatcgaaatccggttgtgcctaaatcgttacaccgtcaatcagtaaacaggggtaaatgatgtcagaatttgcgttagctatccttgtcgtgattgttgtaatgggttcgatcctgttttgtcgcatgtatcagttagatgatacacaggaatggttggacattaacgaaaaacagttctgtaagcactttgcaggtgaatttgtttttgtgaaatttcgtagtgactacaaggtcgagtttgagtttgacggaaaagggaacaactaccacataatcacttctgttattgatgcaaagaaaatctttgataagacacagggcggtgggatccgtaaattgctcaaagaaataaaatagcactttttgttaaaaagcctcttgcattgcgggaggctttttggtatcttgtattcatcgaaacgaaacagagaaaggaatacgaaaatggttaaagtaaaatatgcagcacacgttaaagcaggtgagattgttggtttaactttcggtgctgaaattggttctcagtgggcgctggttgaaaaggtagaagacctgggcgataaagtagcaatcactgtgaaaatgcaaaaacgttttactaaccgtcctgtaatcactaagaaagtgaagaaggaaaaacgtgttaatactcagactttcgaagaattcatgaactggtgcaaaatgtataaactggatacctactaatagcactttttgttaaaacattctggggtagctttggtatagttaccccatcgaaacaagggaggaaattattatgatggttaacggttctctttatcaacaagcagttgcacaatggaaacagaaagttcaggatgcagaacgcgggatcgcttattgtgatgaagcgttggcaagcaatcttgaaaactgggaacgcaaagagtacgagaaagttaagcaacgccatttgaacgaactccctgcattaaaagaacacttaaaatatttgatggataacgaaaaaagccttgcatagaataaccatctttgatatagtacttacatcgaaacgaaacacactttaggagatataccatgaacactttcgaaatcctcgcagaaaaagcagcccctttcatggaagcaatgtacaaagcgcgtaacgctcgtttccaagattctcctttcgaaactgttttctttctggagaaaggccgcaaatatcatcgcgttgttcaggatactcgcaacaaagaaactggtgaaatgttcaatcagcgttctgttgccgccttcatcgataatgatggtaatatcctgaaacctgcaagctggaaagcaccagcaaaaggcattcgtggtaatatcttcaatgacgcagaccgcgcgattgaccaaagcggttatgtggtttatcttcgttaacaaaggggcttcggccctttttcttaaaaggaatatagcatgagtaacaaaaacgaagacgctaaaatctggaaagctgtaggggttatggctgtaatcgctgttgtgggttactatgcgtataattcctggcaagaaacgattgatgcgcaagtacaggaacaacaaaaagccgacgcaatcgaacagcataaccagcttatgcaattgcgctcgctgggatacaccacgaaggaagattttaaaaattcctttggtgactataccggatccctttataccgcgtggggaatggctgacggcgattacatgtacattgaaacagaccgttataatgtcccacaaagtgtatgtttctatagtacaccgagagacaacggcaaaatcacgtcatatgcaccagaattcaaaacgatttctgttgatatgaagattgacgggggagaaaccctatcatttgccgctaaaggaaacaacggatccgagcggttgtgtcttctttctcctactcgtttcttacgcaacattcaagacgcgagtaatttaaaaattgctttaccatacatcaaccattatgatattgttgatgaagtaaaagaatggaacgtatcgcaaatcggggtgaaattcaaatgagaaaagcacgtaaaactaatgcagtgttgatgattaacggtgaagtaggaaaaccttgcaccaattctaaattcatgcacattgcagggcttccgggcatgacgcttaaaacgtcgtatgatacccattacaacgaagaaactacttcggtatacatgggagaagatctaatggctgaacgcatcatgcaatgcattcacttccctggtgaacgtccttcaattgattgttatatttttggctaccataaaggtattgtaaatgaatctgtataaagaaaatgatctctatgttcctgcatttggcctactcacgtatcacagtatgttggctggatacgggaaagagttcgattttgtagcaagcgttaaacgacatttggaacgcagcggcgggttgtctattccgcgccaaatccattatgtttgtaaagaaggggtgtttttgaatggtgttcctcatgtgatccctttcaacgtgtttgaaaactattttacaaaatacgttgttcaacaaacggagacgacatccgagaatactgcaacgcgagaagaaacggcgatcgtacttgataagttttttgaaatcgctcataaagtgaagaaacgcacgaagagtgatgtggttcatcacctatcagcggaagttggcgagatcagcgaatgtctcattcagcctcaacgcggcggtaatatcgttgaagaaagtattgatgcgattgtgtgcgcacttgatgtgatttacctggaactgggtactactcacggacggtacgaaattgcaaaaattatcaacgaaatgcttgcagaaaaattagataagtggtatcgtacttgtaaaccttgagtttacttgtgaggattatatcatgttcgtatatcgtgtggaattttcttgttctttctggaatgattgtacagaaaaatggcaaacaaaaagcggcccatatgtcaatcgttatgtgtcaatggataccgctgaatggctggatcaattctgtatgaatcctgatatctatattgatatggatgataaccgacatccagcaccggatgacgataatcgattgatgcgcaaccttgaaaaagataatatagactttcaagaggctgggttatactttggttttcagtcaatacagcgcctttctcgttggttcaatgcatatgaacgcgagtacatgcacaatgttggtttcgtctgcatggtatacgaagttgaaaagttgtatccgggcgcacgtcaatgtgtttttgacatagacaaagcccgtttagttaagatgttaagtttaaaagagatctattaatgcctacctatacctataaatgcaccaagtgtaataaagaatttccaaaaatggcaagcattgctacccgtgatgcacctaaagattgtgattgcggaggcgaagcaaaacgaacggttgataaacctcaaatggttcgtgatggtttcccttataacaagtaaaccccgaaaggggttttctttttcatagaaccctatataatgtcagtgattaaacaaagaggtgaatatgagtttagattttcttctggcagatgatgaaccagaacagaaaccacaaccagccaaaaaaggcgcaaaggttgacgaatcattttgtatgagcgatcgcgatcatattcggttgcgtccaaatatgtacgtcggatcggttaacaaagaagcgcatgaacgtttcataatgggccaatatcgcaaggttgagtacgtggaagggttggttaaaatcatcaacgaaatccttgataactcgattgatgaagcgatccgaactgaattcaaacatgctaataagattgatgtaaccattgatcataatctggttaaaatctctgataacgggcgcggtattccccaggatgatgtaaaaaccccagatgggaaaatagttcctaaaccagttgcggcatggactatggcaaaatcgggttctaacttcgatgataaaaaccgcgtaacgttgggtatgaatggtgttggttctttcctgacaaactgttatagctcgatttttattggcgagactgcaaacgggaaacgcaaagtaaccattaactgtacggacggcgcacagaacatcgattaccgaaccagccccagtaaagaacagggtactactgttaagtttactccagacttctctatgtttggtgtaactggtatcgatgaagaaaccaaagaagtgattaaggatcgcttaatggcccttgccgttgctttcccgtctgtgaaattcacatataacggcgaaacgctctctaatcgcttcccgctgtacgcttccatgtatggggataaaaccattgtccagacaaataatcgcctcagcttcattctggcgagcactgaggacgggtttaaacagaaatcctttgttaacggtctggatacgaaaaacggcggtgttcatgttgagtgtatgattgatggtatctattctgaacttgaaccgatgatcaagaaaaagcatagtatcgagatcccgaaagcacgtgtaaaagaatgcttaactcttgtggtattcctgcataactttaatgcacctgcattcgatagccaaacaaaagagcgattagcaaatacagcaggtgagtttaacaatcatgcgaatttgaactacaaaaagatcgcaaaaatgattatggataccccagaaatcattactccgatcattgaatccgcattgattcgtaaacaagcagcagaagccgccgcgatcaccaaagcgaaaaagaaagcgaaaaaggcaaaaattgctaaacacgttccggcttccggtattgatacccctggggtagaaacaacattgtttctgacagaaggtgattccgctgttggtcagttcatcgaatgccgtaatgaagaaacacaaggcgctttcccgctacgtggtaagcctctgaatacatggggtatgagttttacagacattatcaaaaacaaagaactgtttgagctaatggctatcctcaatattcatcctggtgatacttccggaatgacttatgataatatcggcatcatggtcgatgctgacgttgacggcggcgacattttaactctgttgcttgcattctttagccgttggccttctttgttcactgagaaacggatccgatatattcgaaccccgatcgttatcgctaaagttgggcgcgaggaaaaatggttctattctcttgatgagtttgcgccgttccgcgataaagcaaaagatgtacgatatatcaaggggctgggttctttacgcaaagaagattacgaccgtgttctgggtgatcagttgaagtatgatgtcattgtacttgacgacgaatacaaagaagtgttagaactatgcttcggcgacgaatctgatccgcgtaaagattgggttaatggaaaacacaaattttctaaggttgactaatggaaagaagtattaaagatgttgtacaggtggaagggctaacgtttgccctttacacgatttattcacgtgcgatcccgcacctggtagacgggtttaaacccgttcaccgtttctttattcactctgcgatgcagggcggaacgggatttcagaaagtagcttctatcgctggcggtgttgctatgtatgggtatcaccacggggaaacctctgtagaagaagcgttatcccttatggcggcgcactggtgcaataacattccgttattcgaccgtgatgggttctttggttcccgtttggttaagaaacctggcgcacctcgttacatcaagtgcaaactatcgccaatattcaaagcaatttatatggatggtgatttaacgccagttcatgaagatccggaacatgtaccgccagcgtactatctcccgatcatcccgatggtactggttaacgggtttagcgggattgcaaaagcatatgcaacaaacattccgcctcatgatcctaaatcggttgttaacgggtgcattgcatatctgaatgataaagatttcacactggatctgaaatacccttactttaaaggtgaaatcacagacggtacaatttacggcacgtatgaattgcaaggtaaaaccaaattggtgatcaccgagatcccagtgaaatatgaccgtgtgaaatacattgcaatccttgacaagctggaagaaaaaggcgttatcgttagctacaaggatctatcgaaagaagattttcgttatgaagtaacgctcaagcgagagtatgccaacgggttaacccgcgaaaagatcctaaaagatttcgggttgattgaaaattcaaacccaaacattaacgttatctttgagggcaaactatactcatacgaacgccctgaaacgcttctaaaggatttcgttgatattcgtatgaatgtatatcaacagcgtatcaataagcgtatccaggaaactaaggaagcgttagataaagcactggcaaaggttgcgtttattgctcaaatggtagaatctcctgattctctacgtggtcttagtcgcagcgaagcggttaaatttgtgtctacgtggataggttgcgagaatcatgccgaaatgttagtggctatgaacatctaccatctaaccacggacgaaagcaaaaagctggaagacgaagccgaagaattgcgtaaacagttgaaatactgggaagaaacaacccctaaaattgagtatctcaatgatttaaaagaactttctaagaaattgaaataattacaaagcctcttgcaatgcagggggctttttgctatattggttttgtaccaagcaaaggagattctaaaatgttgaaaactcgtagtgcaatggaagtaacccactgggcgcgtaccatgatggaaaaacacggtttgatcagtaatggttggacattccggatcaatggacgcattacaaaaactctgggccgttgcagttataccaaaaaactgatcgaactatctggtcgtcatgttgcggaagatatctacgaggatattttagacactcttttacatgaaatcgctcatgctcttgtcgggcgcggttatgaacatggtaaagtgtggcaagctatggccttgcgactgggtgctaaaccttcaccgagtaaaacaactacaaaggatgctaatctggttgataagaatgagatcctttactgtttgttcatgaaagattatcaaggccgtgaagtctatcaggctaaagctgataagaagttttacaacgatgtgatgaacggtgttaaggatatgaaaaacatttggatcagtgggcgcaaggcatacacaaaaggccgtctgtatatccgtccagtaacccatgaagaacttgcatatattcgcaaagaggggtaaggtatgacacgttataattcaccaaaattaggaaaatatctgaccatatttgggatctgtgtattcttctgttctatcatcattgctattgtgatgggtatccgtgatatgaaaaaggaaaaagaggacgaagaaaaattgataaaattccttgacacttattgcgaagtggtggaatatggtctgaacaaaaagccaacgaagtactcttgtgatcaagtcatttttaatattaagtgagaaataaacaatgaaattacgcgaagatacaccgcaaaccatctatcgtgttggtacagataccagcaagggacgaaacaaactatctctacgcgcaaacaagaaagcgtataagatcctttcttcgacagtatacaaatacaagatccgcgcaatcattcgcgaactgtcttgtaatgcgatcgatggacacaaagaagcgggaaatcagaacccgtttgatgtccagttgccaactgctgttgatcctcgttttgttattcgtgactacgggatcggtatgtctccggatttcgttagtgatgcgtttaccgtttacttcgaatcaactaaaaatgattcaaacgacctgatcggttctatggggctgggttgcaaatctccgctttgctattccgatgctttcacggtggaatccgtaaaagacggtatcaaatgcggttacacaatctatatggatgatggggaacctttctgcgatcctctgtatgagattgaaagcgatgaacctaacggggttactatcactgttcctgttaaggttgaagatatcaaagaatgggaaaacgaagcagcaagggtatacgaatcatttactgatattcgtcctaactttgttggtgcttctattctcaaaatcaactatcagccgaaagaagcaaccaacgatagcggggtgatccgtcataaatcagcatacactagcggtgtatatgctcgcatgggtaacatcatttatcctctggataaagatttgtatgatacctcgatgttctattgctatacagaaagccagtatacgtatattattgacttcccgatcggtgaacttgatttcatgccttctcgcgaagagttgagtatggataaaatgacagtagggattgttaaagaacgtctgaaacaaatcagccgggtatatttcaatcgagttaaatcagaattcgataagttacaaaccgtgcgtgataaactgacgtggttccattctctgccttcaatggtacaaaactttgttggtaaagatgctaattttcgcatcaatggtgattctattggctggatccatagcgaactagtcaaaccaaacaaatataatgatgattatgttgctgggtattgggcgaacgaatacgacggtaaagatgcatggtatcaggtaactggtagcggaggccgctggagcaagtataagccagaaacaaccaaacgccaggacatcacacgcatttattatccgtggaaacagaagaaactcattctgttaaaagtggataccaacacggttaaaccgtatatcgtcgggtatgctaaaatgcataacctaagccgtgttagctttgttgcatattacgatagtgattcaaagcgtgagattgttaatgatatcgttcggaaaggtcattttgatgaatcggaaattgtgtatctccgtaccagtgaaatgacaaaagaaaaagagatctatgatgcagatcgcgaaaaatcaaaagcgctatatgcaccgaaaaattcagaaccgcgcccaaaaaccccgaccgtatatcgttatgagttggatagtaacggcaatctggcaaaaacttctctgtttatgacaaaatcagagtttttatcactggataaagccccaggtgttcggttgtatggtattgatgaatatagccgcttagatggtgaaaattccgggttgtctatggattcagcaatgaaagaatctactttatcgcgtatcatgcgccatactgggatccctgttgtgtttgctatacgtaacagcctctggaagtggatcccggattcaaatctggtatgctttgatgatatgctgtgcaagcagtatgttaaatctgaaaaggcattgaaagataattgcttgcctggatggattgggaaggatcactcaacagaaacagacgcattgcatagccgtttcggtgtatcgcttgatcggattgtgaaaaaccgatataatgaaaaactgtataagattgttgataccctcgaacgtatagtgtgtctggaagggtatgagaaagatggtaaaaatctttccagggtgcgttgtccgattctgcgtgaatccgtagcatcaatgcgcgttaaacgcagcaatatgaaaaaacgtgttgatcaggcatgggaaatctttaaatcactaaacccgttactggcttcacttgttgaacatagcgattcttattcaattcgtccgatttacaacaacgaaaagaatctcagtgagtttaagaaattaatacggtggaaataatggtcaaaattctcgacgaagtacaacagaaagctatctataatggatggttgacgggggcaagtaaaacagcactagcccaacagttcaacgtaagcgcccgaaccattgggcgcgttatcaaccgcaagttagcggaattccctaagaaaagggatgtaaaacaaacgcctaaagtatcagacactgtaccgcgtatgatcggatctgaatcgttcattacggttgtatacgaagggcgcgttttcatggcgggtgaaacacatccgaactttaagaaagcgcatgaaatgctgaaagctggtgatgtcaaaggtgctgtaacttgtttggatactcaagaagcgatccgaacctatagcaaaggcaacattaaaatcattggtcatcagcttctatataaagatgtagtgtttgattctgatatcactcaacgaatcattcgcgaaatgtataacgatcgtccgtatgaacatctggtgaacttctttgaacggttgatgcgaaacccttcacgcgatgctgtataccagctttatgggttccttgtacataatgacattgaactgaccgatgatggttgtttccttgcctggaaacgtgtgcgcgataactataaagatctcgctactggcaaatttgataatagtcctggtgtgactgtctccatgcctcgaaacatggtagacgaagataaaacgcgcacctgttctactggcctacacgttgcggctaaatcataccttccacactacgggggcggtgttggtagagtcattcaggtaaaggtggatcctgctgacgtggtagcgatcccagtggattacaataacgcaaaaatgcgtgtatgccgttataaagtcatgattgatgttacatatggttttagccattactaactaaacaaccgcgcccggagagttctgggcgcataggagactatcatgaaatttaaaaacatgccttcggctaacgaaactcgcgctagtggtgaatctattctgaaaactgcccgtgaaatgtgggccgacgaccggatagaatccgggaaaggttacgtatttcgtaaaggatttggtgcattttatgttgcaaccacctttatagtagggtatagttgtttaggaatcgcgtggatgcaacgatatcttgaacgtgctgttctttttgtgatacgttttctgtttacattgatcagcgtagtgattagcatcccatttctgagcatcgccttgtttgttaacgtaaaaacaggcgaaattacaaaattaggcaaactggtatctaaaaaaatatgaaaagaattctgacaagacttgacattcacaaatatgcaattaaaattggtgacatgaaacgcggaaccttcaagaaattcgaaggcgtggatctgaaagaaaacgggttttacctggtagttgatgataaaacagggcgcgtagtattccgtttctacgtagcaccaaatcaacgccgtaaaactggtgctagtcgtactctgttacgtatcaagcgccgcgaacacgaaccgtctgcgatggttgcgatgctggaaagtgcttctttgtactatgtagcacatgacaaaatcaaaaacctgttcggtttcccgaacctcaacggatcaacgttcgaaagtgctattcaaatgcgttatggtgctggtgaaaactacaccgagtggaaccgcgcactgaatgacatttatgattttgaattccagccgtattgatgtatactgattaaaactaaccaattgagataaattatgaaactgtttaataaaattcgttctgtagatgaaatcgtagcaactttcgacaaaaccctgtctgaactggaagcgcgtattgctcacgataatgagcaggttgcacaggttgcagcagatcgccaagcagcagaagaagaacatcagcgtaagctggcggaactggcttcaaaagaaagcgatcatactgcaagcgcaacccgtgccggacgtatcgcagacaagatccgcaaactgctggattgatacaggggcgaaagcccctaaatatttttctttaaggggcttatatgaataatttggtagcgaaacatgcatggattaaccgcgcttctactcaccgcgatcgcaagcgagcatttaaagaagcaaaacgtaaacagaaacacaaaggtaagtgtgatgaaaaccgctttgatcattcttgaagaaattcctgaaaatacaacgctttacaaagtcgaaaccgacgatagcgaagtaattgagatcctcaaaacagcccacgggcattatgtaaacggttccggtaacaccaaagagcaggattatgctgttgatgttgttaaccttatgttggggccgaataccgatgacaacctgaaatgggcgcttgaatctaacattcctgaaaagtatgttggtatgttctatcagtgtaacatcgatagcaaatcaccgtttgaaccagaaaagaaaatcgatctgattgttcgcactgggttcttcttatgagtatacaaattctgttcagtaaagaagatccattaggtacggaatcatcggttcagcgcttattctggcatacagattatataaaaaatcgatgtcgtggcccaaacaacacatggggaagcaacaacgatattgacaaagcaaaaatttatcctcgcggaaaggcgtactggaaaatttttgatattcatcttcataaaacaatgaaagattcgaatgaatgatgaaaaagcccttgacttcggtcaggggcttttgctatattagccatatcgaaacgagataccctttaaggagaaataccatgactaacgcaaccgtagttactaccacttacttcatttcttctggtcgtaaaaatgcaatgtacaccttgcgtgttgagcgtagaggtggcggttatacttctgataactatatctgcaacttatctaccgatccggagaaagcggaagcgaaagcgcgtgagtatttcgaccgtgtttcagcccgtttaactgaaactgatactttcaaaatggtattccagggctttgcagatttcgatctgttcgaacgtcgcggtaaactgtcagtgttcgatactgaaaaactggaactgctggaaaaagggatcatgccgattggcaagcgtaaaggcgaagtaattgcagaaatgccaatgtttactgttctttggtgggctgacaagtctaaagaagacaacaaaaacagccctgtttttgacgctgtgtgcgcctactgcatgggtgttgcactggagaaggattatatcgccaaacgcgaagaaatccgcgaacagtgggaacaagagcgtcaggaacgcatttctaaagctaaccacatcggtgaaatcaaacagcgtctggaaatgaccggaaccgttgagaaagtgatttcactgggatatactcaagtttcttactacacttctgtagaaagattcatgaccaaaattaatgttgatggtaatgttgttgtttacttcggtaataacattgcaaacgaaggtgatgaaatcactttcaaagcaaccgttaaagagcacggagaatacaaagacgttaaacaaaccatcgttcaacgtgtaaaggttttataatgacatacgaagatatgcttaatgaagtgtgcgcgggtaaaaccgcgtaccgcactaccaaccctgatatgattgtgtttcgtgaaggggatacaatcatcagacgtacacaccgcaagtgtgaagtaaaccaggtattcattgccacggtagaagaacaaaaggctactgattgggatatcgtcattgacgaagaaaaccacgatgagctagatcatccgatattcattttgagtgaaactatcggaattcgaccaaacatgcatagaaatttttggaggtatcaatgacgttcgatgaggctatgagagccgctaagagaggttgtaaggttgcgccaataggtaggccattcttcgtgtattatcacgacagcgctggatacaggcgggttacgttaggggtttcggcaaggaatgaagattatgttccggatccgtgggacaaattgaaagtttgggatatttacgagaaaaatagcccggtgatgaacttctttaaagcaatcaaacgggctattggaagaacacacaatttaacaccagcattacgttaatcacctcactcgacctaaaatacgcgcggcctgtccacatatgatgtttagcttcatatctggtatattaggccgctttgcgtaccattccatcaaaaccgatccagaatagtagttatcaagattaaaataagggcaactaaaagtataagctactggcacaaaatcacgtgtcggtaggtaggaacttgctttagtggatgaataatacaagccatttatatgattcgtgtactcttcggatgttttatcgatcggataaccgccgaggtttttaggatcgatctgggatggtaattttccctgatattctacaatgtcaacaaaatagtttatattctttggtctgaatgccaataccgctgaaaaatccgcgttggaagtaagatgaactatgctcaactgttccaacgcggattgattaaacttttcagttctttccatttcgatagcccttgtatcgactacaagggcaccttttatcatcgggaatatatcagtccatttgtaccaagttactaccataagaaacataaccattattagaattatttttatcagcaattgtttccatgttttcacacccatcacaaacgagattacccggtcaaataaggctagtttatctacgggatttctctcagccatttttataagactcttcttaggttactatacgtatatttaggatacaacaaaaggctaccatacaggtagccttttaatctatttaatattatgaggtgaatttgttggtttacctatcaaacatattctaataaagcaccaaactggttatccattctagcctcaaaatacccattgagaccgccagcgttttcacatctatatcttctccaaccatcactcatagtagttccgctgaaataaacatcatactggtctccaccggatgcattaaatatagacactttaactcgcctatcttgaccattccaaatagaaaggcaataagggtcgcctttgatatttgtaatagctactaatgaacccacatctccaccagggaacgcattcagcgtcggttggtttgcagagtctcctatgtttactgctaaccctcttttaaagaatcctctatatctagatggatcaccagaagaaccctgtgcatagttaattctgaaaattaaatggaatacgctttgtccaatcatattagacatccaaaacggtgtccctattcttaatttggccccagcttgagccatccacgactcaccagtttcagcctttgctgaacttccgacccacggccctgttactgccatagttatttctcctaaaagatggggccgaagccccatgcattatttagatttaagttcttcaatttctgctttaagatttttaacttcggcagaaagctctttaacagattcaacgagaagtgcaattactgagttataattcagacgaagcataccgccatcttcttcattatcttgagtaactgcttccggtaagatttcttgaacttcctgagcaatcaacccagcagaacgagtagtaccgccagaagtgttatgaagttcataagtattaccagataatgtttcaaccttttctaaagcgttttcaataactttaatatcagatttagctctacggtcagaacgaatctctacgttatcgaatgacccgttgcgagtacagaagaagtcgccgccagccctgaaatagaaattgtcatctcgaccatagccgttaacattaagaatagcctggtgataatttcctacatattcttggaagtataaggaaacataagcaccattactaaatctacttgttaagccagcggtatttaaatacgcgccacttccgccgccagggtaattagtagtactattaacaccattaaagttactaatagcacctgggaattggcaagaaccactgttccagaaattccacgttggcccagagacaccacctgctcttatactaacgctaccaggctcatcagcccaaataagtcctttttctgtaccatcagctttacggaagaccaaatgactgttaccagtgttctggacgttaaccgaagttgatacaatgaactcttgattaaatctagcccttccatcaacagttaaaacaccattaacagcagcgtctcccgtaacccaaagtgatgtagtttttaactgatcgcctgtaattgttaaccgcccagttacagtaccacctgctaacggaagatacgtgtcgccagcattactaatagcagaagcaaccttatcatcaacatatttcttgttggtggcttggttattctgcgtaggagcatcggcaatttgtacatacttggtagtaggaacaataataccgccgttagcattaataacaccattaacagtcgctgcactagaaactgttagctgtctgttaatctgggcatttccgtaaacagtctggtttccatcagcatctactttgaatatatcattaaacgtatcagcaggattaatttggttgttggtatttgttgataccatgatagtaaacgagttagatttactaatagccatttttcctggcataccacttttcttgactaaaccaatatcggtgtttttgccaagaacgatcattctgttatcttcggaaacgctcaagttgcctgtgattttcgagttctgggcctcgaactcaccaccgactgtcattttaccgttttggtcaataactgtggcttggttagaattatcaccgtttggtcttaaatggagtgcctgacctgtttttgcataaatcacaaaagcacctacagcggatgaacgaacgccagcgccataagaccattcaagcgaaggctcgttgtacacgttggcttttactctaatctcagtaccagacgaatcaccgaagggtcgaaaagcaatatatttagccgaatctgtagcagaagcagaagctgacaggattaacgcaccgagactaccaccttgtgcttcacgaaccatagccccatttttaaatgtgatggccgggtctgcattactaacgccgttgacattcaatacaccaaatgccacagattgccattcaccaacaccgaggttattacgagcggcagctacagaagttgcaccagtaccacctaaattaattggttggacgccagcaacaacttctttccatgcagaccatgagccgttttgtccgtagcgaacatacgtaccttcaacgccgccgttctttgtagtaaaggtctgcttacacgtccaatcagtatcagaaattttacgcaaagataaaacttcaagaacaaagttgccatcagaggtaggtttattagctatattagaaccaccaccagatgagaagcatttatacatctgacgagtacctgggtcggttcctttaatgacaagaccattaaggtcaacagtcttatcagtaatatcaactgcctcttcggtgccgcgataggtctgattaaaaactaaatccccttctacctcaagaccgctggatttaactagaatatatttactaggagctggagtagcaactgcatcttgataaccaaattgcacgtgtccttcaggagtaactttaagcattgctacggtagcaccgctaccaactttacgagcaagggttaatctgctgtacttgtctgagttctctgaacctaaatcaaccatcgttccattagggttttcgacttttaagttagcgttaatagtcaagttaccggtcatggtatcgccagcacgagcaacagcccctaagtttgtacgagcagcatccgctgtacttgcgcctgtaccacctttagcaatagacagaataccatcagtaccattgtcaaggttaggtttattcatttcgtcatagatacgaatagccacactctcaactaaaccttccggagcagttgcagaagttgtgtaaccgttaggcagataatactcagtataaccagcgatagacagcagagcaactttaacaccaccaataaacgcgcgttgagtaaaccacagttctaaaccctcagaggtacgaaccagactataacgcatttggttagtgttatcaattccaggatcgccgattcgacgaatttgcagataagaactaatgtttgcgcttgttaatgttgcgggaatgcttctagcgctacaatcgataaagtcgatagatccacgcgtagaaccatagttaccgccgttagtcaccatcagttgcaggcgactctggtttgatccaggatcttttaaaagagcaactttagtccaccgagcttcggtgcctgtagatatagggaaattatcttgcttaagttggcgctcgttttctacattagtcagaagagtaccatctttaccagggcctcttccactcatagcataataaacctgggaatttctgaacgtcagattgccgtcattagttaattgaagaacgccagagcctctcaagtttttaatgtaagcgtcattagcacctacacccatttctagtgtaagagtgcttccattcgaaattttaacagtcttgctagttaatcttaaatccccaggaagagtagtattaccagagctatcaagtaagactaattttctggcttctacgttaccagcaccgcgttgtacaaactggattgtttcagtaccatcgtcaatagtaccgatttcaagaatgccgttattgcttgtaccaccggaaccgatgtaccatccatcattgctggcacatttaccgacgatatgacgagttatttcaccacttaaattctcgttggtgaaagtaatagttttaccttccgctacggtaacggtatcattaagagcactaggcccatcaactgttaattttttggtatttgtttctgggatacctttacccgctaactgaacgatcgaagaaccatttttcgtgtaaatggcataatcagccatgttgatcgccagttcaccatctgcaagctgacttgtagtaggtgttttccccgcaactgtgctacgtaggaattgaattttttctaaatcagccatgtttcaccttaataagatccaaaatctatgatagtccctttagtaattacctggtcgagccgtggtacgtgttcgggacgggaagccgcgcctgtgctcgcgaattgcggggcagttaatagccctgtcattgtatcgccagcgcgtaataccctgctattagcatttgttgtgacattatttatctgtccatcaacataactttttcgtgttgcatgacttgcgtcagtagggttagcggttgtaatactgatttgctttttaaccgtaatattaccctgagtgtttaaatcaccatttcgagcgttgatgactaatacgcgaccattagtaccggaagatgaacgaataccaataccataccatgatacaagatcaatgttggcttttgataatgtcgcgccatcaccatcaccagaatataaaccgttctggtcacttccgcctgtgaaagtagcgttaatttgtagcccctgtttaaaggcaactacacccaaatattgaccaccgcttgctttagaaacgaagtcgttatttgatgcttgcggtttatcgttttcagtataaaccttatatccgcgataggttagagtattaccaaccggaaccagcggaaatgtgccggagtgccaaataggtaaacccccgactgtagaaccagcttttaaatctgccataataacccctttttacatatttataaggcccgatgttccgggcctttgtttatgcatcaacttcacggaattcggaagcagaataatcaccacctggataaaccttagtattaggcaattcaaatatatacggtgttccgccatcgatcatgttgttcattctgataccgttaaccccaaactgtgcagcaaagttttgatcagcttcggcagcagatacctgaaccatcacaaagttacggatcgcagataaactatccgtagcgggtttaggataacgagatacagcaacgttaaatccatcacaaccactagggatcgtatagaactgttcaaatcgtaaccactcatcaggtttatttgcaggaacttcaatcaccgatgatgaagtttgagcagtacccgtaaaccatcgaacagtaacccttgttgttgatccagcatccaataatgctttgctggcgtaaaaatcaccagcaatcatcatagctaatccaggagccataccataatcagccagtttagagatcactgggtttgcaacaggatatactttatattcagacccattggttgaattgtattcttccgtatcttcaacagatcggaaaggtacaccagttcgcccaacatcaccaacgttatcatagacaagatcgattgatgcgcgtgaatcttcttttaaaactccatcgttcgcgtaaaacgattcaatcagtatacgagattttgaagccccatacaatgcaacatatgcagaatttgggaatctctgagcgaaatcagcgccttgccacataacggatctgtttttagcaaaccaatcatcaacgatttggcttgttttgtattcaccgttagtcattatcaaatacagcccagaaggttgagcatccatatattcaacaaacgctttgtttgcagttgctgaattatcattcgataatgtgaaggttttaattggatcaactacagcattgttaattctccatacgttgatcccaacactaggcggtgtccctaccgccttttgatttagtgtaaactcatactgattaggaaccgcattgggatgtgttgcctttgcggttattctgtaagttacgctgtttgtttccgatagaatttgcgtttctacaaaatcggggccgaaccccgccattaagtttgacattatgccacccactcaaatttaactgtctgagtaaccggatctgggtaaatcttaacattaccaactttgatccaatcggtaacagtcatgtttttaaccgtagtaccaacagcagacgttgcaccaatctcaccagcagtaggcgggttgttgctagtatacatgcggccccaaccatcaaatttacccgtaattgggttcatttgacggatccagaaggattgcgccagcgcattaacaccagtaccagaggtcggacgaggtgcccaaatctgataagtgaatgcagttccgttaccaaactgcgttaaagtacccggtgctttaacataggtataacgggtcacaatcatgatttctggattaatcggatctggttcaagaaccggaaccgcataaccaggaagcaagttgtattgtgccgatgctgtgatctcagccgtccagttgcccctggatgcttctgttactgcatccagcgttgaccaagccgcttgacctgcaatgataattgaactgttgcttaccgtcaagcgcccagacatcgtatcacctgctttacgtacatacgtaggattcagcaaggtttgcgcgttcttctcagtaaagactttataagagttccctgattcttctgccaaaatgttaccagcgtccgaagttaggatcttagttgtcttgttgttcgtacccatagagagaacagaaccagcagccgtgatcactgtatcattacccagagtcactttgccaatcgcctgaatttcaggagcctggaatttaacgttagctacaacgccgcgagtatcattatacacagaaagatgaactgtgccagtgttacccgttgagatcattgcaatacgcccagaggatgaacttgcttgaattgaccagtcgttagatgaaccgccattcaaacgaagtttacccatcgatgagccatcaccaacgttcagatctccactaacattcattacccggaaactcgcgtcggcggttgagttaatgttagcctgtacagtggtttctttcgttagagtcaatgccccgttaaccgtctgattaacatcacgacgaatgaactgggaagaatccaggttatccagtttatcagcatcaaccgctttagcaccgatcggcagataatgtttcagcgtcaggttcaattcataaggagaaacagcaacacctacagaggcgtaaccatcatccggaagagtagaaccagccacatcattacccgaccaagtaccaagccccttagacagcttcacagtaccacgtaccagatcggtagcttgccatgaagtatcaacctgaattgtatttttcaagttcttaggagaaacagccttgtttgcaacggtgccagcggtagtttcagcagccgtagccacctgaatgataccttctgcgctctcagtcgctttcttagcgtgtaacttcttaggggtgacaaatactgtatctaatgtccctgcgttcgtctcagactgcgtagcaacgcgtaaagtaccacgttgagtttcagttgctgattgaataccgatgttaaccgtagtccagatagtaccagattgagttaatccgtcagcggtagcaacagtaatatggcttgtatcgtccaaataacctttcagtttagacggtacgatcgctttattcgttacagtacctgctgatacttcggcagtggttgcaattgcaatgatacctgtcagcgattccgttgcagcacgatcgttaagcgttttaggcgtcaccgctcgcgtgtaatcagtccctgcgttggtttctgcctgggtagcaatctcgatcaaaccaatacgcgcatcagtagaagttttcttgtgtaacatttccggagtaacgacggtcggaatgttagaacttgcaacagtaccgttaataacttcattcaggtttgccagccatacagcaccggattgtaattcagttgctttatactcacgcagtgttttaggcgttaccgctttttgataatctgagtgatcataaattccagtaccagcctgagcacggtctgtgttggtgtttgcagtaccaccagtagcaacaagggcaaggataccagtcaaggtcggcgatgcaatacggttatgcaactttttaggggttacaatagtaatatcatcggtgcttccgtttgtttctgcctgagttgcgatttctgccagcccacgacgggtttcagttgctgttctttcgttcagcttcttaggggtaacaatcacatcatccagataggtatcggttgaaagtttgttaacctcagcagttgttgctaaccgcgcaataccacgacgggtttctgtagcagttttatttgctaacgtcatcggagtaatagcggtttcgtcgttcgggttatcttccaagtttttgtttacttctgcctgtgcagccagagcaataacaccagtacgcgatctgttagttgcatcaacacgttcaacgattggacgataattagcaataacccattctttcgtagctttcaaataagaaaactcgatatacgggaggtaatcgctaccagcattaaatgctaatgaagttacactaaaccaatcatcaggcggataatctttgcgctgcgggaactgcatcatatttttgttggttcggatcttatccgtagtaccatctttaactttgattgtacagttctggtttttacccatcatataaagggatacgtaaacgcgatcaccatcagcaacatcagttggaagggtaacagtaacgtttggtatagtcccagaagggtttgcagtaacaaaaacgtaatcgttaggaactgcgtttaaatcactatagatacgacgcagacgaacacggttatcagcatcatatactttccattggctattctgtgcatcaaagatgaacataccaaagccggatttctggctacttaccgaagtaacaccagtacttgcaccatcagtaatagtgtgtccactacctggataaatctgcaaaacggctacgttgatagagttcattttatcagcgtcataggttgtgatcacatcaccatcatttgcatatttcggcaactggagagtgattttacccgtagcactgttacggaaaactgtcataccagattgtaactggaatgaacctgttccggttgcgttcacgatctcagaatcgcggttgtccagagtttcagcaacacgccatacgttaccgttatagataaacgttgcgatcatgtacgggtgagtcagtctatactgtgctgattgtacagtacgtaaacggatctgacgggtgttagacttaacaaggatactgttcacacctactaaaccaccgcaatctttaaacgtgattacgtcgccctctgtcgggttgtccggcaacaggtacagaagttcagtaaagcgtccatcagccataatgtaactaccagattcaataatgctaccgtctggagtggttacgttactataaacccatttcgggtcattacgagttgcgatccattttgattcgtcgaaagccccagcaggggaagcaatattctgttttgcgtaccagatacgacgcgcataaatgatcgccatgtcttgagaatagccacgggtcgggtcatactgctggattccgttaaattcattgaaaaagtcaacgttaacgccgtcactcagcgtattacgatcagccttcccaacgttgataactttttcaccagcagcatcaaggccacttcgtgcgcggaatgatttagctaccattatcttttttcctatattgtattcaataccaatatttatatacaaaaaatggcccgaaggccatttaactgattatttattacttccgaaccatctttttatatttcttgattgtttcgtctgtaatctggtttcgcttatatagaggggttacaccgaacgcctcaacaccacgttcattaaggatcgttgctacgatttcctgtctgataaaccagcgcttaaccttttccggaaactgttcattgatgcttttaaacagtttggcttcccaactatccaacgtttcgggatggataatatgatcaaacccttccagaaaatcaatcgttgttgcgtgaatagcgtttgctactttgcgaatgtattctttattcatgcttcacccaaatactctttcaattgcatataaccgccaataaaattaccatctacaaagatccgagggtaagtaaatgccatgcttcgactacgaacacgtttcgctaactcttcaatgcggggtctatcgtaatcaaaccccacactgttatttgctggctttagaacagaataaaattcgtattctaatccatgctcatcaagtaatttccgagcttcaatacaaccataacatttatgaagcgattctggaataccgtaaatctcgattttcatcaattgctttccttcgtgccggagtgattttgctaatgatatctttctttgtatcagaaagcatacgctcaatcaattccaccgcttcaagttgttgatgcagagaaagaaggttgatgatttcctttttctgttcatcaatagcagcttccttgtcaatcgcgtacagcttattatcaccgaaaacatgctgtaatgcaaattcaagtgcctgtgaatccgtcggcgctggtagtacagaaatcgaagtgatccgcttgacaaaaggataatcaaatcgcagatcattgatatcttgttgaacaggttttacagtcatccacattttaggatcggaagatacaaaatttaaatcaggcgcggcgatttcttctttagtagcgatcttcggttcttcttccggcaaatcatatggtttgaagtatttccagatatggctagggatctcatattcgaaatcatcttgcagaacataagcaatgtcctcagtatccccaatcgcaatacgatcgattgtgatatagccgttgtttttgatcaattcagctaaagcatttcgccaggttttttctgcaaattctttagcgtcaatgttcagggtataagatttaccttctaataattccatgtgtcacctcataaaaaagggtgccggagcacccagtttaatttacttgcttacttctgctacttttcgagcagctttgcgaaccaggtcggaagcagtacgcagattttgaagcgcgtcatcatgggctttaaccgcttcttcaagctgtgccattgcttttgcgatttcttctttcttagccgcttcgtctacattgatagcaatagcgctattaccggaaacgctaacaggttcatcaacagttcctgtcgccagttcacggaagaacgaacgttcagaatcaagcaggtagtaaccaacttttccggtctgggaatcaatggtttctaccgttttgctcaattgatgatgaccgagcgaagtcgtatggtaaacggtgtatacaccattactgtgttcatcggtatatgatttgatcccgtggttagcaccacaacgatttttaaattgctgcggtttaaccagaacatacgaacggccttcaacaaatttagtaggatccagttcaaccgacattgccgaaccaccatcaagcatttgatcaagatctgctgttactggtgcaacaggtgcgaccggagccgtaacgttggcttttttcggtttagctttcgttttcttaaccggagccgcgccaacttcgacgaaataacgagcttcccacgaacgcagagagctaaaagtcatttccggagtatgctcaattttgaaagtatctgaattggttttcgagataatttttacctcgttattcaggaatttttcgatctgtctcgcctggatagtgtttgcggtgttagatccgccgtgtgaattggtagtaaacccttcacggtcaaccagtttgtaagttttaccaaccacgaacgttttcagttcatttgcttgaactgtccacgggcaagaaccgcgccctgtattacggatggttttcaggggaatgttccacttccagcagtagttacgcgcttctttacgggttttgaaattcaggatcatgatattatctctcaattaaagttaatcgtcatttacgatgtggtaagattaccatagttacacattaggtcaagcaatatttttaatttctatcgaatttttagcgaattcgatcatacgttgattatctgaaccgcgaaacggctttttcgttggcaaatctttttcatacttaccatcaatcagaacatcaatgtaaggaagtagcttagaacgttctgggtcggcctgtaaagcctccagggtatatcctgtccataaccatacgtttttctttggaagttccttagaaacgcgctcaagcagttttaggatagtaggatagttgtcgcggtaaagcggatcgccgccagttaatgtaagtccatcaacatgcggattactcaacagagaaatcagatggttttctgtctcttccgtgtacggtgttccgttgcaaggattccacgtcgatttgttataacaaccttcgcatttatgattgcatccagtcacaaacaaaacaacacggatcccttttccgttgaccacatccatattatagatgcggtcgtaattcatgctttttcaccaaacagacgttctctgatcgcttcgtcaataatgtctgggaactgagtgttaacccgttgcattactgctttgcgtacagtaacttccaggttattcgagacgcgagcgataaacgcggcttcgtctgcaataatgttttctgttgcatgagcaatcgcctctttctcgatatctttaagaatggtttggcattgctgttttaccgattctttgattttaccagacagttcgcgaacattgccatagttgacatcaaaaacattggaatacccataacgtttttcgacgtaatccgagaattcagatttgatgatctgtgtaatttcggatgagttcggcattagaacagctaactgttcctggatctgtttgtttatttcttcgctaacacgcttaccaactacgctattcaccacgtttttgatgatagcagattggagatctacgcgagcggttgaaccttccggaaacaggcttaacaccgcatttgtgtctaatttcagttgaatcatttcatgttacctttcttcacaaggatcaattctttgatccgttcaacaataacgatgtattcccatttagctaacttttgggtatcacaccacttttgaaactctttcatagcctctaagtgacctttactccagtacatttctgcaatttcgttacaaagagtttcagtagcagtgtttttgattttcataacatcctccttagttgacaagaaggatgttactacattcagacatacaggtcaatgcttttatggataatattgaatgaaaaatgaaggatgtccttcgtagttcacatcaacagcaccaattttaacgattgcatcgcggcgggtagcctcttcgacaatctgatcggttaggcttacaatctcacctgatacccaatgcaatttgtgttccggatctgtagccccacagaaaaacagttcgatttcgttagcttccagttcacagcgtagatagttcaaattacgtgaatttgttttgttgaaaatcataatttatacctatttcaatagtttaccgcgtagataatcaggagcttttaaaattttcccgtcgtctacatacccaacttcaattaaatcatcaattagattgatagattccccagatgctgcatagaattgcaaccttcttttctttacgatagccatataaacatgattatacgtaggagtcattctcttgacaacaccaatcatacagagtctgttaagacatccgatataagatcggccagttgcttttgagtaatcttccaggcttccgcgtggtatagcagaaacaagatccttgtagtcttttcgtttccacgtccgaccaacagcacattttgttacaccgtcagccattttagaatttgggtgcttctcatcttcacgcatctttttatcttcgaggaatttctgaaatcgaatttcttcgagatagtcaatagcgttctgaaaacgattttgtctcttctcgcgttcagcaatacgggaaggaaataacttatcaaggatcttgctaatcattttatatcatcccgaatcgaatcaagaacaatgtaatctatcccattcactcgcttaccactgggtttacgatagcgaatgttacggcctttcatatcagttgcttttgaaatgtagaatgactttgtttcgcgtagccattcactccattcctgatacgaatcaccgacatttcgacgcactttagcgtataacggaaacatcacaaagcctttaatttcgcaagagtggatttatgaacatcgacctgtttttctgaatttttcagattacgttctgcttcccggatcaggtaattccggcgagagcgtaacagattgagaacatctttcgctttacgggcgcgtttcccgaacagatgacaagtaccaagattatcaagcatgttcaggagatcatagatttcctttgcttcatcttcttttggtaataacggtttctctttaacaacaacgtgttttttgaataattcacgatcgctattagtgaaaatgtaagattctgattcaaactttgtatcaaagtaatcagtaaaccctttaacaccgaatacgtcatactcagtaactttaatagggaatactaccttagacaaatcattagctgaaaacgaaccaccacgaatagctaagtttcggtatgcagtcccaaagcacgtttcatcacgaaaaacaaatttatcttttgtccaatacattataaattcctcattttgcgccgctaatgagaacatctttcatttgttttgcggtgcggatagtagttgccagttctaaagagacatcattacgatatgctgtaccgtcttcacacagaaccaaaccaggacggcccttgatagggttgatgacttcaacgcgagttggatgattttcaactttgtagcctaatgcaaacgcacatgccactacatcggtcattttcttagtcagtttcataatatgtctccttttcgataggcccaatataacaaaagccctcaaccgaagtcaagggctttttgattaattttgatgcttagtgcgatgcatcatttctttgttcttaccttcgttgaacccacggacagcgggagcacccaaatagccgcatgtacggcgcgtgacgctcattttttccggatcctgattcccacaatgggtacaatgaaaaccgtcttctgttggcttaaattcatcatcagagccacattcaaagcatttatcgaccggaaggttagttccgaagtagtccagtttatccattgcataatcccagactttttcaagggcttccaggttgtttttcatatcagggaattctacatagctgatatgtccagcagttgcaatgtaatgataatcggcttcatagtcgattttctcgaaaggtgttaccttgcggtcaacgtccagatgaaaactgttagtgtaccagcctttatctgtgatccctttgatacttccgaatttctcatagtccagtttgcagaaacgatgacatagagattcagcaggggttgagtacagactaaacccaaatccggttttctttttccatgcttcggtcgcagcgcgtagatattccagaatcagtctacccatgttctgagaaccgatccggtcgaatgggtgttgtccagatccgaaaagcatcagagtttcatgcaatccgatgtatcccagactgatagaactgcgtccatttttgaacaattccagaatttcatcatcgggtttcaaccttacaccaaacgcaccttctgtataaaggatcggggctacactggctttaacaccgcgtaggctatcgatacgagtcatcagggcttcaaagcacagttccagacgttcatcaaggatacgccaaaatgcatcatgcgcgtcttcatcttcctgtgcttcggcttcaatcgcaatacgaggaaggttgattgtcacaacgcccaggttattacgtccatcaagaatttcattaccgtgctcatcattccacacgctaaggaaactacgacaacccataggagatacaggaatgctagagccagtaatacgacggttattagccgcgctaataatatccggatacatacgctttgaagcacattccagggccaatttcttaatatcatagtttctgtcttccggattaaggttaatccctttttccataaacataaccagttttgggaatacaggggtaatgccttttttacccagtccacgaatacggtttttcagaatcgctttctggatcatgcgttcgcgccaaccagtacccataccgaaagtgattgtgacaaaaggcgtctgtccatttgcagtatgtaaggtgtttacttcatattcgtatgactggaacgcatcgaatacatccttttctgttttttccatcgcatactgttttgatttaggaaccccgtaccaaacagcatctttaaagtgtttgttgtacgtcatttcaacgtaaggggccagcacctgatcgacatttgcaaaggttgtcccgccgtactggtgagaagcaatctgtgcggtgatctgcgccatgagagcggtagcaacaccgatcgatttaggcggttcgatatcagcgttacccatccggaacccattttctaacatgcctttcaggtcaacaagacagcagttagtgtatggggtgaacgggctgtaatccagatcgtgataatgaatatcaccggaatcatgcgcctctacaatatgtttcggtagaatatggttacgcgccatgtgtttagaaacgatacccgccagaagatcgcgtttagtcgggaatacgcgagaatctttgtttgcgttttcgttggttaattctttgttactaagagtcatcaaacccttgatatcacggaataattttccgttttgttcacgggcgatatcacgatcatgacgatattcgatatatgcacgggcaacagtcggatttgtcttcattaaagattcttcaacaagttcctgtatgcgtgaaattttcattggtttgtcattgcggatctgactatgcaacacaagcataattgcgctgtcttcatccgtcatcgtaccgccagccttatacaccgcgttacgaattttttctttatcgaatttgacgattgttccgtctcgtttttctacattcatttcgttgccttatggataatatctaaattatgtccgatttcgttaagatatttgattagttcaactccatcaacaggtatatcccgtcctacaatctcaaggagtttccaaatatcaataacggggatagaagaaaaagcagtcaatgtgcaaccgcgatcatcaaacatcggtctgtcttttggtttgacataacacaaatcagattcacccattccaagcatccaatcatgcagagatatggtatttttgtcagtggcggatatcaacatcatcagctttttcttctgtttcgttgataatcgagcgtttagatatttcatttggttgccttcattaattgtcttctatagctctttgctaaagccttgcgatcctcagtttctgagtactcaaagcccatagaaatcatttcggctatcatatccgatttagtcaggcgtgtaaaccatttaaccttatcgggtataaatttgtcgtgcatacggttttgtgaatagtcgcgtttgaggtatgctaccaggctttctagccattcgatgtaatcaacatcacgggaaaccagaccagaacgattaaatttgtgctttacaataccttctgtaccgttgcataggttacataggaggccgcgcacacgtccggcattagagccagatagagcatgatcatggtcaaggtgatgtttttcaaggtcaccctctaaagggcgaccacataacgcgcacaagccgttttgctgttcaaaaagagcttgtttaatggatggataatctttcttagtaatacgtttagtgagcataataacaccaatcaaataaaggtgttaatatttatcccaacgtgcgaacgtactcacgcagttggtcaaagccgccgatgtgcttaccatcgtggaaaatttgaggcatggtcagtctacgagtacctaacaggctttcgagttcagaaatgaccgtttcattcaggatcggtttgccgtctgcgtctttttcatcggctacagaaacaaactcatattcttttcgttttgcgtccaggagacgtttagaattcaggcatggagcgcaattgtaaacagaagggatataaccaaaaatcttaaacatatgttaccttacattaagtcatccagtgtttcagggtatgtatttacgtcgcgtttctggtagttgcacacgtagacttcttgcgttttattttgttcgtaagaatcagtatgctggcctaacagatactttttatcgaggttatgcacattatatttttgcatccactcgatcaggatatcattttgctttcctgcatgatgtgtcacgtttgataaaccaaacttgataccccgctcatgcagggagtcaaggaaagcatataactcgcgttcgtgatctgcgttccagaatttgttatacaccgcatcagtgatcagatacggaggatcgcaataaacaaaatcgttatcgttgatttcaatatcagagtatgaaccagaacgaaattcaattcctgtcacattctttttgaaatgttcgaaacgtttttctgtcataaagttgagggttcgttttcctacagcagcgttaaaatcgcctttgtcgtttgtccggttaacgttgctgaatgaatgcaggatcaggacatagagccataaaggatctttgttctggttgtattcatcacggaatttcagatactcttctttcttgtctttccccagccccttcgatgcaatcaattctcgcaccggagacaggtcaggaagcgttttaagacgctcatacatatcaatcagcgtcttatcataatcgttgcttagaacgggtttagggacgtttagcgacacactaaggccaccgcaaaaacaatcaatgaaacgcatgtatgaacttctttcggggaacagcttgaatagttcaggtaatagcgattgcttgtttcctgtgtatgggatcacaccataataactcataattcacaaagccctttttcaaattttgcaatggtatcgtacttgtaaccacgattcactataaagcattgagtttcacccaatttattgatcatgtcaatagctttctgttcgtctttcttacctcttaactgtaaggcaattcttacgatctcttttagtgtttcgtcgttgacttcttccagtttaaaggaatacccagcgattttagcaaaaagccccttgcgagctacaaggggaatgttgtcatagaaaatcacggttcctttgtcgtttttgcggatactaaatcccggcacggttcctaatttcctctaaagtgtcacgggcagtaatctttccgttgacatagtatgtgatcatagcatctttccagccttccggcactttctgttccagagtatcaatggttttaaagttaacaccatcagtgatagtcattaacaacccttttttactctttttccattcagcgccttttggacatttatacacaccagtccacacaccgttaattttgattgcgcacattttcatcgcatatttttgagtgtcgcgggtaacttcttgaagcaatccgccgcccataccaaacgcgatgttttcagacgcccaacggttagactccatccagttcaacacccgattgattgtttcagggccatgaatttcatcgccttgaatgatccttactgctgggtgtagtactttatacccttttgagttcactgtatagccaaagatacggcccagttcttcaagagcgtacatgatattgtctaccatatcgccagaatccggacgaactaccagagtaccgcccttagaaagaatagaatctttatattctgcgatacggcgaaccgccgctttaaaatcccaggaatcatacacacatgcatacatcccttcaccgaagatctcaatactgtttttgtatgcaaggtcttcgttttctttgccgtaagaaacggtagtggaatgttcgcgagcaggaattgaaataccagccgccatttcaccatcatcaaacgctttctgacaatcttcaaacagagagatagccataatcagcgcttctacggtatcagtaccgaggaagttatacaggtgagcgaggccaccaataccagcagattcagcagaagaggttccacgtgcgccgaagtcatgcaaacgggtacgtaataccatatcaaatgcttcaccttcgagatcggaggttttcttgagatatttcttcaacacttttttacattcgcgggatagagttgctacggttgaagggaaccatactcccctgatcgccagggtttctacgtgtcctgctaaccacagcgcatttttcccagcatggaaagttgcaaccggatttttaaccgctactggggttccttccggaatcgctctgaattcaagagggatgtaacccagttctgcaatttctttccaacctttgtagttgaagatttcgcgcccaaagtgcattttgtacaaccgattagcaaaatctacgttttccatagtcaccggacgtgataggatttgcgcaaggcggttacagccagccgtaactacttgatcaaatttaccaccacgagattcaatataaaacagcgcctcttcggagccagttggatattgcgaccagtgagaaaccttataggaatctacggaagtgatgatgctgttcagttcttcgaaagttttgttgttcataaacgtactccacgttttaggtttattttaaaatacccgatccagtcgttcgggatggattgtattgtgatatttagacttacaatccttactggtttttctgccattcgaacagaaaactttgtgatacgttgtctttgtgtgtttttctttgcacacagggcaaacaatcacagaacctattttagcagccttagccacttcatacaagttctttacatcaatttgtctttcttttgtgataacccgaccacggaattcagcaacaacagtttcatcacgtacagaaccatcactatactgaactttttgtttactactttttcgtttggatcctgatatttgagaggaacccgataaaagtttacggagttctaaacggtctttataagcaccacgattaacgcagaaatattcaccgtcttcttcgtcatcaaaatcagcccaatcttctaaagcctcagcttcatcgctcataatggttccttagaaataatctttgttgctcaacaggtaaacccggttatcgttgtagtcaatgtaagcatcccaccaaccagcacaatcaacaccatcgacttccaacgcctggataagaacactacccgctacgttgtcatattcgtacattgcatgtaatgcatccagcattgcttcaacattggcccgtaagcctttaccattgttagcaacaccttttgcttccaggcagtatccagcataagttgctttcattacgatttccatgatgtttatccttctgagttagtgtcttgtctacgggagttagaatactactataaccaacccccgtcaacacctttttaccaactaatgtaaaaagtgaattcacttacacggcgatctgttttcctttcaggaattttgaaaccgaacacttcacgttcttcctggtttctatacgtttgattgtacttactagccagagaatttgtgatcttagcggcgttgcgtttttcttctgtatcgaattttagcccttcttcttccaaccattcagaaactcgttggaatgcatagcgagtacattcaatacccagacaagagccgatatcgtgcttcatatcatagataaggttttgttgtgtcgcgtgtttcagaacaccttttgtgattgtatcccgcgcatgttcgatcatcttagcattctgatcgttgataatttctcttgctcgttctgcgagagtgggcgatcggccttctactggagtttcgccgtcagcaccgatactacgtacatgaatcatattttcacctattgcgttattaacagcccatctttcgtatgtttcacgaagtaagggcgcatgttcaattaccataaaaaatccaacgttgggggtttgatattgatccctaacgtatcacacacatcgttcaatacactttctttgaagagattgaaacatggaaccctgtacaacctagccaatcttacagcgatcgcggttccacctttaacacatccttcacgttcttccgcccaaaataaaacaaaatcagttggattgtcaagattttcacgaagaacttgaatcgtgtttcgcgcataccttctttgaacgtattcattctgtgtatcgaagttacctgctacctttctggcttcatcagcggctttctgtgtgtttaaatctcgaaagtcgatgatatcctttccgtttgagaaaaggccgttaaaaccgttctcaggaaggattatacacctgttatccggactatagtcaaacagaaagtgactatccataccaggagcgccgccagaataagccctaatcccgcgttcgttcaaagcacgtccgattttaacagcaatgtttgcgatacgttcaggaggtttacggctaccgatcagggtagccgcttttgcatcaaccagaatctgattaaaattcatggttcaggattttgccccatacagggcgaatcatgttttgggcttcggttacaaacagctttttagccattgctgggtcttcgaactgttcgaggaaaggcccatgattacggctgatttcttcgatagcatcctgaaccgttaagcccataatgcgaccgaaatctttcgcagtgatcgaagccagatccagtttcgaaagaacgtttttcacacggttctctgtaaggtaacaaacaaactcatcgagttggtttttgtctttttctgacagtgaaaccggagcattaaagcgggttgctttcttagctttcttctcagtgaatttggttgttttgcatttgattgcaacacgttcaccgtttggcatgaaagaaggtagaacaggtttcattacgaacccctctgcaatgttcccctcttcaacttccgagataggataaatgaattcaccgtagaccgtgtcatcgctaccaataccgctatttgctttattcacaaccgattcaaacgtgagaggcagttctttgatctcttcaaaagtcccatatcccaacaacggggccattttaaggccatgagatcgagagatcagagagcacagattatccggaaggaattcaccatttacacggatatcgaatacgtagaaatctttttcgccgtaatcaacatctttctgtacaccgcgccccgcaaattcaccgtagacttgaataaccaaatcatcataagttccggtctttttgagggtttcccacatcttacggatcccaggggaatactttgcaactactgctgaacagccataaaaatcttcggttggcttaacaacatcagtacgctttgcaggggtaacggtaacaccgtcatcagtgataaagctaaagttagcaccgtggatcttttcacgcgcaacccacacaccgccagtaagcccgttcataattacaccattgatgaacttaccttcataatggttagtcagagaagaatattttgtaaacataatttaacctttcattttcacacgtttttcgacttgataaagtgctttacgcagcaacttcacttttacttcatccagaatgacatcacccttaacgaatgcatcaagctgtgatttttcggcattagcggcgttgataaccgctattgtattttcttgtgtatatcccagacgtggattaatacgttccattgtacgggcatacgggctacctggtttattgctaaacatcttgccggaatactgacaacgttcagttgtcatcaatactttccaatcttccagagtaaggtcaaaagaatggttgttctttgcggcgtgttcatgcttgagattgtatgaacgcgcaatacgcagatccaattcaatagcagacgcacggcggcgatgctcgatgagttcagggctaagggccacgatctcaggttcttttgctttacgaacctcttctacatcaggtgcggcttgatttggttttacgtttgaagtagcaatactagcccaacgatccatcgcagatttacgcattagataatccccgcatcttgaaacgccagcgccatagaggtgttaagatgttcgcgtttaaacgggcgaggtttcttttctttcttcatcggacgtttagcacgttctaaattgtacacacgcttacgatgaatttcgatcgcttcgcggcgcattgcatttttaacagggagatttgcagaacggaacgcgcgaatacgttcaatttcctgtactacctggtaaatatcgccgttatctaacccatattcacgggcaatttcggcataacctttacgcaaatcattgaatttgaaatgaatttgcactttttcggcttgagacagttcggaaatgctacggtgtacaattttcatattattttcctttggtagaatcgatttttgcaactacattcaacacgctatcgtttcggctgtcaacattttttagaacaaaagttactaccgtatacactccagcgctcatgttgaaattgtcaacaaacgggatctgctgatcatcaagagtattgaccatttcttccatgtcatttggatggtcaacgttgatgaaaatactttccgatacatgatttttgtatcgggttccaattcgttcatcgagttttttacacattacatcaattaacatttgtttgtcaatgcctaaaacaccagagtagatcacatgatatagtttcatacaatatccttttccgattcattaacaattgcaaaggaaaggaatgtaaaagcaacccctaacccgaccatccagatagccgttaaatcaccatacattgatgaatacgcgcccatcacttctaagcgatatcccagcaagaaaacgagatacgccaacactttatcattcataattcctcacaaaacgcccatgctgcatggtaaacgctcgcgcctttatcttcattcatgcatacaacatcaaccggacacacaaccctgtacagaacaggatccccacctatagaacgcgcggcccttccagcgtatatacgagctaacccgatatcagcggtaaagaaaacacggtctaaatttttcttcctgcctttttcagacagagtatcagaatcacagggaggcaataacatgctttcaataccagcagcagtacacgaaccgtgatagtaaacaacgttttcatttctgcaatgtatcgttttcatgtatcctcccttaaaaagatgcttagattatatcaaagttataaatccatgcaagaaatttctcgatctacatcttcttttgtcttgttgacatacgccaggtattcatcggtatacattttccgctttttggcgattctttcagcagccgcgcacatttgagcttctgacggtttataaggcatcctttctccaaacccttcaacagttaggcgaacgagaggaacagcagaagttataatttcattaccatacgcatagccatttttagtaaatacagctttgttgaatctttcatggtgtacgccttcaacctcaacctgatcaccatagtaagcaatagtatcaatgcgatggttaagaatgatagcaccagattcgatgattttcagtgcagcggcctttccttgttcgcgagcataagccacgatttcataagaacctatatctatagcggaaccatgattaccaacgatgtaaaacatggaattaattagatgcttagagatataggcatatgttttatacatcggatactgttcattacgcagacacatacccgctttgtattcacgtcgtaactgcataagattttgaatcacttcatcaatacgccagccgttaggaaattccgcctttttctcacgtgcgatatggatcaaagcgtttccatacatcgcgttaaacgtcatgatccggatcccttcaacgtaaccatcgataggggcttgccacataatagggctatacttcgggtcgtggtcaggacgcattttaggggtatggtggcgacggaatccaacatgagccgcaaaacgatcttcaatctcacgggagtaatagttgaaagaatccatgtcgcggtcgcgggaaaagtctgcaatgaagcgatgtaaattgattttcatatcgtataccttatggtttaaagttcttccggcctatccgtcgaacacagtaaccatacaccactgtcagaaagcatgtcaataaataatagaaaataaactggagaattttacatgaagtcatttaaacaattcacagaaagcaccttaaccgaagcgctgatcaccttcgggggccgtgcttatcctaagttcggtcaggttgttattctggctggcggtgctggttccggtaaagggttcacactggaaaaactgctaggcatcgaaggtattaccctggacgttgacgccctgaaaaaacttgtaatgggtagcgataaactcgcagcagagatcaagaaacaaacgggccatgatgtcaaaacaatgaacctcaaaaacccagaaaacgtatctaccctccatcatgtgatcgccgacgttttcaacatttccaacaaaaaccaaaaccgtgtttattccggtattatggcagcaccagaagatcgtaaacctaacctcatctttgacgtaacgttaaaaggcatgagcaagctggcaagcatcgcgcgtgatgtcgaaaagctgggatacaagaaagaaaacgtacatatcgtatgggttatgaacgatgttcatattgctatgcagcagaaccagaaacgcgatcgtgtagttcctaaagaaattctcatggatacccacgaaggcgcggcccttactatggcgaagatcctgaacatgggtgattctcttaaacagtatatggacggagacatttggatcagttttaacaaagttggtgttgacagcgagatcaagaaatcaagtaacaaagggatgtttgttgttaagtcaaactacatcaaagttaaagcccgtggtaagcctcagaaatctgtagctgaactggataaggaaattgtggctaaagttgcagcatacgcaccgaaaactgacacttggggttgacattaatgattaaacattatagtatgcatacacaaactgaggaattgatatgaataagtttttctttgatatggatggtgtattgttcgactgggaaggttcatttgtgccaatgtatggcgaaccctctatgatgacagaagatgagttgaaaaagtgcaaagcaaaaattgccaaaactgatttctacgaaaatctggaaccaatcaaagaaggatttgaattattccatcatttaagaacacttggtgatgtagcaatactaaccagtgtcggtaaattcaattctgacggtgttgccgaacaaaaacgtaaagcattgcaaaaagtattgggttacgttccagaattccactacgttaaaagtagccatgaaaaagcagcattcgctggtaaaggaattctatttgacgatcgggcaaaagcggtgttgcctttcagaaaagcaggaggtaaagcaatcctctttgttggtgataagaaaacagcgcttgatgaattaaaaagattgtaaaagaaagggaaccattgcggttcccttttttgttattgattagcctttgcaagcgcttccgtgactagctgaatattttcttccagtgtttccgcaaggaaaataccaggaactttattagctagatgagaattgttccagatttcaagatgtttctggttgcgggaaatcagaacaccacgataggcgtgttctgcgaactgttccggatagtcaatgcgactaaaatcgagacgagagatccccagttcagcgcaaatcttatctgtatagttcagtttttctttcataacccaaagagggctgaccgcttccgcgcgaagcagcaaagtagcaggatcaccgattcggcgttggaaactccattgaaggaggtcgatcccagcctgaatacggggaaggtttttataaaaatcagtacgcaccaaagaagccgccatttcgtcatatcgttcttttggcgttccttccggacgtacaccgaacttatcataaaaagcctgagaaaattctgctaaagtgtcgtcgaaatcaaaaagaagtgtattcattgtttgccttattttattggtcaggatctggttcaggagcaggagtcaatgacaacagactaaccagtttaccattacgagattcgattacatgaatatcaccataatcttcaaacgcctctttcagagtatcaaactctaatttatatttttcttccgcataatcgcgccagtcgtcgcctttctcaaaagcatcaacgataatatcgtatagccagtatggaagatatgtaaaactggtatttctccacggaataggatgaaccgtagtccatttttcagttgccatttaaagcctcttagatttcactcattttatgaatatagccgtttcgtgaatcctggatctcacattcaccgttttccatgaacgctttcaggatcgtttgtacttcctcactatacttgtaatcagcataatcagttttccaatctttaccctgtgctttttgatacagaatttcatcaagtacccaataaccgatcggggtaaagctggtatcacgccacggaatcgggtgaaccgtccatttagaaacgagatcatcataattttgattaacagttacgacacatacagttgatgtgatggtatctgaattcgcatcagtgactacaactttatacgaacctgcatcatccagagccgcacttgccactgtaagagtatccgcatcgtctccaaccggagaatcatccttagtccatgcataagaataaggagaagtaccacccaatacagttacactaaggatcaatgcagaatcctgtgttacggaagcggtcgggcttagatttttatcaaacgcaagagcaggtgtaacgctaacagcacaagcaccagaagtttttctgttacccagtgaatccgtcacttctaccgtatatgaaccaacatcaccacttgcagccgcgctaattgttaaggttgcagaatcaccactaacaacagtagaaccacgtttccatacataggtatacggggttttaccgccagttaccgcaacagtcagggtaagttctttaccagtaacaacagattttgttgcaggtaaatcagtaccaaatgcgattaccggataagtggtcacggtgattgtatcagacgtggtttctgttgctgattcttcatcagcaccgtgttttaagatcagggtataatcgccagcagttgtaccgtcaaccgtagttgtgtaagtatcggcggttgcgcctggaatatctacaccatctttttgccaacgataggccagaaacacatcacccggatctagttcagtagtttcaacctctaaggtcaaagtttcgccaatcaaaagttcgtttttgttggcgctaattgttacagaaggaattgccataaatttaacctctttatgtttattggtatttatagccggagtattttaccgttacacgttccgcatttgtcgtagccgttaacacgtccatacccattgcattcaggacaaaacggagtagtaaccccgaaaatgttacggatcgcataagtggattgttcttcggtcaacccaacaaacccatcagttttaataaaatgatctttttgtgaagaaagcatatcggtgtcatcatcaagaatgagatagtttttacatccgaaagtatcgatccatgccttgatttcatcaccacgcattccagtgctatgagggaagttagtgcaagttttaccaatgatccgatacaatccccacggataaaatatttcacgtagattatgggtactgttgccgattctccacgtagaggaaataacgatatcacaattagcgtgattcactatccggcgtaagtgtcgtgcgcattcgatgtccatatgttcaccaaatttcatgcaccgcatattatttagaacgccatcgatatcaagaaaaataacgttaccaatccgctcaaatcttttaaacattcgtgatttaagttcatatttcacctaaaagaaaaggggccgtagccccttgttaatcaatagaatccgcgagcttcattatccagtctacgatctgcaatcatatgagcttccatttgacgagatacgtaatcaggatcacactccattctttcttcttcgtagttgtcccaggtatcagcaacccatttagaaccgttccaacgagcataaccaggttcagcatgaacaggataatttgcttccgcagcgtggcgaagtgcttcacctacagtgtaataaggagctttagaattgacgattttcttaacttcaccattagcccaaacaaacagaactgggtagtaagcatttttcatcatgttcattttgtatttccttcttcactgcgagagccattcccccgccttcgaatacaaatatactcgaacagcagggtaaggtcaactactttttaaaattattttttgaacgtgtcgaactggctatttctggtttcgcgtacagtaaccatcccatcacggtgcatgtaccatgccagtgacttgagggtttgacgcgctgaataatgaggacaaccatcagggtgcttataccaatccggattttgtttcatccaatcatagatccaatacggacacgtataaaagccagtattcgaaacagagcggcccatcatgatgatagacggggtaaacccttccatccatgccagttcatcagaaaccgtctcagaatcgcttgtaggagcttgtagagcgtcgggaacaatttcaatctggtcggcaatttccggagcaacatcaggaacagatggttcaccttcgtatgtaaccatttccggatcaggggagtcgatcaacagttccggtttttcttccggtacggcagcttccagatcagcaagcatattttcgaatgacttctgacggttcagtttgacatcaaacgtttcttgcgcgtaggtagcaagctgtaatttggcttctttttgttctaaggctttgaaaccttcaaccttttcgtaatcaatactcattgtagttctccaatgtttatcattatttagcctataaatattcatataaaccgtatataggatacacatagtggatatcgaagtcaaattccttaacactagtcatgtgcagattcaggcagaggctaacatagtctatgaattgcgcgactatttcagcttccagccgccaggttatcagtaccaggcaaaatacaaatatggtggatggaacggctacatatacttgatggactataacgggaaactgccctacggtttagcctatcttgtaacaaaattcgcggagtctcgcgggtattctatctggatggatcctaagatccacgaaacagaagaaattacccagccagattttgacaagtggttagaagaacacccagtatacgacggaaacaagcaaattgatccgtattggtatcaaaaacaatcggtgtttcatgcgattaaaaaccgccgtgctgtgcttaacctcccaacgtcagcgggtaaatctcttattcaggggttgatatctcgttggtgtctggaaaattacacaggcaaagtactaatcattgtcccaacaactgcccttgttgatcagatgatcggtgatatcgtcaactatcgccttttacctcgcgaggcaatgcttggaatacggtcaggaactgctaaaaacagtaatgcattgatctacgtgtctacgtggcaatcggctgttaaaatgcctcctgagtggtttcagcagttcatgtgtttgatggtggatgaatgccacaaatcaaccggacaaagcatacagaagatcatcaacacaatggatcagtgtattttcaagtttggcctttctggttctctgaaagaaggcaaagcaaacatgatgcaatacattggcgcttttggtcaaatcttcaagccagttgatacaaatcggttgatgcaggaaggtcaagttaccaaccttcgaattaataccatcttcatgagatataaagaggatgagattaagaaaatgaagggggctgattaccaaagcgaaatcaagtatataacatcgcataccaggcgtaacgcatggatctgtaagctggcgttgaaactggcaagggaaaaagatgaaaacgtgtttgtgatgttcaatcagatcaaacatggtaaatggctgtatgagcaactcaaaaaggtatatgacaacgttgtatacatttctggggaaacggggattgatgagcgaaacgaaatgaaacggatcgcggaatcaacgaaggggctgatcgtaatcggttctattggtgtactgagtacaggtatttctgtcaagaacctgcatcacatcatcttcggacatccttgcaaatctgctgttatagtcaaacagtcaattgggcgcgtactgcgtaaacatgattctaaatctcttgctactgtttgggatttggttgataacttagcaacgctggcaaagtccaaaaatgctaaaaataaatattcatacaaaaactatggtatgaaacacgcaatcgaacgagtacgcatttacaatgaagaaaagtttgactacgtgatcaaacaaatcgaaatttagaggtcaaaatgaagagtttcaacgattttcgactttatgaggcggctattgatgatttcatgagcaaggtcgcctcttgccgtactatggacggccttaaagagcttgaaaaatattacaaaaatcgtgtaaaagaagttgatgttgcgccgtcagacgatatttctatgcgcgatgcgctgaaaggtcgagccgaagaattaaaggccgaactcgaaagcggagaagaagaaaagttctaaaaagaagccccaaccgaaaggaaggggcttttgtacatttgcttaacgccagtgctgtactattctggctattctattcacatgcccttgatcgaaggtatattatcaatcaccccgccgaaggtaaactccatcggacggcgcaaaagagtacgcctatcatccagcattcttttatcaagcccctttcgggtacacatgtatttaggacgcgattttgttgcctccatcgcccgttttgcctccgtaatggggaactatgagatccaggcaaagaaccccgtacaagcctcattcattacgcataatcggtttgtcatgcctatggcatagttttacctatcctaaaaatcaggatgttcgtcagattctaacagatccggacgttcatcacgatctgtaattccttcaccgtatccaatcataagattctcctacagcaacatttgaacttcattcagatcatcggattcgttgatctcgccgctttttgttttttctgcgatgtagtcagcacagatagtgctacacacgcgcccggattcagtcacataaccagtagaaggaaccggacacttgcacactacacatttttcatttttagtagacattatgcaccactttctaatttacggatctccaacatgtttttgatagagtatcctttgtttttgacgatatccagtgctttactggtgaaatctaccaccatgtcataatactggatcagtttgttggtttctacaatcttcggatccccagcgatcgcgattttgatttcagtagtcccagtatacaccacttcgcacatttctttgtcatgtcttccggtgtagtacaacatacgatccttcacatcagcttcttttttagcatgaagttggatcagttttttcttcgcgtttgaatggtaacgaagccatttagcccaaatcttagggatatccgctgattctgattgcaacttgaggggatctatcagcatatccttttcaagttcattttgtagatcttctaatttcaaactcataacatactcaccaatttacccagttgatctataatatactatattaattagtagtcaaatttaaattgatctaatataatatattattaaaagaataattatacatgatctaatttataaaatcaaatttatttttacttgatttcaaaaattatttgatctataataattataattaataaattttatcataaatcatttataaattcaagatctaatttaatattaattataataattattaaaagatggagtaagtttccctactccacctattgaatattatccccgttgggttatactatcaacccagtttaggaagtttgataccaacaatctgactcattttagatttgcctgagaggtttacccagtcatcacctttcacaagtctttcattagcagcagtggtatacgggttaaccgataaaccgtagcgcatcagaatagcaactttaggctgtaaggattgaggatcaacagaaatcttgatcgaacctgcctgatcagcttctgtgtatggcgtatagaacagagagccaacatgatccatttcacccagatcgtacttgcaaccagtcagcaggtaatcaaacggtgtattggtgtcagtatagacataataaccgtttttaagtcgacctgttgctaacgggtgggtttcatcagtttcatgcatccaaccagacgcagccagaacgcctacaacgcgagaagaggccaggacataggtagcttcaaatgaagtcgttctattcatttcctgccccatttcacacactaattgatacaggaaacgacctaaagccggagcatcctttgcagtgtatgcggttgtagcatcgaaaatgccatttgtgaccacaccatcaacgttgtaacgatttgatacgttgatcagagtctgaatgatatctttgtttacttcttcactggcaacagtacccaaaacatcttcaatcacattttctgcgttgaattggtttgcttccagatcctgcataagttccacggtcatttcagttttgaatttgcgggaacgaacgttgatattccaacgatccatttcgaaagaagttgtactaatatcttcgctggtttcatattgacttgttggcgcggcttcgcttgccaggcgtaatttattgctgaataatgcgaccataatcgcttcatcaatatcagcacctgcgagagttacgctatcagttacttcgtatacaacatcacttgtcgggtgtttgaaaacttggcctttggtgtaggcagtaccaaccgcaccatttgaaatattatcgcggcttgcatacttaccggaatatgtagcagcgctggaaaacgtcatatcgcctttagggttacgataacgcacaccgaacagagttgcggtaggtaaattagtttcctgaatcgctacaagttcaccgtagatcaggttgtttaccgcacgggtaagagataccagatccggacgggtattagctacgttaattgtttctgttccggttgcctcatcaagaacctttttagacaggccaggcggtagctgtgactgacgcaccagcttgttaattgtgtaaaatttttcactcattttatgttcctgcgttattgacaaacttttctttatttatgtaataaaaaagggaaccttgcggttccctcttggaaaagttggctattacagccctttcacataaaccttgcggaagtatgcgtttttaccgaacatttctttggtaatcataccagaagtgatacggtcggacggagcctgagagcgagagttcgcaaacgggttgatacctacaccgtaacgagttttgaagcccattactggctggaagttcttcggatcagaaccacgcagcggggtcagcgcaacatacggagcgtagtagataccagcatccatttcgttatcgcctttgtaacccacggtgaagtaatcaccacgtgcatactggtcgatgtatactttatacacgccacccagaacaccagcgaatactgctttagtggtgtcaacgttcagagtcttctggagaccttgacctgccggagtgataccgctatcgatacgagccagagcggaaaccacgttacgggaagcgatgatgaagttaccagcaccacgaccagtttgacgtgcgatttcgtttgcttctttgtcgatctgaatcagcagagctttgtagctttcaccagcccaacgagcgccacgaacatcaatcggatcctggaagtcaaacgcaccagctttagagccaacggtctgagtgaaaccagttttaccaacctgtgcggtatagttgatcatgtcaacgatttcgcggttgatttccagcatgatttcggttgccagaatagcagacagttcggcgtcagcgtccataccgtgaacagcgcggagatcctgagccagttctacagagtactgtgctttcagttggcggctacgtgcttcgataacctgcttatcgatacggaagcccatttcgttccacgggttgccagtagaaccgttgaactgttcttgcagttctgctacactggtagccataccgtaagaaatttcagccagagtacctttttcctgttcggcgataacagcagcatccagagcatcggcggtagaaccagttacagtaaccggagagccagaaacgttctggaggaacacacgaccagtttcaacgaaatcgtggaacacgatagcgccgtcagcgatcgcagtaccggaagccagttcggtaaagccgttgctcggagccgcgccctgaccggagtacatgctatccggagagaacatcggatggaatgcttctttagcaccggaagccagcggatctttaccgtacactgcgcggagagcgaacacctgaccagtagggccagtcatcggctgaacaccgcagatatcgaacgcgatcaggttaggaatcgcacggcgaaccataccgattacagcagggccgatgttggtgatagcaccgcttgagttaccagaagcgattttggttgcgtcgtaaccgtggtcaccagcaatttcagcttccgccaggaaaccaccgaaggattcaacgattttctcgtcgcggtaaaccggatcaacttctgcgtctttttcctgtgcttccataatggcagcaatcagttgttttttggatttggtagcgatatccggtaagccttcctgagactccagaagatcgttccatttttccatcaattcgtttttcttagacattgtttcttaccttttgaaattaagaaagggcttttgccgcttgtacatatttattgatcttggatttctctgccggaacactttcaactaccggaacaaagtcatctttcgtttgcggagtatttacagactcgtcaacgggtttttcagctttggttgctaccatttcaacaattgcgctgagtttattttcgaaggttgcggaatattccagcccttcaatcagagattctactttttcgacctgagattcggtcaaacctttagttttctctgaaactactgcattgcgtttcatttctgaaatttctttggtcagttcctgattcgcttcaaacagggttttaacttcctgctgattctcagtcagttcgtcttccagttcggcgactacatcaacctgttcttccggaatgacaacgttatgttcaaccagaacttctttgaggcccatgatcagggattcaaacaggtcggctttgatgtcacgggaaacggcttctttgttttctttcagccattcttcggaaatgtgcgcaaaatatttatcagcatcttcgtacagcttagtttcgatttcagcggcacgttcagttacctgagcttcgaccagttcgtcggaacgttcagcgatctgggtaatgtgggattcagcgagttttgcagcgccagcttttacagcttgttcgaatacagtggtgaatgtcgctttcacgtcatcagaaagttcaactgattcgaaaatgctgtctaactcgaccggagtatccaggttctgggcttccgccagcagttgttctttaagcatttttgattttcctgttgttttgtttaatgtatttatagacctttcaaacgctcggacaatgcccgaaatgcgtcatcagcactattattctcaacaagcggtttgctttgctgattttccactataggcttaacatatgcatcaggtgcgcttggcccccagacgacatcaacgcctacagctaatttaaagcccttttgtacaacgccgtagcctttgccggaatcggagagcttacctaatccacgggaagaaacaccaggaacccaaccagcacgaatcaacgccgccagtttgtcaccatcaccaccgtcgccttcaacaacaacagcgcggccccaaacatcgttacccttccaccataatttttcaatcaggatgcaagcatttcgcggatccacattcggacgcggagggtgattcatttcacctaatgcttgacgggtgttaacttgagttctaatataatcgttaactgcttcttcaagtacgtttttaggatacaaacgacggttacggttaaccttttcggcttgaaggaaaataccttcgatccgcaatttaccgtcttttgattccccaacagattctaaaatagattctgaaacgtcaccgcaaggtaaaccccattcttcgattaaaagcatgtcgccgttttcgttgatttgggattcattcatatttatagccccagtgcagcacgtttacgcaatgctttcttgcgcttacgttgtgcgcgagtagcaattgacgggttagcacgttttgttttgagagcacgacgcgcgatctgacgacgttgggatttggttaatccggtagtctgatacgcattacgctcacgggttttcctgtctttgaggcgttctacgttgccacgggaatcaacatgcttgacaattacctcatcaagtgttaaaccttcaacaaccgccatcatagcaagggctaaatttggttcggtgaccgccaaattttcgatgattttaaccgtgccttcatcgatacccagaatatctacacgggctttcgcttcgtctaaatgttcctggagatcttcggcggtgatttcgatgtcaagttgcattacacacctcactcatcatctttttcggatttatcatcctcggctggctttttatcgccgttttcgtcatctttatcagcgccttcgtcgtctttttctttgtcttcttcgccttcgatgcgtacagcttcggcaagttcaacgcgcaattcgtgacgaagcgcttctttgcggtcttccatgatggagtaaaaagtttttttagcttccaccagattaccgcttttgattgcttcgataaattctttcatcaaaagttttcctcttccgcttctggatttttaaaacgttcttcttttgattcttcttctatctgtttggcttcgctttgaatttcctcatcagacatccggagaacttctttcattacgtatttatgggatacatatttgccgaccaccccttcaagttggcccatcagatttaaacggcgttccaaaatctcaatatctttgatttcggaatagtaagaatcttgctgatatacaaaagcaatcttacttacgttttcatcccattcatcttctgtaatgattttcttcgcgatcaagttagtttttaacggatccgcaagaacagggttgaattgaatttgcaattcgcgaataaatttgctaaagttcaattcgtcgcgggtaataccgccatcgttacccaactggataccgccatcatcgcgaggcatacggcttaacggaatacgtaacgcttcatacagcttacggttaaaccatttaacatcgtcgatatcagagaaggcagtgccaccaggaagcgttgaaacttcggtaactgctttaccatcacgacgcatcagccaatagtcctctgtcattgacaggttattttgctgattcttaactttaccagtgctcgcgtcatatacaacacggttttttaagccctgcgcaatgttatttacatactgtgtagctttagggccacccatctgacctacgtcgatatagaacacacgacgttccggcgcacgggtaatacggtaaatcaccatagcatcttccagcaaacgtaactggttagctggcttgaccgcgcggtgcaggtagcctataatgttgttgtcgcaatcttcaaggccgctatgagcgtaaacaatcgcagagcgaggaatttttaccttgtcgttgtgactataaatctgtccgttgtagctataaccgttttttggtgcggtgtatacgaagtattcccgatagccacggaaaattttaaccccaccgggtagggtttctgtaactgattctctgatcagttccatgcaacgaggatctaactggcgtaattctttgataccatcagattcatttttatgcatgattttatggaaatagatacgcgaatcaacataccaatcacggaataaacgagagcctcggttatcgaaatcgtgaatattcattacggtatcaagttcgtccatgatcttatcttggatattcttactaaaagtagttttagaaagatccatcgtaacaatatcttttccttgttcattaacaatcgcttcgttaatgatttcagaaacagcgttttccacttccggatatgtcatgataccacggtatgtatttattagctgtgttttgttctgaattcgcggatcctgtccggaatagaactgttggaacacagaagaataacgctgatttgacaagtccgtttcaatttcgtgcgccccatcgttatttttcggaggcgcaatcgaacctgtatcatcttttaattgggcttcaaattccatttcatcctgtttggcgaaatttttgaaaaaccctaacacattgtctaatccaaaaaagttcatttacaactccgaaaaataatgataaggggtattgctacccctgtatttatagcgtttaaacccaccagtctagcgcgaaagtacactcgaaagtgctcacttcgttgttgctatcccagtctaaagtaacctcaccaacgttggtcgggaacaggccataaatggtatgttcggcggttacttcgtcgttacggtttttctgtttaaccgtagcggtttttttgtagtttgcagggatatcccctgtaatgtcttcacccataccatgcagcatgtttgaccatgctacgattgcatcacgggttgtgtgtgcatcgtcgttatataccgtgattgtccagtcatcataggtacggtcaccagcaacgttaattttgcggttcatgtaacctaccggaactttttcaacggtagacgctggcatagtagcggctttacattttaatttaaagtttttgcccagatacgggatctctacttcgaacaggttcggacgtgcgaaatcaccggattcaaaggcgcgtacaatatcagtaagcattttctaacctctatgtgtatttataggggcttttcagccccttacatgttatactgacgttgatccaatcaactcatcgaaatccgcaccagttgaggttgctacgaagttcagtgtgatgtagttgatagaacgtgctggtttgacgtagattgatgcaacaaactcattgcgatcaataacatccggcgtgttgttcgtagtgtcacaaaccacacggtaatcgtatacaccgcccagggcgcgaacgttagacatatactgtcctgcatccatacggaaggaagaacgagtgaaatcatcgttattctcgaacagtttatatttcgcgttatcgccgatgtctttcttgatcatgttgaacaagcgacgaacgttgatacggtcaaacgggcttggaacagtcgttgcggttttatcaccgtacagaatgtatccagcaccaccagagaaaccagtaaccgcgttaatctgtacctggtacatagaatcgcgatgcgcgttagtcggttcgatagccagtttgatgcagttacgcagttgaccacggttgtagccagccggagacatccacggttgcgatacctgatcggtataaacacagaggccagccatatcacccgcgagcgggatccaacggttaacatcgttgtatttatcatactggaacttatagttaccgtcgatgaacgcataacttgaacttacgttcatgttgttatcaactggggtagtattaccgattttgtagcctgtacgccattctacgaggttatcaacggcctgagccagtgggatattaaccagagcagaacgcggcggagaaacgaatacgacgcaatctgaacgggtttcaccgatagacacagcgtgtttctgtacagtagacgaaatttcggcagtttcgccagcacaagcacccgcaatcagcagaggaacatgcagagattcacgatctgcgaacatatcccaaccagccatgagttcatcagcgcctacagtggcgtttgcagaagtaccgccgcccagttccagaacgccggagaatccgacaggccagtttagggacgtaccatacagatactgagaaccaccgtttgcaaagaaatcatccatgtagatcgttgaaccgtagatatctttatcacctttagcggttgacacgataaacgtttcttggataataccaccacggcgaacgataaacgcgtattggttatcattctgagggccaaagttcatcgaactacgaccgctgtttttaccagacttaccagaaggataagacttaatgacagccgaagaatcgtatgcagctttagacagaatttcaaccgttacggtgctacccatttcgccaggataaattgcaataacagacggtagctggtatttggtgcaaagttcctggaaatcagttgcctgaatagtttcttttgcggtgtcaaggttgagcagagtaatacccggatcaacttctacgccgtcgattgtaatcgtagcagaaacaccagaagaactggaaatgatttctgtagtccagccactagacagatccggatacacaccaacctgtttagcgtgtgcgatgatcttagtgctcggaatgaacacagacaggattttaccctgatcatcaacactggtaacaacgccatcttcttcaataacaacgttattgtgtttaactttgatttgatcgtctactgcatagttagaaccagcagcggtgatcgtggttttgatctgattatagatcgcggttgcgttttttgcggcttctttatcgacgacacgaacaacacgcagatcctgaccgaactgtaaaaagtttacagcgttcatgaaataatcagcggtgtcattgtctggggagccaaaataatttaccagttcgacttcgttagaaatctgacggatctggtaagctggcccccatgaaaatttaccaacaatagcagcacgaccagttgaatttcgaacaacggtagattgtaccgatgtttctttagtttcaatgcctggagagattaaagccattattaagtttcctctaaatttatataaacgaaataccgtgttggccgacagatattgtttcgtcgccactcgttacgataacaggacataacatatcttcataaagcagttcgcgctcacgtgcgaatacctcatttgccaaccgcaaatcgtctttctcgcaaaattctgcgaatttcatttgtgttgttagccatgcaaagcaaaccagcgccataacgagatcgtcatggaaaccttcttccgcagcccacgaaacacctttttctgagaaagtacgaaattcaagtattgtctttttgttatttatgatgagtttatctttctctatcaagtcttttagggtggagcagccaatcgctttcgatcgtttactctgtttcatccccaaatcattatagctatcacaaataacgttatcgtaatccaactcagaaaacaaagatttagccactgagtgacctgtgctatttagctcgatataaacccatgcttcgttgtacatcataagataacgtaacaggacatcaggcaaaataaggtgcgatgttttgtttgaatggtatacagcaacctgttcaaacggcatagatgtaatatctataatatgcatcgcgtgatagtcttgaccgcgcccttcggctgggtcgagtaccgcaatatatttatgtccctctacaggagctttatactgataaaaattagtttccgtttcatcagtatcaacccatgagagttttgacaatttccagccagcgatcagggttccgttggttcccatgaattcagcacaatgttcctgtaaaaatgcttctttacttgaactggcgatcatcttcgaagaccatgaatagccgtcatcaaatacgccatcatcaccgtctgtatacaaacgctctttaaccgatgtccagatcgccgtgtatggtacgaagccggatttcccttctatagcagcgttccagatatcatagaagtggttaagcccgttaggtgtcgttgtgataaggattttcgatttacgaccagaagaaattactggctgaatcgctaaccacgcatcaataaagtttggaataaacgcacattcgtcaatgtagatcattgcgaaggagttaccacgcaccgcatcgggagaagatgcaaacgcaccaattttacatttgttatcaagttcaatagaacctttgttccattcaacgataccaggttgcaagaaatcggggagaagttcaatcgcctgttttgtacgatccagaacttccgcagacatagaggctttatgagccaaaacgccaacatatttatcctcgttgaaacacacaaagtgtgcaaggaagatagcaacaacggttgttttacccaactggcgagacaggttacaggcaaccatacggtttttatgcatttcgatcagcatttcgcgctgatagtcacgcaactgaaccttaattgtaccatagtcaatatgggtgatcgcgcaatatgtttcagcaaaataaacaatatcgtcacgacacttaacccactccatcaacatctgttgcgtccatttcgtttggatgtacgcgcgtttcaggtttgggtttccgttatatcgagttttcttgtttcctttgtttttataagtcgcaaagtttgaactgtcttttgcttgaatatcaactttatggataccgttaatttttaggtaatcactaaactttgtcggataccattttttatcatgttcgctttgcgtccactccatcccaaattcatcaattttctttttcagataatcgggatgcattaatccgattgggtgatctgattccttactcggatcgatcgtcggttccatttccatcagggtttacctctaccgcttcaccattaatgaagccttcttttggttcgtatgcactaccatatttctgcattaattccgtaggggaaccaacaaatacagttgcattctctatgttcatttcattaccgccgccattacctttttcagatcctggttttgttgtttcttcggtaatttctcgcatttctttatgaattttcatcaatccctggttagaattgtttaactgattcatcagggttgtaaaaacttcaacgtgtctcggagattcagagtttttagcgttatgcaaggcaatttgtgccatatccatgatcatctgattcatgtaatgcgcggttttacgcgcaagtgcatagtcttcctctaaatcaggttttcgatctgctgggtgtgactcgacatcaacgagttcgagtttttcatatacaaccatttcttccccagtttcagcaccagggagattttcaagatcaagtagttgttttacgctaaattcttccattattggcccctcggtttaggaggttgatcaccgctaggaattgggatatcattagcatacgtttgaatgtattcttctcccgtgtaatcctgtataggcatatcaaccggatccacctgagcatcaacggattcaaaattatctttgtccaacgggttcatattggaaaagaaatccgtgtatactgttctgatctcgcctttaatctcgttaacaggcggatataggtagccctgtaattcaaacattaaagaccattcaatgtgtcgccgtgtcgttgcatcaccttcaaatgatgtatcaggggaaacagattgcagagatattttaatatctcggtctattttaatgtcgtttttatgtaattctgtaatacgacagttgaaatgcggctggaagtatggcagtatttgttcgataatctgaaacacatcatcttcgtaacgggtatacactcccagttcgaacatgagacgatacggagcagggttaaactgagttactgtttttccaggtgcgcgtaactgcgtcattttttggtttaccgcgatccccgttttacgaattgcgttatactgcaaatcaacgagggatagattcatacgtggtaaaattgtttccgttttagcaacattttcctgactgtatgcatagttcagcttgttcatggatgccaggaatttttcttttgatgcgtaggtaatcggaaccttgataaatttttcttgttcgccgcgaatgcgtttaacttgcacgtgattgaaaagacaacccatcaagacaatataatttcgcagcgaactattataccagtagccaaacattttctttttcctgtatgggttaaagcgggtataagatttctcctatacccttacatgtatagggtttcccctggttatatttatgggaactgtgcgaacggtgatccgcgcccgttaacaacatcaaacgattcaatgaattcatcgccttcatcttcaaaggcttgatcttcttcgtactgttcaatattggtatcagccaatccatcaagatttcgaataggttcgagatccagatcagcatcgggagcaagattaatcccttcatttcgttgcagtttaggatccaattcttcaccagtatagataaatttaacgaggttgattttacgttgaggacgatcgccgaactggaagaacgggtcaaactcaatccatgtaatttcaaacaggctgttatccatagggaaataaatcaaatcccccagaacagggatcccgccatcagtttgatgtgcaaataaacgaggattgatcacaagtgtcatttcatcgtttgacatcataccaaatttgctgtaaaagtctctctgtccttcgtagtttgcatacgaatcgatgtatgctgcaattttccacgattttgtaaacttcgattcacggtcttcgcccaaaattttatcaatattaacaaattctcgacggacgtaatacatatccggagatttcatttgaattgcttcggctgttagtgaatcatgcaactgttgagtagggttatacttgtaccagttaacatacgggtttgttacttcttgtcttaggttccgatcgacgccggaaccatcttctaactgtgcaaacagactttcatcccaattttgcatttttcctccttacatcatcaacactggaagtgcatcagacagtaacagaagttcttgacggaggttttctttttcttgcatagcttcctgaatcagtcgggttccatccggagcaacaccaccaggcaattgcataccctgaaacttagccagcacctgaccgtttacctctttaacaagagcagttgcgtaatctttcacccaacggttgttatacgcagaggatgaactctgaacgcttgtaccttgaccagccttcacgccgcctgagacagctttgtaggggttattgtatatatctgctatagttggcttatcttcgccatcagaacccgctgtagcgtatccagagacgttaccgaccatactgggtacatcaacaaaggatctgatcattgcttcgataacaacaatatcaccatctttaacggttccgtatactgcaaactgtcctgtgtcgtcgttataccagtaatccggaagcggagacaggagatcttgcattgaccgctgatagctcatcatctgggtaaaatagcccatatccgcgccgtatgcgttcattccgtaggtacgtgatgcacaaccaccaccgcccagagaaccaccagtaaggcccatcaggaaatcagtaaaccacggataaaccgcagtaccatccatcgatacaagggaacccatgttagtacgcaacactttagtaattgcgaaaatgtgttctttactcagatcgaaaatgtttttcgggttgtccggccccagggtaagaatgatataccctttgttagatccattgtaatgatattctgcatataggtctaatgctcgttgaatacagtcataaacctgatcggttgtcacttcgattttgacgatcggagcacctaaacggcgcagaatttcatcttttaattgtgctgggttgttcgtaatcataaagatcctcaaaaggggccgaagccccttgttaatcgttaagcgacagtgatcgccagttcatcagaaacgatgactttatggcttgcatcagttaccgttactttgtaagttccggaatcagaaggctgtagcgaatcgatggtaaatgtgttggagtttgtgccaacgtttacaccgtttttcgtccactggtaagacagcggagaaacaccaccattcatagttacgcttagagacaatggatcgccagtagtgtattcagtatcaccagttaggttagtaccgaatgacagaggcgggtttttgctctcataacggagatctgcgtcagcttctttgatgtacagagccagtttagcattcagatcttcgatagttacgcgatctgcaagtgcctgtgcaatgttcaacgcttctaaatcctcaacacgtttattaaggtcggcaatcagtgcataaatgcctgtttcgttaccttctgcgttatcgcctacctgagtgaacaggttgcgggttgtcgttttcaaaccagcgcgagtaacaggatcggaactaacaccatcgccatagatttctttgttaacctgctggctagttgcaacgaggccactagaagagttacctacaacgccttgcagttcccagagtgcgctagtgttggtgcgtaattcaccttcaacaacactcaaacggcctttgatactggtaggatctgaatcttcgccaatgtcaccagttaagatcgcaacttgtccctgcaatccttcatcaccggattcacccagaatcatttccatatccatcaatctgcgtttgttttccgcaatatcataacggatactaccctgaacagaaaccgtaccgatttgaccattgatggttgcaatttgtgcagtgataccagttaccggatcgttgatttgtgtagccagagaactaacggagttttccagactgttcacacgatcgttaatggaactggttgaacctgacgtgcgtcctatataactattaatcgcatcaagttcattttgcattacaacagaaccatcctcaaggatcttaattcgcgcatagattgatcgggttgtggcaagaccagaatcacccatttcagcacgaagttcttttacctcttctgtcagttgtcctacttcggaaagcgcccaatcatcttccagtttggttatgcgagtttcctgcatagaaatagcacgttggttactcagtacgcggtatttaaggccagtaccagtagaagaggggtcaacatcaccatcaacgttaaatccaggatatgaaccaacttctttcttaatgtaaatgatatcattacgaattgtgcggtgtttaggatccttttctggatcgtattccccaatttcatcgttctgagcatttacagaaagggttaactgtgctaccttgttctgtgtttgggtgttagataaagttaatgcctgaacatcctgatccaactggttaacttttttgattacgctctcatcaccaatagcatcaatgttttcagtaatcaagttaacctgatcgattacttcgttgattttatcattatgggtgatggtattttgttctaactgaaccgcgttctgctggatgtttacaccagttcggttaagactaccagtgtttgacactttatctggcgaaccgtccagagtttcaccgtttttgatccaaataatcttcgtttgagtcgtggcgtcatctgggacgccatcaacaaacgggatcttcggcaacgggtttaatttgtcgatgatcatttaataacctctgttataatacgcgaattacgtagtttaatgcgatgtttttcatgcgggtttcttctccgcccacaccagtagctttagttatggaagaatcaaacacgcgagcactctgatcgtttttctcggcgcttttaagttcataaactgcttgccatttcggaatattaccgccgttctggtagataagctgtaatgggtgttcgtgccagcccaacatatcgccttcatatgtaccatacccacgattagggtttaatccgcgtccacggtcatgaccacgtactgcaacgcctcgacaatctggaaggttaaaccaatcaccgccaccaccaaatgtataacctatacgctcaaaaagtaacggatagttatttttattcagtgagcgaccatcacaaatatacaaactaccgtggtcagtctgaaaaccagtcatgacaatagcacctactgggaaatgccaatcaagatctgtccacgtctgatatttgttgttatatattgcgctattctcataaagagaaccgttaattaccgcatttcgatcactaggtaatacagcagcgtttgaagaaagtgcagtgtttgccacataaccaacagttgttgctaatttgacaacaccgaactgagatccagttgcacgggtattgattaattttttcgcagtaatcgctttggtgtcatcagtacccgcgtttgcttctgcctgtgatgcgatacgaataacgcccaggttgctttcagttgcagttaaacgaataaacgtataaggtgaaattgcatacccttcacggatcgtaccagcctgaacctgtgcaactgttgccagttgtaccaaaccttgcgagctttcggtcgcgcttgactgaacaggaaccagggacgcgatcgcttgcttgactttaagcggagtcatagttacagtgttatctgtaccagcaaccgcctgtgcagtggtagcaattttagaagaaccccaaaccgattctgtacctttacggttattgaacacatagttcagagatcgcggagtaatagacgatgcatcgttagttacggttgtagattccgcatcagtcgaatacttcgtataaccccatacggtttgtgatgctttagggttctgcatacgatatgctaacagtttcggagtaacaatcttagtgttatccgtgccagcgtcaatatcagcttcggttgcgatctgagcaataccacgaacagaagttgttgcgataggaagcccagtatcagtacgcgcccaactacctattttttccaacgcatcttgtacgttggttatggtatcaggccaatcagtacctgttgggtcaaatgtcacgtaaatggatttatcacttacgtggttgattgtattgttactcatgtgttatccttatgcaattcgtttgaagtaatacacggttacttgcggagtaacatcaggtaagaaaccagaacccaacttaacccatgaaccatagccactttttgcggctacgtcgatagttccgatttgacgaataccgttttctgagatatttgttgccgggtgcggaacactatcaataaatcgacattctaggatcgtaccatcaacacctttacggttaacttctgcgaaatatttttccgctgcaacgaattcagtaaatttgttgtatgccgtttcacaaacagttgcggcgttagtcccattatcaaagatgaaaggaaagccgtacacgtgaactacagcctgttcttggtctgaatcgatgttctgtacaataccatcaaaagaaacgctctcaacctgctgtacagcgattggaggggcatcctcagtcatggtaacaacgccgttaatcgggatttgctcgataagcgtatacaggtcatcaattgcggattgtacgtttccatacagaacaccgcgttttgtttggtcaatgtttggttcgccgatcgaacgtttaccgccgatcagaggcaacttaccataagtatcatactgtaagtaatctgcttctttagagaggacgcgagcgccctcccttgtttttgaaatattgttgtaagccattatgcaacccttatccagcgatgtgcagtcatatacggtggaatagttttgattttatcaggtaatgtgttaccatgattcactttcaatgtatcctcacggtatttagtgtatccagggccagaagcatcaggatctaactgacaaccaccaatgatcacagcaccattttcatcagcaatcagaactttatcttttgatacaagttcaggaacgttgatgattttgatttctgtaccacgatcaccgcctgtaccacctgccgtatgactcggttgaccaccactatctaaatcattattgtttaatgcgaaatcaggatccgctgcatttgatgtccagccagccaggaaataaccttctgcgtaacgtttccaaccaccaaatcccatataatcagcagggtttgccgggttgtgtgcgttttcatagatggttccgatcgggtggataatatcaaacatagcctgaatatccagaatacgtccctgataggtttcccctgtattacgcattgttttctgagaagggttattataatcggtatattcgatacggttcgtcaatataacttcttcttcgttattgagataaaccttatcagctttttctttaataccgccagttccttcccaatccatcagagtaccaatatcattgttaaaccaacggatcgttacaacgtcgccggattccagttcctgagcaaacttgattgaagtcactacagaatcagtgaatactaaactataatcctgtcctgacggaacccatacaccagagttaccaacacacgtactttcatcaacaccttccgcaccttcacaggaaaacgccggatagtcagcgtcaccgcctttaaccagttgtttaccgttgagaagcagttcaaacgagttagggttaatcaacacgcgagggttaacaccaaattcagcaggtgtaaactcttttttggttgccagatcacctacccactgttcaccaggaacggtttccagagaagtatcaccagtctgatacatgcgcatcacatacgcttcatagctcgaacgccatgttgctaacccatctagataggtaacaaattgaagcgtgtcaccagcgttacacgggtttttaagacgtactgaattaccatcaagtgcaaccagttcaccaggagcagaaccaatcgatccatagtctgagttatcagcattgaatccgtctttctcatcgatgaacagcaagttaccgcgatagtaaacttcgaacgattgcaggttgtattcattaccaacaccgaatacgttagggaagtcagtttgtccctgagtagcaatatacgtttcttttgctactgttgccagatccgaagttgtgattttgtcaatctgtttgttttcgacgtattcccaacggcccggagaacaatacaccagttccacatccataaaatctttaaacagatctttaggagttggggaacctttgatagtatcaccagttgcggggatcagtctaacgttgttggtagcccaacgcgaccacacatcacgcagacgaataaccttgttataatcgcctacgccgcctttcgggaggtttacggtgattttgtttgcactggtattcaacgcccatgattcaccaaattttggtgatagcgtcgtacccgcaaaagttttccaggcacctgctggatgggggatctcaccatcccccagcatgttatacaattctgtaaagttgctgttagtcttttgaccacctcgacgcaggtaatcgcctgtaccatcgtctacaatctgacctattaaaatttcttgtttcatgacgcgatccctgatttaatcgtatctattgctttaatcgtgaatttaattcgatcttctttgatcgcttgcacgttagcgtatacaacatcaccagcaccgacagtaaagtttaatgtaaacatttcatcttcactgtttttcaaaatagcgtattccgttgaataaatcgttttgtgtacacgatccacggtcattaaaacttctgccattttggtaactgtaccagctaagttttctgcgtatacaagcaccttagccccgctaaattcgctatatccgaacataggaatagcagtcgggtttgctttcagtacaagcgccgtagtgtcaacaggcatcgttttagaaccgaacatagattctacagaataatcccattttgttaccgcaccttcttttttggtacaccagatttttacaaaggtgtaaggtgacgtgatatacaactggtctgcaacccccgcgatagtatccccaacttgaggacgaaacgcgataggacgatcaacagagacactacccgtactatttatgaagtagcaaccttcgccaaccttaccagaaggaagaacaacggtaatcgaacctgttgaagtatctatgtcatgcagggaacccagttcgatcggtgtgcttgaatagtaagtgcgtggtagtttctgatagtatccggtagcatggatcaccatgttaccgacaccttcgtttgcagacagcatacgcacatcaccaaacgcattataaacgttggtgatcatttcgttcagtttaacaccaccatcataaagcgggtcgcctgttgatgggttgccgatttcaccgacatcaattagtttttttgctgtttggtaagccattgtttttccttagaattcgaatacaatactcacttcctcagtctgatcaagggagcgaataataggttgtctgttttccatgtaaatcatacgtccggaatcaggttcaagcgcgttagcattatagtaatcaccagttgctttcttttcaggctcggtcgggcttgcctttttaatcaacgggtttacaataatacttatctgacggaaccctttgttaccaggaagcgtagattgcgggaagaaaagagaatccatgtatgcacgaaaacgcattgaattcaccttcaaccgatacactagatcgtattgtcctggataccattgaatcacgttatcataaccccaacgtaccggatcctcttccagttcgccagggaaaggaactacgatatgttcatttgtacagcggttgatcacgacatctggcgggattgtgtagaggtattcccatttataaccgtctcccatgtcgatcccgttagcttctccgcgtggaggttcactagattcatgagacggactccagataccgccgatcctgatacattcaagttttccggtaatgctcgaaatggagcaagaaccgatatcaggaacatcaaccacacgataaaccatccaacctttacccggatcagtacggttataaggtgcggtgtttacaacaacaatatcgttaaagtaaaagattttcgggtttggataacgagtatcaccccagtctttacgtggtaaaattgcatctatcatatcaccaggaactttagtagccccgatcatatgcgtccacatatcactaacaccatcggtgctatcatttggatatggcggggcgaagttagggtcggattcgttatccgaccacgattcagttcgtccaatagacatgtaaatcgtgtttagatcggcggcatcgccgatcatatctttgaagttcatcaagttttcggttcggaattttgcagtaattaccgaccgatacaagttttgttgtgccatttaatttcctaccttaatctgtgatggaggatttggatcacgtgggtttcctgcatcatctttcagtcgtttatccaccaaattacggaactgtgaatatttaacgcctgagcaatcgaacaacggactttgatcgaaccgtcgcgcagaaggaagaacaccgttaagcggtttttcttcaatgtcatattccggaggtacatcaaaaggttcccccgctcgcgggtgtacggtgtacagaggttcaccagtaaccaggtcgaattgttggtttccgttaccgtccatactcgcaatgcgatcaggccagaacttaggataaccactatcgaagcggtagtttctcagaatatcaatgattgtctcgttatgagtcattgacaaaccagagttgatgaatactgttaacatcgtaatacccataaagccgaatcctaccggatgaacaaacctcaatacgtcatccttataacgggaagtcggtagatttgaacgaattttcatcacatagtaagatcgtccacggttgatatagtcgatcgagttgttagccatttgtttaccgcgaacaccacgaattaccattccggtgaaattggttttttctgacttgacaacctgcccttcgataaagttaccttgagcattatgcagagtcattgaccaacgcaattgaccattttcatagtcacgttcgatgtatgtaacgttagcgcgtccagttggtgtatagatcgtccggcctacgatatcctggctgatatttgttgaactaaccaaaatatcatattcgagactgttggagctttcgatctcaacggaaacatcttcgttatacagcaatttaaacaggaacgtataacttgcctcaatcccttttgttgaatagaaatcgcttgcacgtgattcgaaaaatctaactactgcctcacgtttggttttatccaggtaaatgttacggcggttaatttcagaccacaaatattcgacgttgtttttctctctcggatacttgttccggatgaggttcagcaatttgttatagtaactgttgcttcccaacgaaatgtattgcagatagtattcaccaaatttctcgaactgttggttgtccagatagctttgcggagcaaaacgagtgatcatgtgactcagatcagggtcgattaatccaggttcaatatccggcgtatatgggttttcgcgttcctgattaaccagacttgccaccattaaagtgttatcgggtttccagaaaatagtgagttcatcccttgcgcggtatgacagttcatagaatccaattatcctaccacctgagcgatacaacagaacaccgtttgtgtacttcgtaaaaccagtaaacttgatattattcaagtagatagtaactgttcctttgtcccaaacttcatggtttacacgaatcgttgacgcaggagacgcgctatcagtaaccagagtatacagggtttccggataaaccaccagaggacggttatcattggtgatccatgtgctaaccttatcgcggaaatgccagctaaagtttgcttcattgtagtactcttgcggcccaaagttccatactgtaggatcgttctgatttgcacgaactgtagcaaagttaatcgaaatgctcgcagtataaccaggaacaagatcgtatttcaccgctgaatgcacatcttccggatacttttcaaccagatccagatctggcaaagtgcctggatatttgtagttaccaacagaaatgtaaacttcatcgccattggttgacatattggtatattcatgagtgatataaaaacgttcatcttcggttttaccataaacacgggtaaacgtctttgcattctcatcccacagataaacgccagcatcgtttgatgggatcacgttagccttgacagtcggatccatcatcgccgttttaacttcaccagttaccagaacgtatagacggtcattcagcacgtccatttttttaacaacaattttatcatttcctggtacgatggtatatgaaacttcatcaaaaatacgttcaccaaaggtcggcgaaccaggatcagtatcaattggtgtgttacgtaacgcaatacggcgcataacgttcttagcagccacgtagagccattcattagaacaagctatagcttcggcatacttcgacactcctcccggtagacgcgcatatgtgttgtatgaatcaacatcaaaatctaaccctgactggttccccagcttcgcaaacgttacatcatcagaagaaaaacgaacttcatcagaagaccaacgaatatctgttgaagtgcgcccgtaaaatatgcgatcgtatcctaacacatacgtagtgttagcgctctgataagcaacggtacgggaaaccggattgcctacacgatcgtttaatgctttgtagtaataccacgtttggcctttgtcatttgacactttagccatattctgaaaacgttcaaacaggtaaagcaatccgtttgagtataccaggaacgtgcgatctatatcattacaaacgtgttcgatgtgatcttgaatttcatggtagctttcttgtttcaggatcttatcgctgatctggcttacatcagaatacaggggagagtatacaaaatcctcaaccatcagagaagccataataacatcatcgttaaaatcgacgtaatcacgattgtttttggcgaatttttcattgataaacgaatcagcaggggtgaattcacgcatggttgtatatgcgtaggcgttctcatcaaacgtccataattcatcgctgatcacccaatcagaaggttcaaacccttcatgagttgtttgaatacggaatttataacgtgtatttggggcaacctgatcgctaaaccattcgttttcgtagctataacccaactgcgtccagattaactcttcgtctggaataatagttccgtccatatcacggctacgggccaattcaaccacataatagaaatccatgccaacatcatcccatttaaggtaaacgaagttagcagccagcttatcaacgcgcaaactcgtaatcgaaggcgctttaatcattatatttctccaaatttgcggttatgtatatcacgtatttataaaaagaaaaacccctatccgaagacaggggttaacgattattgactgataggattcatagtcaatgtggtgtattgaggacgtaggtcattttcaaacacgatcaacgatccatcgcgagtaaaaatggtttcttcgagaggctttgcggttagctcgatataagcagcactgaaactatcggcggatacgttcagaacgcccagatcaaagctaatgaaatcggtataatgagacaccgatccgacttcgtaatatttattacgggttcctgcatctgttaatttttcaaagtcatcacctgtataagcagcgatcgaaatatccccatccttgaacgggcctattacaatttttgcgttaccatcctgatccatttccgtagaagcataacgaacaacataactttcgtcttcttcgttggtgaacttgaacgtactggaaatgattgatttcgattccacctggttcaagaaatggatcccagacataggagcactgtaatagttgtcaatttcacggagcaatttaatatctgcttccgaaccgataatagaagtatcagactgatcgacataagtcaacatcttagatacactgaacgatttgttgaaaatttcaacgttgtcagtatagtaagagtcgatcgacgaaataacctgaccgcgtaaccattcctctgattccgtcaacttactgatatcatacgttactttgacagattgcacaatatacagatagttaggatccataatcgatggggtgatcgtcgcgaggttatatttcgaaagatacgtttgcatatcttctttctgtaccgatgttaggcgcaaacctgactttggtttaacagaaatgaaagcataaccaggtttttcgttatcagtaaagcactgtaccgcctggatgatagaaccaaatctgtgagacaggaaagattcataatccgatgcagttacacaacggcgttgtgtttcacgcataacaggggccagttctcgaatacgctcgatatcttctggatcaccaccaccatcagcaccgacataatcaggggatttagtcgggttttcttcgatgttagtgatgctaatattggttaatgtatcgacatagataaaatcttttgcaccgttagccgcttccccatcggttgacaggtattcaataacgatagtcgatccattagcaggtttcaagcccccgatatattcagcggttaatgcaccacccgccacttgttgacttgcttcaccttcaccgaaataaacttcggtatgtccatcaacagtttcacgcatgtagtaaatcgtgcttgcgcctgttgcgtttacaatgctttcgtttgtccagtcttcccattgtgcgccgtttacagttaaacgtacctgactacggtcaatgtttggatctcggatcaggatactcgaaccgtcataaattagttcagtacgaactaaacggccttgcaccaggttcagcattgatgtatagttgttattactatcacgaacgataacaacgtcatctgatacaacaaaagaataactgtctgtattctttacagtaccgatgaattttgtaccgcgcgggatacggatcgatgttggggtcagtgggttagcagccgtaatcattactgctgtgcttgcagccgtgcgagaatctggcatatatcccagatcttgagcagactgtacaacagaactacgcaatgcagccgtgcgaataaacgattcaaatagagccgtgttacccatctgctgaatataaagagtagcatacgacagaaggtcgatcagtacgttcattcgcgagccggaaaaatcgtaatccttaaactcttcttgtccacccagccaatcaatcagatctgttttaatttcttcgaaagtacccccgataaaaatatcggggatttggttaatctgttttttgacagtcttagtcttagcagtagccattattataaattcctcttgatcattcgactatttagtatttcagtactggaacacatacactaatcgaaccaaagttgattgctaatcctatgagagacagcaatttattcacatattgtgtgactttactcaacgccaacgtacaaatttggttatagattactttgcagtgatctttaaacgagcgagaactatcaatgaaatttttgtacagagactgagcaccagtaatcgcattttcatatgacttgagaagatcgtcaaatgcgacaccacagaagcctaaaaactcgtttattgtactcatcaaaggcaatttctttaattcttccatcgccatgctgtatgtatctttcattgcatcttgtagagatccaatctgttcctgtatagcgtcatacgcggcctgtgttgcagctacagcagcgtttgcagcatccaatgcagattgataagccgctgttgcttcgtctgttacagcgccccacatccagtttaagtactggttgaattttctctgaattgtatcacgttcgaaaatctgattttttaacgttttgtaaagttcctgcccctgttcataaagccctcggatctgttcgtatgactcatcaacaaaagccttgactttttcctgtgcttgttgatacaaatccattgcagtgaatccagggaagttaccgcccagaattatatcaagtggtttgatttgcatcatgatgttacggatagccagcaccgcagaccataacgggtttgggacttccggagggatagcccatgtttgcatgatccgaccgtataagtcgattaatgcaacacaaccgttttggaacatcgttaaacaccaatcaaataacgcgctacacgcatccacaaggtcgcgagcgccagctttgacatattccacagagtaattgtatgcgcttcctatggccccgtatattgcgtttatgacggtttcatatgtttgttgtccggatttgatgattgcattaaacgcatctttcaaagtctgaacagaattatcaccaaacaccagatcgtaaatgttgatcgcaacacctaagatggttacttgaggcaagaactgattaatcaatccccatgcaccaccgataatgttaaatgcagcgctaatcacttgtctgaaaactttcatagcagtttgccatgcttgctgtgacaatgcgagcgcccccgccattacttcttccatcgatacggataaaccatcaaacatcgtcgcgatcccgaatccattctgtacagcacccgttaacatgttaaactgtagcttgaacgtattacgggtttcgttccatgcctgtaacatagcatcactgatatttgtatatgcgaaaccaacagttgccggaatgcacgaaatatcagcacggcttaattcactcggtaatgctccataagtggaaggcattgcaggaggatcaggaggaatgcttgtatctgcgttggtgttaacctgcatacccgtatatttgcactggtgcgcccctgtttcgtcatgcttcatatatgctatacgattaccattccaataataatcaatattggtgaatgcgccagtgtcctgattatacgcctgacgtatgcgagcatcacatacagggtttgttccggaaagatacccgccactgttttcaaccttatacatagccagttcgccagggtttttgtataggtttgattttgacagatccgcgccgtaccaatcattaccaccattgattttagttgcaccgatggatgtaatgtaagcatcaatctctgcttgagtgttgaaataatagccaatcttcggaacaaggatccctgttggttgtccggtatttggatctgttcccggtgaattgacaacaggtagatccgtgcttctatgtccgaacggttcttgagtataaagatgagtaccgattttgattatctcggtatcccactcaaccccaacagccggataattttctgtatgcccttgccagataacccgccgataatagccagcggggatctcagcatcacaaggatgttgataattttgcataattccatcaattattgattcataatccataatcatttaattaccccacttggacggtgccgccagtgatttttgttaatgcgccagaatcaataaacgtgttattcgttgctttgatattgatatctttagcaccaatatccatcgtttcttcaatctcaattttcgcattttttgcagtgaccgttgcgtcttctgttacagccacggttgcattctgtttcacatttgcggtaagattctgatcaacgttaactgttgcatctttgtttacagttagttcagcattgcctttaatcaggccaacgtactcaccttcaaccgtttgttgaacgttgccacgaacaaactcagttacgttaccatcaaccgtttgttgaacgttacccatgttgtaaatgaacgcatcaccttcaataactacctgcaagttgcctttaacgttgagtttccggccctgcatcacgatctgatagtcatcccctacgattttaacaacgcgggttccatccgggcgaatttcttcgtaactccctgctgggtgaacacggttatatcgttcgtatcctggggtatcatcgaattcctgaatgtgtccggatctcgattcaaacaccatgttatacggatattccgcattataagatgatgctggttcttcaaacatcacacgggtatcaccaggagtaaacggatcttccggactagcagccaacaatgtagcaccgttatacgcagcgtaagcagcactcagagagcgcccttccggatctggtacttgtaccccatatgattcaaggttgcccgtgaggacgattttagacacgcgagaagaacggcctggagtttgactagcccacagtgaatttcgaagaccattataagccgcttgccaatcttcatttttcatcgctttcagggtattggtgaatttagcaacaccaccgacgcccatttgaaacgacatgttttcgatcgccatttgacgaggacggttgaggttcacatacacttcacggacgttagcggttctctgaatatcagatcttactttggctaaatcttgagcaaataaggttgatacctcttctgccgtgattgttccgtttgttacttctcgacctaccgctttactgatcgcagcgttaatttttgcagtgtcgcgagtcttttcgcggataagcaaatgcccgatcccgattgtcggatatccttcactgtctgtataccatcgtgtacggatcccctcatcctgcttgagcatcttttcgatcgtaaatccacccgtatcagggcggttatcttctggtatctcatccagtgggcgatcgtctgggtttactgctatgcttgtgtttgaatcacgaatgatgacacttgatgatcctttgcctttcaaaccacctaaagcaagggagttaacatcgttaccaacatagcgagggtattcacccataggatcgcaaaaacctttctgtgtgtctggttgttcgacatattcaccagcgacagtaccaattatcataccatcttggtgccatttgtcacgccaataaccaacaacaaaggatccgcgagtgataccagttggagagaagcccacaccagagatcgcagcgcttctaatatcctgaataggcatcatccagggtaaatcttcaacaggaacaccgattgcatcggatttttgtttttgggctgggtgttgtccaaatacacggacttgaacacggcccaacccgcgcggatcatcaacgttttcaaccaccccatcaaagaaaggggagtgtaaatttccgcctaatttcatgagttagccttttccatttctttaataaaatcattcagaaacgcctggatgtcagacggactaatgatttttattgttcgttttgcttcattttgcaacactgcatcttcataaatatctacaggagctaatacaccttgatactgtaaatacagcattggtttgtcacctttgtcataccaatgaccagggttattggggtcttcgacaaggttataatacttgttgttgttttcatctacatgatacagaacctgttcaccgccaacctcagaataacgctgtatagcgcactgatacgcggcttcctgatcggagatccaaccatagaaagggtcataaacagagttaagcatcaacaggatccagtagtattgctggtttccatataatgattctgcaagttgttcaggtcgtagtgtgcctgttatctggtaactacgggttttatattttccaatcacacgattaaaataaaatcgatagtctcggaaaatatcagttgtctgggtgcctttgtaatcaacaggcgggaagtatgaaaatagcacgataagttcccctatctaaacgttatattattctatttaggatttacgcaatggctggaagacagacgtataaagggtcgtttgtacccgaaaacatacagaagtataaaggcgatccgcgaaagattacgtataggtcatcgtgggagcgctacgttatgaagtggctggataaaaacccacacgtaaaacgttggaattctgaatgtatagtgatcccgtatttctgcaatgcagacggtaagagaagacgctattacatggatttctatgtggaaatggaaaatggtactacatatctttgggaggttaagccccttaaagaaaccatgcctccaccgaagccagtaaacaacaacgtacacaataaaaagaaatttattgatgctctttacacctatacagttaatattgataagtggaaagccgcaaatgagctatgccgtcaaaaaggctggcagttcaaaatcgtaacagaagaatcactcaaaaaagtttttgggtggcgaggtcagtaatccctggagggaaacatgagttttatttttgagtttgagatcatcgcggaagaggataaacccaaagcaccacccaaacgcaaattgagtgattgggttgaactggggatcaaattccgtaaggcaaaaacgaaaggtgtttctgctaaacgttttgccgattctgagggattaaactacgcaacgttcacaaagtcaatgcatcgttacaaaaaacagattgatgatgagattgaacgacgttccgcagagacagaagcccgtaaaaaacgtaatgactaccgtaaaaaacacgggatcgagatcatcaacgatttccgtaatagtctgaaaaagatcactgttggtgtatcggcggcaaagcgacagaaagattcaacagaatggtttggtaatttcatcaaaaccagtatcaaaacacaccgtgtggcaaaaccagcaacgggtcgcctgtacacgtttgcatatgatgcaaaatataaagacaccctgccgtattgggatagatttccactgatcattttcttaggatccggaagatcgaaagcgggtaacttagtgttctatggtttgaacttgcactatgcgccacccagagcacgacaggagtttttagaagagttattgaagcgagggtacggatccactaaacgcctctctaacaagaccgtgcttaaaattaactggggtaacgtgaaaggtatgcgaggcgcaacagaaatgatcaaagcatatctaccatcacacctcaaatcaccattagcagagattgcccctaaagattgggcgaaagctgtttggctaccgactcagcaatttatgtccaaagggaaaccttacggcgcaaaaaaagtctggagcaaatactaatcaaaaagccccaaccgaaaggaaggggctttatttttacagggtgctaactatttctgcaagtttgccaggggtcgcaccaggtctaactttcatagcatctttcaggtttttgtcaaccatcttttctgcatctttttcgttaaacccgcgtttcaccatcacagcaataactttttcgcgaatgcctttagccgcttcattcagatcttcggattcagccagaaccagtttagaaaccatatcgcctttatattcttgggtgaattttttaccagatactaggcgaggtttgccggaagcatcaactacggtaaacactgcatattcaccgcttgctttagttttagaacgcccagtgtacagaagacgcatatcgttgcttgggagtttgtaaactttacctttcaccagagcttcatccatagggatctcgatttcgaaatcttctgctaactggttatacagatccagattttcttccgcctcttcatacagagtagcagctttgaatttttctggtttgtcgaaatccagatcatcatccggattgccactgtagaaagaaacagtacctttagcccaatcgacataagccgcttgaactttaccagtagtcatacctttcaaacgtacaatgtttttaccgaagtatgccagatcgtgagaatccggtgctaaaacttcgaaatcagaaccatgtttgaagtgaagaaaaccgattgaatgtttatcggaagttttagcgcgttgaccacgtgctacggtacgagcgagggttttaccttcggtcagaaattctttgaattttttcaagtgagtcattttgtttttcctgatttccaatatgggaacatagtaccagtatttagtgacggggtaaaggaaaagttttcagaaaaagcataaaatttattagatctaagtattgatcttcataaaaatttatgataaaataaaatattaatatattatagatcataaaatttatgaattcaagatcagatctaaaaatttttgataaattatttattaaattttacttgatcttgttagatc

SEQ ID NO: 21 - DNA, 172560 bp, unidentified
  source 1..172560: mol_type = genomic DNA
accggaatgtttgcgaccactgctggcttatccagggcggtagaaatcgatttataggttgcatagtcgattgcatccaacaccatttctttatctttgtcgctgcaatcactccacatgatctgttcgccgtctatcattacgtaatcgataagatcggggatttcttcatcaccagtcttacgagggtgaacagataacgcgatcccgtcattgccgtatagcttatcgtcgaaatcttcaaccattatttgattgcgtttaagctggaattcaattctttcctgacattcttcacagttgatgaacagttgacgggtatcaatatttttactttccagaagtgccagaatgaaaagatattctctttgatacaggtaaacatcccctttgataaaatctgcattgggggtaaactctgtatgtgtcagaggacgataatcaacattatatttctcaacgtgtttatattcatgctttctcatttaacagcaccttgttttttcaagtcttctgcaagcaatgcagtataaatttgcctttccattgggctactattcatgataggttccaggttcaggccgtttttatttagcagatagttggtcttcacaaattcatccagatccccgcgactaaacaggatcttgaacagggttaacataccactaaatgatttaccgcgcatagacacatcaaccgatttcgttagcatagtaactattttttcgacatcatcaagttcgactatatcaagaatattctctttcgtttcttcggttagtgatgtccattcatagcgctgttcgttgtatattacataactgatacattcaagaaacaactcttcacttgtattgcgtgtacgggggaagttaaaccctaatgtgatttcatcattcagcttgtattcattttctagttgaatatcattaatcaccatgaaggcttcggagtggcccccgcctttaccgcctatcacaaccttgataacgtttttaccaaacgaaccacaatacacccggctgaaaatatattcctgttctgttttggaatacccaggataaagcagatccagcacttcatccagtatttcctgttgctctttaaggggccgaccttccatatcaatacgggtcagcattagtttaaactggtctttaactgtaaacatagggaatcgtttgatccctgatggtaatgttactcgaataatatcaaacataagatcctcaaaaggggccgtagcccctttattgtcctgtaattgcggtacgtgctgcaatggctaaaccttcctctacggattgtttgaacccttcccagccttctttatcagcctcaacaacccatgatgttttataggcaaaatcaacagtaaatgtccagatttcgttgttgttctcatagctcaattcactgttactgattttgacgggcaagcacttctgaaatacgtatgttgtatgcggtgaaccatcacgatcgtgtaagttaacctgaatagtacttgtcacttcatcaatgaaggcgtattgtcctgttacatcatcgcgaatagcggaaatccattcgttaaagattttcaggttacgggcttctgaatcggtgcggaacgtcaatgacaattccccattctcagggcgagtgaatctgatttgaggtacgccaccattataaacgtattcgtacccaatggatttaccagggaggttaactcccataatgcttaaacccatattatacatcatttcatcacggaattcagatagcagttgtccatacatgctatcaccaaacagggaagtaatcaaacgggggctaattgccccgatgattttgctaaatcctgttttgttcagcgacataatcgccttatcgacggtgtaactaaacaatttactcacaccgccagtgatagcattaatgaattcgttcgggttgtttgcgttgatagaactaatagatccatcaatcaaagtatctcgaatactaccgatcgtgttgtcaaggatacgtgatgcagggctggttgcaaatacaacgctaaacaggttgctacgctgaaaatcgcgattagccatacctgataaaaattcatctacgttgtaaaacatcatatctccttagtaatttgtatcaaaaatagaatcctgacgcatatcgatcagttccataaattgaatttcgacctcaagtgagatcggggtatttggtgattctcttaatgtatttacaatattatcaatagaacgaccaaagcgaacactggtaatacctgctggcccaaaggttgaatgaggtaaacgcaaggaatccccagactggaaatcacgaataaaccagacaggaggcgatttaataacctctacgtttgaaatgaaatcaaccacgtcattacccagactattatcaaaatctgacgctgttactgggttactggaagggctaattgcgttagcggttttagcacccagaacaccgtaatactgtttaaccaatgcagcaacctctttagcagtaccgccagaagttgtaccatatcccagaacagtaaacagatagtagattttaatcagttccagcaaatcattacggctttcgatcacgaatgtattgtaatacatctttgttcgcttgtcagaaccctggaaagcggctttagtaccaacatcaagggcttctcttcggtctgccataataccgcctgaaatggattctacagcgccccataccatgtttgaaacaacacggctcaaccctttggttaagaaactatcgtttgcatcttgatagcggtggctgtttacttcgttatcgttcaggcttcgcggtagcaggatctggcaaacaggttccatagtaccaatagaactattcaacacttgtttgtacttaacattacccgtcgcagatgatagtatttgttttgggttctgtgctgcctgacgtaatgaacgatagttgtctttactaccaacaccattaaaatcatatgcagtgaacagaaggccgttattatacagactcgaagcattataagcgttatcgatacctgctgcacgttgggccggaaattcggcggtaacgatagtttgctttaatactgattctgtgattgcggcacccccagaggggataccgcgatttttaatatttttgagagtgtttatactgtcatcaataatagaaaacttcattatatgttccttatgccagcgctacgagcggtttatgctctgtgcgttgtactgaatgagttacgttgttgttaacagttttgttgttaacctgaatgttgcttgctttatcagcatccggtttatttgctgctaacggtggctgtgcgtcgatcggggtgctggattctgtacgggctgcaatcttgttttgcaattgctcgataaggtcagagattctatccttctgtacatcgtccagattaccttcattacgacgtttttcaagctgatccaacagttcatcgttaatgtatttgatatcggctgcatccagattttcagagttagcatagttggttgctttacccaacagatcatcaccctttttctcttcaccttctggcggctgttttccttccttcctcgcttgttctaacctttttgcttcttctatacgtgcgcggttgcgtttgttttcctcatcggctaatttttgtgcttcctcttcgctgcttttagctaaatcgtattgtttctgcatttcttccgttgctttcttcatattatcaagccgttctttatcagcatctacggttttctgatttctttcttgataatcagtaggagcaactttatagatagaaccattaggaatttgagaaggagttattgttaatgcatgacgtgctgcaatagctttatcttctttttctaatgccgctttttggtcttctagttcctgtttcttgatcataagaatatcttctttagtcaattcaagaccaaatttctgtttatcacgtaaagcggtgatctgcattccgcgtccggcattggtaatgctgtctataccagttgattcacccaatgattgaataagacgaccgataccctcagtgattgccgtttgtacagtttgccccaacaacttcataggctcaacgaacaaatcacgaagtgattcgcctaagttgttcatattgaagttgttcaaaccttcttcgatctttgttacgatagcctttacgttacccagatatgtaccaaatagtttctttgaggattccccttctttcaggatatcttcgaaccatttgcgtattgtgacgcgcaacacatcgaatgtaaagattaacgaaccaataaggagcgtccatttagcaaactttgccattgcttccagagagtaaccaatgaaacggctaaggatctgcgatgtaaaacctttaatagaaaccagacttttagcaatactatccagagttttgcttcttttgtcatcatcatcattgatgcgttttttcttagtgtctacatacggatcgggttcttccactggttcaggaagcggcttatgcttatcagtattttcatataaatcaacaagtttgttaatagcatgaaaaatagattcggtgttttcttccagcttaccgaactgaccattttggttaacgtttactgtattgtcaacagtttttgagttatcatcggttaaggatataggacggatcgggccgacgaaatcaggtagttgttcggctaatgattcctttttatcctcttcgtattgttctttgaaccccgcgaatttgtcacggaatttttcttcgaacgatttcaacccttctttgatatcaagagtattgattgcactttcaagggtgttatcgttgatttcctttaggtcacgggcgctttcagcatcaagggaggctgttactttggtgaccgctggttgtttgttgttgtttctgttcagaaactttttcttttgttcttcgttgaaataagagttagccattatcattcaccaatgatgttaagccctttgatggttttcccctcatgaataatgtatacttcctggaggacaccacgtgatacctgatcatattcgaatcggtacaggcaattaattaattcgtctcgtttatcctcagttaattctactggcttaccgtcaacatatgcctctttgatgaggaacggaaggtgagcatttaacaggctgggtttgtcaaagactaaccgcacattgtcaaacgtaaaatcatagcaaggttcggagattttgaggtcatcaagatttagcccaatttctttaagcgtattggcataatcagcgttattgtgtgcatacatatggatcaacacaaattcaatttccgctgctgttagttcacgcggtttgatgtcatcaatgatgaatcgcatgatcgcaactgggtcatctttcagagtcttaatctttacaaaatgacgatacgacatcttagggatctcaatggctgttccatccggaagatgaacggttttaacgttagtcttcttgatttcaagccgtgtagtcataaatttatcaagagttttatttttcattattgcctcaaattgaacctgggtcattatttactatttagtaaataggatatattaggagggatttttatggctgaaaaaatcgtcaatcgagtcacatcgattaaattatatacatcatacgaaaaatacattgataacgcatatactgaattgctacccgctcttgtctcgtttagtgaaaagacgatgattaacggctcatcggaaacgctgatgcagatatacgacgcacagttaatctatcagcaacttatccagccgatcatacaggtatctttccagtataacggtacacaggaacaacattattacggattgctttactctaacgtagatactgacgataaaaaccgctctgtgctgcgtatgaacctctctccgctgcataaaacgttcagacgtaagtttgcccgttcatttagcaataacgccgtacagacgattacagagtgtatgacggcactgtatagcaaaatgaaactacttacccccgaagttgacggcggtaacatacgtatccctcctggatgtctaaatggtacatatcaggatatattcgattatatcagggacaacgggcaaagtgtagtttcttctgatttctgttatctgtgggaagatggttccggtattttccttaaaagttcaactgacattctggcccagacaccgatcccagcatacaaatttaacgttgataacgtgtttgttggcgatactgtcatattcacagaagcccagtacattacccataaggataacacaacgctgtttaaagacgccagtttctttagtctgtcattgactgataaaaagatgtacggtgatatactggctgatacagacacagagaatacatggatcttcacaaaccgtaatgcaatctatgataccaactttcagaacccagattcagaaggtaaacctttccaggcgtctaaaatgcaattgttatccagctatgaacgccggatccgattcgatataaagcagggtcgtttagatgttaaggtaggggcaatcattgaggtatttggggaagaatatgcaggaaaatatctgatcgttgaatgtgttcgagacgtatcaaaagatttccacctgcaaacacttgaatgtatacaggtgggggaacctaccagcgccgctactacgaacacaactagcagtacttaatcctcaaacaatccgaggtggagatcgaaaacattgttattgacctttttacgggcctttatgatgttttcgtaatgttcgcgtggcaactcaaccaaaaaacactgtctgtcttctggagcattctcaacttgtgcttccagaagcggatagttcttaggatcatcataatcaatgttgttatcgagatccagaataacacaacgccaaatttccggctctgctgatgttttaacagtttgaaccaatgacgcgtttttcaatcccaaacgatgcgaaagaatttcatgggcgaattctgggtcatcataacggatctcttcaccattccaacgaataaggcgaacggttgcactcaatttaaatttgctcatatttcattttccttgtcatcaattcacgtaatttcttagttggcgctggagggtttttaatgatttcctggatctgatcccatgtttcgggggatacttgttccttttccatcacaactatatttggattatcgcagcatttaccaacaagaacagaacgcccacaattaaggcaaatcgtatcagggcattttccaagtttatcagggtcgatagattcaaggaatcttcttgctaccgataaccgctctttaacttcttcttcgctaactttcatttgtaattttccgctattcataataatacccttatgcgatttcgtaacacttcatgacttcttcgaataccaacggcatttccagatcccatgaatccgcaactgggtcatatgttgcttgatctaccagggaaaccggaattgcagaaacccaaccggaaccaccctgaacatcaacgcgcttgaccgtcatcaatgataaattgttatagaattcttcactgaatttttcgccaccgttaccaagactctctaacatttcgcggttaacgagtttgatgtttttaccttccaaatctttgttgatatcgatgaagttcatgtgatgttccttttgtctgtttcgtttcgatgaacacactataccaaacaagccccctgcattgcaagaggctttttaacaaaaagtgctattaaacggcttctgttttcacttctaaaccgagtttagcaagcgcttcaactgccataaaatggttgtcaaacggaacttcaacggaaattcgaattgttggcggtgttggatctgtcagatattttgtcatttggcgatctttctggtttttgcaaaggatatccgccagcgcttctaccgcgtcagaattgaaatcgtatgcataatcaagtcgggattgcacataacgcatgttgcgttgaacataatccggatattcttcaacgatcggggttgcaacagccgcttcgctcatgcattcaaagttaggttttcggaaaataccaacacacttatcatcggattcgttatatacgaaaataaatgcgttgctgttcatgatatgaacgcactgatacaccggatgtcggtaaatcactttcagtactttcttcacagaaggtttgataatgtgatttgtttcgaatcgggaaccttcggtcactgtcagcagagattttacttcgtcgatatgtttaccggacaggtttgccataagggttttgtgtttctgataactactagtcataatatattctcttagtgatttacgtttcgataggcccaatataacaaagcccccgaccggagtcaagggctttttattaaaatagatctgcaaagacaacatgaatatcgtcgggttcggtcttatcgcgtcttatcttcttgataataggaaggaagaaactgtattccggttcccctttcttacgcgttttcgacttctggaggccgtcaacttccatttctacaatggccccaatgtattcatctttatgcgccatgatgtattcgcgatccagttcaccacgttcatctaatggaatgtatacacgggtaataccatcatcatcgtaacgataatcggtatcagttaacccagatccggtattcgttcgagccattccggataaatcttccaccacaaacccgccgaccttatggtcttctttagtgtgcgcgtagatatcaatgatccgtagttcaatcggggttttgtttttcagcttaacctgatcggctactcgcgaatctttccatttgaagtttctgtttttgagaatagaaccttctttaccgtcattgcggtaattgttatagtcctgcttcgcttctgcaatgttattaaccagcttagactgaatcaaacgaacagaaggcagagaaagatccaggaggatatcacgcaacaggctaaaccgctcatcataagtctgaacactttcagcttcgccgtaatacacctcatatggaataatatcccaaacaacataaacaatgtttcgctgttcttcttcggtgatcgtccctttcagagatttgtttacgatcccgttcccttcttcgcgttttgcttcggcctgttcttcttctggggtcgatactttgcgaacttcttccgcaaataacgcaatgtcgttatcatcatcgtccatgaaagcagataaagaaaaaggcatgtctgtttcaggttcaggtaatgttggtacggttccggaaggaacataaatcaattctccatccagaactacatcatatcccagataatcgcgaatctttttcagatcgatatcaagctgagttaacccttcgtactcgttacccgctctcgataccttacggtttaatgcttccagcaaatcagccatgcaacgcgcaccatcggctttaagctgcgagtaagcagggaaaatgatgcgacgtaaagccttttcactaaacggcgtagcgaggcattgaggctgttcaggaatgagtttcttccataccctgtttggtaaggttgtgccagcaccacattccagatcgcggttaatgatacggcgtagcacttcacgatcgttaatgttcactgatgatacaatatccagtaaacgatcacgcgctgcattgcctgtatatttccggcttgctaaatcttccagtaatgctttgattgcatcggaaagcggtgttgtgcctggtttcccttctaccagaggaaattgacgcacataaaacataatctgttttgtatacgtaatgcggaaaacttctttcaacaattcattatctgcattacgttttaaaattgcttctttctctttagttttcagagtagacgcaagttcattaaggattgacaagatcatttagtttctcttcaatttcaaaccacgattttactaactggtgaggtgcatttgtttcttcacgttcaccacgtaacatatggaataacggcaactgactaatgacgttatgacattcgtttaagtttatcgcgagatcatcaacaaagcaaaccagacgattaccatactttgcttttgcttccaggtaacgatgagtttttgtttcaccgtggcccacgaccatcacctctttaaacgcagacgggaaaagagtattcaggttagcaattcggttaaggcttgccgttggtgttgttcccagagcggtaacggcaacgaaatcatactgcgttttcagacggttgatcacaatcaatgcatcatcatacgcattcagataacgaatgaaagaactgttattgtattcttccataaggattttagccaactgctgatcacatccgaagatttcagtcatatcacgaaatttttcatctgtaaccatttctaatgcaatatcagtaggcatgttgtgcttagacaaaaagaacggcaatcccgactgccattttacggcgatcccgtcaatatcagtcagaattacaggctttgcgtttgtgctcattataaaagtttccaaatagttctttttctttgttaattcgggcagtaaccgcgtcatcataagacgcaaaccgacctatatagatattctttccatcctttttaatagtggaaagccatttgtttctttgtgtatcccatgatacaccagggcaaccagatttattcaacgaattgatattttgtttcatcatattctgttggtgagttgctgcctgaatattacctacaccgtcaccattgtcaacctcttttatgtggtcaacaacgtcaggaagaaacctattccgtgcataaaagatgactcgatgacggtagtaatattttcctttgaaccggattctacaataaccatcgggacggacggaacccgcttcttctccaacaacagtctttttggttatcttcttagcccagaaacacttaccagtttcgaaatctattcgtaaactgtcaacgagttcatcaagttctgtcaagatataacctcataacgatcaaagaaaagggtacttttgaatgcattcaattcacccaggaattgttcacgctcaaatgtccgataatattcaaattcgatgcacaacatatcatcatttgttacaccaatgccaacgacatcttgatgatatttctttgcctgttgaagcacgaacggatcgagatccgaacaatcgaaataaactacgtaactcatatcaacccttatacatataaacagcatctacccctgcatcaaaatcgactttatcaaagacaacgccgtttgatgcacattccttaacataggattcaataacaaccatgttatttgcgccgatggtaacataatacacacctgctttatagataacactctgaatcaacgttgaacgtaatgcatgttgtgcatacagtaacgctaatggattaatcgcgcctttgaacaggaacacgcattctactctttctttttcactcataacagatctctcaatcgggttaagttgcgtacaaactctctttcagtcagtacagtttcatttattttattctttcccattgaatgtgtcaaggtactttttccggttgctgccagcgcacggcgaaacccttcattaaggaataacgcattatatgcgttttcaatcaggatttgatacgcctcagaggaacgatgaatagggatacctttccagtataaggtctggttagtccaccattttttctttttgcctttgaactttgcggccttgcctaccagagtacatacatgggcttgcatatctgggttgctaaatttcaggctttgtaaaagcccctccatcgatgcgcattctaccccgtcgaacgtaaacggatgcggggcaaagttgcttaaagcgcatgatgggtatgaatcaccactaccaatattcataataattcccttaacgtatgctctacataaaaatttccgtatacttcctttgctttattttcgtatacagcatgtgcttcttctggtgtatcatagaatcccagatgattatttttaccatctattcgtatgcttgcttgccacttttcggatgctttacaccaatataccccacgataaccagacgtattgtttttggatttcttttgtttttgtgtattttgctgatttgttgcttcttgtaaattagaaaccccgtcacccatacaaacaccatgaatatggtctacaatcaacggtagatatccatgcgatacataaaacacgattcggtgtcttaaaaatggttgatggttatattctatagtagtatacccttttttggatacagtaccagcaatggaacccaacaaagatttcttcatacgaggcttcaattttttccatgtacaaataccagtttctgtatcaacatcgatatattgaagtaactcgtttatgccagaaatttcttcttgtattgttctggttcctttaccgaaactaatcacgatcttcaccttctttcttcccttcctggcgagcgcgtttgcgtcccgcgagtactaaagaatcatagtacggaagtttgcgatcgatgttttctgtacgatacgctttaccaaaatgactcgtttttaatccgtagtatttcacacttccacctcatgggggttattgtgcaaaccacgggccggatcataacgatcataagttgtttcgtactctgatttaatggatacatcacaacgagtgttccattgttccagagcgcttttaatttctttcactgagtcggtgaaaaattttacaatactcgccatacactaccaccttcataaaatgcatttagtttatgtaacatttcaacacgggctgattcttttgcggggctgcaagataatgttagaaccaacccaacaggacaatcaaacgcagtatcaatcgttactctttccagacgttgcccgtgatcacgaatcatcttcaaaaaggtatcagataactcagtattttcgtattccactttatatatgaatcgtgccatagttaaccccttgcacatgaaagataagaacgcttcttgaacactttaacttcgtggcccctaccgcttgcagcggtgttaagagtttcggcgtgacgcgcaccaagtaccagagttttaaccggagtaaccggagcagcgataacgataacagcggcccaacgagcaccaacagctttatcagtacccatatcgatagcagcagaagtatttttaccagccgccagaacgtaagcacgtgcttcacgacgagttttgaagaaaaccagttcattcatgttgtaagagcgtttcataatgtcatcctcataaaagtgttttcttgtctacgggattaactataagggaatgtgagaagggagtcaacaactttttatgtaaaaacgaaaaaagccgctacctttcggcaacggcttgatttttaatacttttcgtcaggctgaaacaccgcacgacacgcccacatagaggcttctttcagtcggtctttcgctagttgaatttgatggatacgttcaagcacctcatctaattcttcctctatcagtgaatcaatatctgaatttgatagtcgctgttcgatatcttccaggattgcacctaatgcattttcagcatctttgatacggtttactgtttctacttttttatcagtatggggtttataacccgtaatatcagaaattgccattatagactctctgtaaaagtacgggcaataacatcgcgttgctgttcaggagtcagtgagttaaaacgcactgcataaccagatacacggatcgtcaactgcggatatttttcaggatgttcaacagcatccaggagagtttcgcggcgcaacacgttaacgtttagatgttgtccaccttccactttaacagttggctgatattcgatctcgatctctcgctttgcaaacggagtaacgcgagctttgccgatcacagaatccatagttaatgtttttgatactacgatccgaacgtcgttaccttcttccagatagattgtaccagtatgcaaaccttctaaaatttgaaatgctttcattgtattacctttacttgattacataatacctgaacgggttgaaatgaaacgccagcattgcacgatccaggttaactgggtcgctaacttcttgtttcagtttccatccagcataaacgcgcaaacagaattgcactttgtggatccgtagccacggtttgtaaacgtacaaaccccatgctgattcgttccacatgagcagatacccatgatttacagggttcggcccaccttctgtttttgggttgcctttccagttgaatttgcttgtcgcttcacgtcctaaaacgtgatatgcgaagttataagccttgtttctccacaaccagccaacacgttgcatgtacaccccaaaatcccccagatgatagcgtatggacgcccaacggcggatatgtccaccatcaccatcaatagggttatcgaaggtttccatccaccggaagcctttaggaagatgccctgttttctcgttgtagaacggtacaacaaacggggcaaacagaattgctaatactccagtaataatgtcaagagggacgagtacgatccaacttgcatactttaaaaagcgcatagacaccccaaaaataaggctatccgaagatagccatttgattatttgtttgtgttgatgtatacaaatgattcatcaaattcactgctaaccgcttcatttgtaaacggaatttcaggatttttgaaaccaccactgataagatactggataaagaataccgaagtatcaagagaaatcaattggtgattgctcggagatatatttgttctacgaacgagattgacaatctcccaatcaaagaatcgttcgctatactctttcttgctatttacttgcggcgatgcaaagaacccttgtttggaatatgcctcaagcgctttatgaagttcagaatcaaaatcatcgaactcttttacaaaaagttccatcaattttttattgcgattcgttggattgctattttctccgatgatttttctaattgccggagacatttcaaacagtttttgtaaatttttcatgttatctctttaaatttcgtatgcagagtcaatacaagattcgtaaagctgttctggcgaattctcaatgagaggcgttgttttaccaaaaatatccagatcgtaaggatcgtcatctacataacattcactgaatttgaagttttttcgataatccccatcgggtaatccatttttccattcattaaatgtcataccatagcgttctttgaattttgcaggagacatatcaacaaaaatctgcgtatgttcgaccgcattatggtatttcacagtttcacgaaatttcatataaacctcattaaattagtgggctggaagtttctttacttcaccccgcattccggggaacctattaccggataccaacagagccttctccgtgagaaaggttgcatattccgaaccatttaacggcattgcgctacgcaccctaatttggtggcaagggtaggatttgcacctacaaccaacagaatctgattctgttcctcccgcttctctaagtgccttgccttgtttggtggcccctcccgtgacttgaaccgggaacctaaccattatgagtgattagctctacctattgagctaaggggccgatatttttagaactgtttgcggtagatttcgcgaacagccggatcaacagctttggcgtatttgcatacatcctcgaactgtacgatgtattccattacttccgaagcacgggaatttagttttccctggtgagcatcaatgatcattgaagtcattacatcgatgcgggtcggtgcttcgaggatgtcgcctttgtcgaaaagttttttagattttgcgacggtatcggcgatgattgcttgaatttgtttagccatgttggatctcttattcgtaaattgcttgaatcgctttatagtgtgcggttacatatttaaccggatacttgcgagcttcttcttttgttgcctttcctgcaatcagttcaggatccggcacgtttgccatttgtgcatgaggaagcggtacgcgcttacccataagcagggttttatattcttccggtacatccggcccacatgataacactgtgccgtagatcggttcctcgccgtgttgacgaacaccagtcacaataccagaaggtgatacaatttcagttccagccgctttagcgttggtttcaatcaaaacatattcaaaggatgcttttacactcagttcagacatacatttactcatttgttatttgatccggaaatgtttattcatttcttcggggtcaagttgtactacttcggcaccgtattgctgtagacgccatatccactcgatgccaccacgatcgtatttatgtagatatactacacgcttaatcatacctgttgcaacacaaaattcgatatttttcgcacattgtgagcaaggggaatgagttgtatacaaagttgcgtctttgatttgttcatgagacgccgccagcataataacgcgcatttctgcgtgtacttcgttgcgatctgaccattgtgaatgttcagggcgcttttcttcactcagtttcccgttatcatctaataagtgattgcactgatctgtacaacgatgactaggatcaaccgtattatttgcgcctacaaacacacgcccgttaccatttctcaatgcagcaccgacattaacagagacacattgagagaacttagaagcactgattgctctaagcataaacataatatcatcaatcttcatgatacaccatgtgataaagaactttccagtaaagttgaatctttccatcatctaacactcgatgatgtgcagaaacagaactgattactactttttctggactcggtcgaaaacaacttgtgaattttcgaacaagacaagcaatgaaagtatttgggttgtcgatttcgtcaatgatagtattaacagttacttcaccgaaatgacaaggaatatcatatgcttttaatgcttccagaagcaccatgctcatagagccaggatgatcaagcatctttcatcacctttagtaactgtttgataaaatcaggagtcgcttcaacgatatattctgaaccgttgattgtagtaacgcgaacttctgtctgatctttgttgatatcgtattcggcgatcggacttgttactacatcaatatcagttcctttgatgtatccgaaaacaccgccataataacgaggatctgggtatacagattcatccgtgatcatcgctctatcaattacttttactttcataatacagccgcccatgtaacgtagccagtaataggatttaacaccagcccgaaagattgggtgctgttagtatccacgtcatgaatatacacaatataggagtactgagaaaccggagtggcgctaacttcaaacccgcccggagctttaccctgttcctgaattttgttagcaattttttggcacaacaaacgaactttttggttaaaatcgcccagattttctacgcgaatgcgatcgccaagttcaaccatgatgtgtttatcttcacgaataacgttcataatataatcctcttttgtgtgggtactttaacatacccacattatatgtcaatcagaaatcaccataatcgacttgtaagcacggaatcccgtttgctcgccacatcccgaccggagtgtctctatcgtccactgcaataacaggataatacttatctaaaatcttgtcaaacaaaatttcttcttttacttcaaaatccgtcctggtatcaccttcttgacgcataaaaatttcatccggttcaacgccataactcaacaggctaacccatgtatcatgtgcgcattgcggattaccttcacgcccagacacaacaacacacttataccctgcatttttgtacaggtgaaacagttgctggatcgggatgtttggcggatcattgatcactttggtaaagtcatacgggctacgttgccctacttttgttagcgtaccgtcaacatcaaagatcacgcatttctgattgtggggattgacaatttccattgctggtacgaacccacggatcttacgatactggttaaacatttcccaaacacgcgaaacgggtaatgcatcacagccgcgtttgtggttacggcgaagcagttcaacaatggacacatcaaagtattcgatatgaaaatctgctttgtgttccaatgcaatttcacgccagtgatttttatcactttctttcagatgcgtgttgtgtatgatcacgtttttaccatctttcagagtggagataacaacgtgatcctgcatttctgcaatcatttcttctttcgctttggtgtatttgtatccgccagcacctttaccagcattatacaaagagctacgcagatcatcgcgagagatcgtaacagtattacccaattcacgggctttctcatgcgcccaggtagtttttccactacccggaacaccaatagtcataaacagattcatttcactatctcatattcaattagttctttgttatactcattcgtaagattgagccacatatcacggttccaatcgttttctatccatagaccttctttatcctttttcgcagtataaacttttccttctgttatgtcacgaaaaaacgttttggttattttgatttgcatttctcagggtatcccaacgtacacagaacattatcggtttgatccttttgtcttttaacgtcattcatccagctacgtaaaatcaatgaatctggatatgtcaatgcaacataaggattaccatcatatggcattacaaggtattgtttcccgtcgatttctctaacgtctgcaattactttccattttaccttcactgggttaacctttgcgggtagcgtaggaagtaccttaacaggtggctgttcagcacaaccaacgagaaaaacaccaagtaatactatcattgctaatttcatttttcaaattcctgcatgtattcgtcgaaggatttgttgattttgatttcaatcaatccaggtttctcaaacaaaaggtgtttgcgccctgcatccttgactaactgctgatctttggatttttgttccacgtagataacagtattgcttgtatttgtctcttttactttcttcacatcgtcttgcaacgatttgatatccttgcgtaacgatgcgttttcgattttggtatcgactgcaatgtaaaaaagggctatcaaagatagccccacgattacaggccatacccaagatgatatcttaggcattatgaacctcatttatattgttcaggaatgaactggtcgtaatttttaaccatcatatcaatgatgcgatcaaccagtttttgtggatcggtttcttcgaaatacttcataagaggcccgaagatgatccgaccgtcgtttgacaaatccgcgcttagactgatagcaaaatctttacgcgatttccctttattatcttcaatggctttgaacgcttttgcactcaaacgattgagactatcaaggaaaagtttttcgaaatcgtcaatctttttcagagagaccagatccgaactgaatagctgtttcaggtcatcgaccgtattctcaacaatatttaggaaaagatccttattgttggtaatgctatcttttgtgcgatgcagattgacataccagtttgttttgatttttacaaaacctttcgttgtcagaacaacatagccttcgaatccttcattctgatatgcttcttttgcgaatgcatccagatccagtacttcgatattctcacgcttaaccagatacgcacgtaacagcgcgtcagcaaagagttcatcataagggatgtattcacccgtgatgttgtgacgaacgttcaggatacgcagatcaggagaatcataaccaacgacaatacggtttttcggggaaacgtattccatgttcaccgtatagttttctttagcgatctcagttaagcgggtcagcaattcacgatttgccattaacacgctgtgcgcatccatagcttgttctgatttaaccgaacctttagacttgaccgccagaaatccaccgtcaaggaaagttgagatcaaggaaccatcttctttaatcatcacgtctaaaacttcgcctaattcaataggagactcgttaagcgcttcccatgcctttacctcggcatagttaaaaaacttctccatagggcggctgatgattgatacgggggtatctccatccatttcaaacatgataccgcgacattccagagcaccaggctttagccagtctgtatatgaggccatgcgatagttaaagattcgaacaggtgtacccatcacggttacttgatcaacgaagaaaaatgtttcggattcaccacacaactgcatgagttgtttgtaaagggtattgataattttagtttgtgcctttgtcatagtgctgtttattccattcagggttgtattttcgtatcatgttgatttcataatcatgatatgtattttcatcgtgagtagtcacgataagtttcacagtttttcgttttttgatagccatttccaatcgacacgtttttaagatgttactggggttggcttctctccaatactttgcattgcgatatgtgtctaaacgcttccacatatccctacacttaccaacatatactatttcatcgttaattgcaataaaataaacacaatgcctaagttcaccacacttaacaaaacttcgatcgatgcgaccacatttatcaagggttaagttgaattcagatttcatacattatatatccaaaaagtcaagtgatcttttcttaccacacaaaacattaaccacatgcgcgatgtaatcaccgtgacagggaagaggcgcacaggtacaaccaagcctctttccatcaagttctttcaattcttcaatcgtgatcgccccagtacgaacctgattctggaaccaggggataaacgctaaaatgttttctcccctggttcctgtgtgataagggttgccgaacttcgtacctctttgaatatcgacatcccaatcagttttgtacttgtttactacccgacaatcacgcgtatttgctggcccattttgcatacgcttcatcactgatttcagtattcaagtttccgacgaggtaagaacttacttcaacctcttgcggggcaacctgtacgttatcacttttgagccatttattcatccacggatacgggttagggatcggggtgaatggagaatcaagccctaccgctcgcatacgctgatctgtaaggtgttcaatataagcgatagtgcttttcagcgatacaccttctacatcaccaacagagaataaatgttcagcccattctttttcctgttcatatacttccaggaagatagccgttgcttcttttttcagcctacgggagatttcaaccatttctggatcatctttacccatttgccacaaacggattttactctgagtacctttctgatgcaatgcttcatcacgcgcaatcaagcgcataattttcgcgttgccttccatcttgccttgttcggcaaagttaaaggtgaaactaaacgacacatagaaacggatcgcttccagagcgttcacagcgtgcatacaaaggtacagcgcttctttgcacttagtggcctgtttagtgtattgctcgttataatacacgacagccggatcatttggtttatagccgctaacctgttcctgtagcatcatgatggttttcagcttatgacattcatcaattagagtatcataataccgtgtcattgatgcggaacgtttcataatcgcttcattgcgaaggatttggtcgaactgtacagaaggatcaatgtgcaagttacgttgaatatgcgtgtaactacggctgtggatggtttcactaaacgcccacgtttcgatccaggtttccatgctcacatcggatgcaattggcaaaaatgcgaggttaggcccacgtccctgaatggtatctaacagggtttgatactgtaggttagaatcgaaaatgattttttcatgttcaggaagttttgcatactgcatacggtcagtagacagatcgacttcttccggacgccagaagaaagaaagctgtttttgcgtcaggctttcgaaaactttgtgtttctgcgattcataacgtgcaacaccagtatcttcaccaaaaaacataggttgttctaagtggttatgatctgggtttgtattcattactgttaacatgtctttacctttaaaaagcccccgaaggggcattaatcaaatcttacaacccgcgcaatcttctgcggcttcttcttcatcaccagcaccatcacgcgtattatgatagtacagagttttaacaccgtagtagttagcatacagcagatcatcaatgatgtcttctgttttaactttcccgtcttcatagtttgccgggtcatagttggtgtttgcagaaatagactgatcgacaaacttctgcataactgctacatgagacagataccctttgttaccgcgtttagccatatcccagagcagatcatagaaatcaatctggttattctggttaggcacaacctggttatagtgtccttctttcgaagatttgatactcactaaaccgcgcggaggttcgatcccgttggtagagttactaacctgtgaactactttcacaaggcattaaagcagaaagagtagagttgcgcaagccgtatttcttaatctggctacgtaaccattcccaatcgcaattataaacaggtgctaccagttcatcaacggttttgcaataccaatcgataggcagtaacccgcgagcgtatttggtatcgttgtacaatccacatgcaccacgttctttcgccagttccatagaagcaacgagaaggttaaactgaaacgcttccattagctcatgaactttgtctgtatacgcttctgagtagtcgcaatagttgctcgctaaccatgatgcatagttggtgataccaacacccagagaacggcgctgtttagctttcagagcggcttttacagggtagttctggtaatccaacaggttatcaagcgcacgtactgcaatacgcgtgagtttcgggaattcgctgatatcagcgttatccagaacgatagccattagcgtacacaatccgatttcaccagccattttatcatcgtcatccagcggcgacgttgggatcgcaatctcacaacacaggttagacatacgaacaggaaccgtaaaactaccctgttggttgacgtgatgagtgttgaaaatgtatttgcgtcctgtctgtgcgcgttcctgtgctaaaagttggaacaggtcaaccgctttgatgcgtttcttacgaacagttggatctttttccaggctttcatacagttcttcaaatgcagtctgatcagcttcatagaacagatcatacagacgatcgttagcaacatccggactaaacagcgtaatgtaatcacgattcattaagcgtttatacatcaactggttaagctgtacaccataatcaagatgacgaacgcggttttcttctacgcctttgttgttcttcaacaccagaaggttttcaacttccagatgccagaaaggataatacagtgttgcagcaccaccacgaacgccaccctgtgaacaggatttaacagcggtttgaatatgtttccagaaaggaatcacaccagtatgaacagcttcaccaccacggattttagaacccattgcgcgaatatgtcccgcgttaaccccaataccagcacgttgtgaaatatacttcacgatcgcagaggttacagcgttaagagaaccaagagaatcacccgattcaattactacacaactggagaactggcgcgtaggagtacgtacacccgccataattggagtcggtagagacagtttgcgatcggaaattgcgttataaaaatcaacgatatgcgtaacctgtgctaacccagtttcttcctgatgcagacacatcgcaataagcataaacgcatactgaggggtttcaaagatttcgccagtatcgcgatcctgaaccagatatttcccgattaactgttgggaaccagcatacgaaaattcaaaatccttatcatgatcaattgcacgttcgaaaacttgaatatcttgcttgctgtatttttccaggatctctttatcgtatttccccgcttcaaccattttaacgatgtgatcgtagaacgggataggatcgaactgaccgtaaacgtctttacgcaatgcaaacatttcaagattcgatgctacgtattgccaatccggttctttaacagaaatatgatctgctgcatacttgatagcgatacgttgaatttgtttggtagtcataccatcgcggatcagttctaatacattttcaaggaatgcacgaacatcgatattatgaccatcacaggcccacttgagcactttgtatattttttctttgtcaaacggctggcgtacaccagaggattttactactactttaatgtcattcattctcttaccttgttaagaaaggggccgaagccccatttttcatactgccatttcagcttttagagagccgttattatgatacccttctaaggttatcgagtcaaagaattcttgatctaaatcaagtaagctatttaccttcggcatttttagaatcggtaatggcattggtgaacggttaggctgtaaaagttcttttgcctgttcaaccgcatttttatagatatggacatcaccaccagtccaaaccagatcgcccacttcgtacccgcaaatatcagcgataatatgcgtcaggagagcataggaggcgatattgaacggcaaccctaagaagacatcaactgaacgctgataccactgtagagacagtttaccgttgattacaacgaactgaaagaaacagtgacacggacgcaatgccatatcatcaagatcaacagggttccatgccgaaacgatgatcccgcgatcgtctggggttgatttcagttgttcaatgacttttgcgatctggtcaacaccactaccgccataataactatcatcatccccataaagagaaccaaacgaacgccattgatgaccgtagattggccccagataaccagaatcgtatcctaaatcaatagcttgtttttcatagttatcatcccagattgtgcgcttatcgctattttcaccccaggtcatccggcgaagttcttcaacgttggttgaaccggacaggaaccattgcaattcatgcttgcacggtttgaagaatagttttttacaggtagttgcggggaaacctctgtttagatcccatcgggcttgtgcgccgaaaatacgaatagtacctacaccagtgcgatcagttgattcaacaccgttatcaagtacaagtttaataatatccagatattgtttcattttatacctttttatatcgttcaactacgattttttcaatgcgttcatgttcttttatgtactgagtttttaaatcagaaaattcatattttaataatgcgccacccagttcagaaagagtaaatgcaacatcacgtttaaacgctggtgcgttatacacatgatgtccgtaaatgtttgtcaaaattacttcatcaaccattttattattgattgaatctaaaagcaaccccttaccaccgatgacacatacatttttatctgggtgtgttgcttgcattgtaccaatagcagcagacaacccgccaccgtggatcacgtaatcagcaacgtcgccttttttggttttcaaaaaactacctgaaccagacagaacacaatggatcctaccaggaagtttacccggaagagaggtaaacgtatttgcacccatgatcaaaacgctatctgcggtttcttctttgaagttctgcaaatcttctttacagtggccccacggcaacccttgctgatatccaaaagcgaaatcatcgtgatagatatcaattcccaatgcaaacaccgcttttactatgctcatattgcgatccacattttgttgtcttcaacagttacaatatagcccaatgcttcaatcataactttcagtttttctttgtacttctcatcatacccgcgaatcttctcgaattcaacagagaaaatactacacccctgatattttgcattgatcacgcgagattcaatatcaaaaatcatgatatccagaggacaccaatcaacagagtgaagtttttcgcgggttagtagtgttgtgttcttagggagtttcattccgtttcctgttcattcagccatgattcgatacgagatagttcttcatctcgcggggtaaatccatatgatgcgtcgatcatcccaatctgatcccaaacatcaatttccaggatctcagtcactggaggattttgtgagatatggtcacgacatacagcaagagcggtattgatggattcggtgacagtcagagtgtcaccctgtacagatacttgaataatcattcagaactccatgcatttttcaaagtaaatctttgttgggaattaataatcgtagcgcgaataacagcaagtttcatttcttcaaatttatttcgcgtcatatacaaaccaatcaaaggaaaatagagcctttcccattcgtaagtgtcgcttacttctttaacagcattgattaaaatctcagccatttgaaaatcggtaggaggaacccaaccaagattaatataaatccgtttttgtgtaccttctttcagattttccaaacgtaaccatgttggacaactcataatattttcctcaaataaaaagggaactgcgttaacagttcccattatagttcatttgattaataagtcaagcgccacaagtgaattgctgcatcaacttccttcttgatatcttccggagtgtctttgcgctgtgctttgactaacatagtcatcattttacgaatagtgttgttcatattcgctttctcacgtgctgcatgaacagcctgtgatttttccacttctggtgtatctttcttagccgcctgtggtttggtaggctgtgcgccgatttcgtctttctgtttcggtgctttttgctctgcttccttcttcacatgaggtgcggagaatttacccgccttgaagttagaattcatttgatctaaagcgctcttaacagtgttccagtcagagatcccacgtaaagatttcagagtatcagtgagtaggctaatgcttgcgcctttggtatcttctgcgatatcgattcctttcagccactcaatgtgtttctgaccagagtacgtgaaatcaaagctactgaatgagtagtatgctttacggtttacaacaatacgcttgaagttgatagtaacaccagcgccgttatcaaattcaacataaccgctggtaggcattacacgagcaccaatatcttttagtgctgcgaagtattcctctttaccgatacgattaacagtgcgttttggcttctcttctggcttcggtgcggcttcctgagcagctacacgtttaacaaaagatgctgaacgatgccccgccgcaaactctgcgttcatcttatcgatcgcgttcacaacgccttgaacactcggtttcagtttctgcaactctttgaacgtatcaacgatcatatccaggcaagcgccgtcctcgtcttctaacatagttccgcgaagttgtgcagccggacgatacttagatacagcaggatcatacaccgcgctaaacacatacgcacctttacgcatcattacatgacgatagaaacgaactttcagtgtaccaacttcaacaaagatatcgtttccgctaatgtcagcgcctaacagcttacggaatgatgcaaggtaatcagcacgtttgtatttgatatttttctgtacagggctgaaaatgctttccagttttttagacgggaacaggctttccggagtgatcttatctgggtttttgccccattgataatcacggcttgccattttatgttttttagttccaaccagtacaaaggtactaacagaaacgttacccagtgcagatgaatccggagcggctaacccttgtccattcggaggggtgcagttgaaaccgaaatcaaagtaagcatcaccagaagtgaaacggaacgaagcataaacaccgtgactaccttttgttacttcctgtttgaaagtggtaggcaatccagtgtatttggtgaagtattccgcaaattcctgtgcgttaaatttggtgctgaaatagtttttcgccactacaaagtaagcatcaactttttcttcccattctttcttttgacgtgcataacgtgcgcgaacgtcaccagcagtctcagaacgtgcgccactaggcccagtttttgtaacgacgtcgtaagcctggttaattttctgcattaattcattgctaccaccacggtcggggtgattgcgtaaggatgcgcgtttgaagagtctggacatttcggcgctggtttcgctaccagttgcgcccaaaactttcagtgcttcctgataagtcattttggattcagtgatcatttattgttcctcaaataaaaacaaagcccacgtttcgttacatgggctactttactgtatttatggatttcggtcaatagattttttcgaggaaccaaacagaacttttgttgttcttgattcgcgtcaactctatagggttatctttgaatgcttcctcaacatctttcatagtaactatatgtttttcttcaagaaaattgttgtggagataaaaccgatctatttccagagcggtttctaattcaaaagatttttctaatagcataatttcatcctcttaaatagggatatctaacggcccatcaaacaagagatatgtttatgaactataacaaaatttataactctatcatagaacatgctaaacaaacgcagtatgatggatatacagaatcacaccatatcatacccaagtgcataggcggaacagattccgatgataatttggttaatcttacagcacgtcaacattatattgcgcatctgttattagtcaagatgtacccaggaaacaacaaactcgtttttgcagcacatatgttaacagttggttccaatagatcaaaggaaagaacagctaaccgccgctatgaatggttaaagaaaaaggcgtcagaagcacataggaatagagagttcaccgaagaaaccagacagcgaatgagtaaagccaaaaagcaacaagaaagggttgtgtgtcctcattgcggaaaatcaggtataattggaaatatgactcgttggcacttcgacaactgtaaactgaaaccaggtaatgaaggattgaaacataagttcgagggtatcccgtgttcccataagaacggaaacgtacctaaagaaagggggaattgtccatattgcggaacagaatcttcattacattatctgcgttcacatataccgtattgcagaaataacccagatagaaagacccaagcaaaaaggaaacagttgatttgtccatattgcaataaatctggtgatgccagcaatatgaatcgctggcattttgataactgcaagtttaagacttcttaacttccattttagagaatcgaccgacttttgacataacaatatgtcggtcgaaatcttccggatctaaatcctgatgactgataacaattacgttaccatttatcccatccaatagcgcttttacggcaaaactaccatcacgatcaattgcaccatcgtacacttcatccaggatcagaagggataaatcaacaccagaaattttactggttacatcgcgccaggtgaacaataaagcaaggttaatacgtgctctttcgccttgactgaacgatgcgtaactaaaatcattacgacccagcgatttaatcgattcgttaaattcgtcatccagagtgaactgataatcagcacccaacagatccagatagtacgcaatctgtttattgaagtaaggaatataacgtttaacgatgctcgctttaacgccggaatctttcagcagatccgtaacaatacctctgaaatatttttccttgacaaatccagaacgtttggaatcaagttccttttcatcttcacggagtttttcaactggggattcgtcgatcaccacgtcttcctgtgctttatccatgacagcccgaacacgtttagccgctgcaacttcattttgaagtgtaccgcgtagtgattcgtatttggatttcagcccatttagtgtacgttgttgtgttagtaaatcatccatgattttctgtagctgatcttgtttgttcttaatcagcgtaagtttctgagtaccgtttttaatattctcggcaatctcttccatgcgttcaggagtggggctaattggctgtttacaggccggacattcaccacccttgcgatacatcacctcaagacgctgcaactgttctacgctcattgagaggcgtgtatagccatcacgcagtttttgaatatttgctgtttggtcttcaccattgatcacacattctgcgatctgggtttgaagttcaactaattgcgctttaatctgttttgctgtttctacgtgggaatcgtagatatcctggtaacgcgccgtattctgatttgcttttgcccgttgttcgtcaatgaacttttgatgtgttgcgatctgctgttgtacgtgtccaatctgcattgaaagcgtatccagttcacggttaacaccacggatgtatgatttgttcagtttgtccatttcactgatgatagacaaagacaacaaatcttcaacaagtttacggcgatctggtgttttcagttccatgaaaggtacataaccagcagtacccagaacgataacctgtttaaagcccaccaggttaatattcaacattgattcaagctgtgactgataatcaccagcggctgaatcttccggcagtttttcgccattcttccagatctcaaatactttcggcttttgtccacggatgattttatattcatcattgccgtattcgatcaacagttcaaccagacattttttcttgttgatactgttcaccagttgtccgactttcagatcgcgaaatgacttaccaaagagagcatatgtaagcgcttcgatcatggtggatttaccaccgccgtttttacccgtaatgagggttttctttgctgaatcaaaatcaatgacgatcggtacgttaccaaccgacaagatattttgataagtcaatgttttaaatttgagtttcatcaattatcctttgggatatatcactaatcatgtttgtaatcgtgctatcaaagcagtatatcacggaatcttcatccatgctattcaggacagtaaatgtccaaacctttgtttcgtgatagttgtctttaatcagagtgaaccccaatgacacatactcgttataggaatcctgctgtactgcaacaatcacatcaaatccaaacattttataaagggctttatatcgcccttcttcgtttaaaatattaacgtaatcaactatttccattgctcgtaacctctgcatacaatgcactcattattgcagatacttcggtcttttcttctggagtgatctgcatgttgttgatgtactcactaatcaatccagatacacttttgatttcaaaatcagtatcgacttctgaatcagtgatcacgcgatcgacaatgttcaactcataaactgtttcttccagttttgtttgaaacttaggcaaatcgttatcaacttcgcgtacaatcaagcgaacagagcaatttttgtaatctacaacatcaacatctttttgatccggataggtgatccggcgatggtggcatactgggttagcaatgaaagttaattcacgtttaccgtcgccataagatagctcatagaagcccctggtttcgtcctcatcgttcgcgctcatggtaagaggtgtaccgatatagaaaacgttagcgccttcgttagcgtgatgatagtggcctgaatacacgatatcatatttctttaagaaatcaggttcaagcccatgttccgctttactgttcttatagaaatagtatccggacagttcaaagtgtcctaagcagtattgagattttgactttttgatgaaatcaaaaatctgctgtgtgttttcttgacaaatccacgggatcaaatcgattgattgcagcggagaagtatcaagatttactgtcatcggttcatcaacaaccgtgaagcaatcatactgatcaagaatctctcgcggtgagttagggcggatcttgtctttaaactggcaatcgtggttcccaaccagaacatagatatgtaatccggcttcttccagtagtggcacaatacgttcacgaatgaatttcatcgtggtttgtgtggtggccttgcgcacatcaaagaaatcaccagcatggaaagcctcggtaatgccgtttgctttgcagtgttctacgatttgtacgaatacattgtataggttttcttcattccaggggttgtcctgacgcaagccagcgtgagtatccccgatcattaagtactttctcataagaccctcatagcccctttcggggctacttgtttgttagtgcttctgttgtgaagctacgatatttcgaattgatgctagtgaagtgttccacatcgtatcaatgaaatcctctgtatacggctgtttgagcatatcacgaagtttcttaaccgcatacacatactgaactttattacccctgaatagggcttcctctgcgtgtctacggaggcgtttgatctcagtccggttcttcttaatgaatttttgtgctcgcttcaatgcgtcggcttctacacgtgcctggatcttttgtcgaatttcctcttctggatccacttcttccacactggttagtacttctttctcttcatcaatcataagtgatctccatgatcatagtttcggcgtttatcatataagacaaaaccccttcttctacttcgaaatcggggtttcttacgtcagttggatcgatgataaccgggattcccacgttttgcaactctaattttacgaagtagggtagcaagtcaatttcgtaatcgatatcagttaatattttgtttaagtcaattattgctttcatagaaaatcttccaatgttgggaatacttccgcttccttgtctttggttttggtggcggaagcctcgtactgagatagtttgtcatgtagatcttgaatgaaaccttcgtctgcaatactaaccatatctgaatcttcacagtcgtaaacgtgctcaaggaagaatttatatttcttcgcgttctcttttttctcgtacagaatacgtgttacgaatgcttgccaacatgctttgttaatgtaaccgtaaacgttggtataacgagtttcatcgaagttatgcagtcctgagattgcagcggaaattccgtcatcgatcatatccattttccaatcttcggaataacggttgaagttgtaacgacgtgatagcccgtttgcaatatccataatagcagcccccaactcattaggcattttgcgatcacctgtttcggcgatttgctttttccatgcacagaggatagggtataatttttcattgtctgcgtagatattggttgtttctttagtcatagtattcatatttcctctttgaagttaagaatattatataataactgtagacaaaatcaaatttcattctatattatttaaggttaaagtagatctaatgatctatagatcagatctaaattatataaaatttattgattttagtacttgacctacaatgatcattgtagtaaaataattattaattaataaattatagatcataaatttgatcagatcaagtattattgatcaaaatttttatggtcttttgtattgacttcatttcgtaagttactacaataaccccgttctttgaaaaattgaggtatgtatgagcagttttgcaagcatgtttaacttgaacaagctgatgcaagatgaaggggaacccgatgatactatggtcatcgatatctctaacatttccatcgctacactgatgaacaacttcaaaccaaaggaacaagcatccatcacgatcgaaatgattcgtcatctggtgcttgacactttacggtttaacgttgtaaaatttaaaggtgagtatccagaaatcgtgattgccttcgatgacagaaattactggcgtaggcaaaaagcctggtactacaaaaaacgtcgtcagatcgaacacgaagaatcagaatgggattgggatcgtctgaacaatttcctgaatccggtgttcgaagaaatccgtcagaatatgccttatctcggattaaaggttgaattcgcggaagctgatgatataattgctgttgttacgaaaaaagctgttggtgaaggtagacgagtattagtggtttctgctgatagcgactttacacaactacagaaatataacggtgttcgtcaatggtcgcctacccagaaaaaatgggtaacgcctaagtacggttcgccacgtaacgatctgcgatacaaaaatatcaaaggcgataaaaaagatagtatcgcttgcattaaaattagaaatgattatattgtgacgaaggttgaaggtgaacgcgccccagcggtaaaatcctctgagttagaggcatggctggaggcagacgatccgacaacattgatgacccctgaatgggccgcacgttacaaagaaaatgaggaactgcgcgatttcgaatttataccaaaagatattgaaaattcgattattgaagcgtataatactccaaaatccggaagtaaagccaaaatggaacgttacttcatggataacaaactttcccgtatgttcgaaaaactgagtgatttttgaggtaacaaaatgagtgtagaatttttacaaacaaaccctgatgtagcaaaacaggtaaaagaactgatcaaagaagcatccaacgtgaaaactcaagttgagatcttcaacggtacgttcaaggatatcaaatccaaagcaaaaactgatttcggtatcgatggaaaaaccttcgggaaactgttcaaactgtatcacgaacaggcccgtaccgctttcgaagaagaaaacaacgaactgatcgaactgtatgatatgatcgataaggcgtaaagcatgatcggaaataagaccgaagtcggtttgtatatcgaaaatctggttgcctctgagggggcaacctacatggaagcaacgctacaatggatggatgaaaattctattgattatgcgatgctgaataaaacggttcctcgcgcgatccttgataagattagcgacgaagcgatcaaaggaaacatgcttcgcccatcggttgcgcttgaacatagttcatcaaccactctggacggcttcatgtgagattcaaagctccgtttgctgatagcgaggcgaattcacggcttgtgcctttgtctgtatacaagttatatctggcgatgaaaactcatttccaggggcgttttgatgtccttcaatacaactggcagatcaaagttagtgaaaacgcctttaacaagcgaaaggatagatatttctttgtaaaattagctcaacgctttacattcaaagaaatctattttatattcctctccaacttcgtagccaatccggatttctgggtaggcgatgttgatgaagatagtattgtcttttacaggcagtacataggaaagttacaaagactagataacgtgtttgtggatgacgttaaaaacgtgtacgaattcgccaaaatgaaagagatccccgtgtctctggtgttcaagtacagcgaaaaatcatcaacgtcctacataagcaaacttgtcctgtcaaatgtgatatcttacgaatcgtttttgatttttgactcatttttaggtatcataaataaacacgatcaagtagctgatgatattatttggtctgactttagcattaagttaaaggcatacagaaaaatatttgaccttactgaaaaagatatcataaaatatcgaaacttaatgaaacaaacgttaatcaaactaaactaaacgagaaaacagaatatgagcagcatttttaaacgtcaagatcccgctaaactccaggcacaggtagcaaatctgaaaggtggttccggcttccagaaagatgagaaagaatggaaactgaccctggacgcacagaaaaacggttccgccgttattcgattcctcccagcacgttccgatgatgaactggcgttcgtccgtatcgtgagccactctttcaagaaaaacaaccagtggtacattgagaactgttcctctacccacggcgattatgacggctgtcctgcatgtaagtacatttccgaaaacgatctgtatgagaaggctaaagccaacaaaaacgggccagaagataagctactgagccagatcggtcgtaaacaaagtttctgggctaacgtcctgatcgttaaagacccaggcgctccagaaaacgaaggtaaggtgttcaaataccgcttcggtaagaaaatcatggacaagatcaccgccgcaattaacggtaatccagaacttgatgaaccgggtattgctgtaacctgtccgtttgatggtgctaacttcaccctgaaagcgaaaaaagttggtgattggcctaactatgacgatagttcgtttggtgttccggctaagatcaaaaacatcgacgatgaagaagttcagaaagcaattttcgaaggtatgagcgatctccgcccgatcaccgctgaaagcgaatttaaaccgctggctgacctgaccactcgcttcaataaagttatgggtagttcgatcggttctgctggttccagcgcttccgctgaccttgatagcgaactgagcaacttcgataacgaaatggctaagtttgacaatcagacatctgatgtgaaatcatctggtggtgttgcatcggttccggtaggcgaagatgacggcgtaccgttcgacctggatgattctgatacctccggtgatgacgacctggataaactgttagacatgtaatacaagcgggggcttcggcccccactcaaagaattctaagttagagaagaaatatatgaatgaaagtaatgtttttgttgactacatgaaccgcgtccgtaaatcctgggttgctaaactctcggacgaaacaaaagaactgtttaaagctatgcctcaagaggaacgttttaaacactatcgtgacattgatgaaaaagtggttgcggaacatcgtaaacttaccagcgaacgccgcgaagatccgaagcgtacaaccgttaaagaaatggctgatatgcttgacacagcagcggaaaccgttgtaaaatcacttattaagtaacacttattgaaaactaaaggctgaatatgaaattctctaaacaaactattgatatcctgaaaaacttttctcaaatcaactcttcgatcatgctgaccaaaggttcattcatcatgacgaaatcaatcaacagcgttgtatacgcagaagctgaaattgctgatgtgattgatgaagatgttggtatctacgatctcaactcattcctgaacatgctgaacatcgtcggcactgacgcggaaatcactcatgatatttccactggtgaaatcgtgattcgcggcgacaagatgaagatcattgaacgttcagcagacgcaacaacgatcccgaaaccgaaaaaacgtctggtgatgccagtagcagatctgattttccagattaccgctaacgatttcgaaaaactgatcaaagcgtctcgcatgatgaaactgaccgacctgtccgttgaaccgattgatggtaaactggtcatcaccgcgaaaagcaaagaaagtcaatcaactttctccgttgaagtcggtgagtatgaaggcgacaatgttttcaattttgatatgaagattgataacatgcagttcatcaacagcgattacaaagtagagatttcctccaaaggggccgcaaaattctcttctgataacggcgttgcttacgtcgtcgtacttgaagcaagtagcacattcaagtaagatagttttaaggggctacggcccctttcttttacaccatttattttgaaggtatattatggaacttagtgaaaatattgaaatcatcgaaaccaaatacggtaaaatctcccgatctcctgatgaatttgcatgggatcagcgctatcgcccaacaacgattgaagagtgtattttaccttctggtgacaaagccgctatgcggggcataatcaaatctgggcgtgttgagaacatgacccttgtatctgattcccctggcactggtaaaacgaccctcgcgcttgtgttggcccgtgaggttgatgctgaggtgttctttgtcaacggttcgaactgtggtgtaaacttcattcgtaatgaactggatcgttttgcttcatcaatgacgcagaaaccaggcggaaagattatcatcattgatgaattcgatcgttctggtatggcggaagcacagaaacacttgcgtagctttatcgaagcatacagtaaaaacgtttctgttattgtaacagcgaacaacattaacggtgtgcatagtgctctgctttctcgttgtcctcctgttaaattcggtgttccgtctgatgctgaacgtatcgaactgatgaaacagttaatcaagcgttgtttcggtatccttgaaatcgagaatatcaagtatgatcctaaagtcattgcagcgtttgttaaagagcattatccggatgcgcgttctattatcaaagcgatcgggttctactcgaaacgtggtgaaattgatgcggggatcctaaatgagatcgttggttctgatgtgtctcatatcattaccctgttgaaagaaaagaactataaagggttgcgctctgaggttattaaatatgcgtcagaatacgatacctttatcggaaaattgactgatacgatttaccctatcgtgaatcaggattctaaaatcgcactgatccagattgtaggcgaaaacaacgcgcaatacgggctggcgatgaataaagaaattcatctgcaatatctgttgatgaacctgatgctttctatggtctgggaggcgtaatcatgagcctggcggaatttctggatgaagaagagttatccccgcatgaatccgcttggctttctaaagattgggataaggttgaagaactggtcaaagagtacggcaaggataaagaaaacaccttgtttaacatcatagacgaaatcaacaacggcaaaactccgttggttatcgatgaagtgtatgataagtactttgtagacaacgcaatgagccagcacatagacacgatatataacgcttatgtgatgaatctggtaggcggtagtatctctgaccaaatgcactataactattatctcaactctgttaggaaggctaaacgcttcggtgcatgggctaaactatcggaagattttgaagagaaaattattatcgaaatccttcgcgaaaaatacagtgtaaatacacgtacagcgatggaatatttgcaggaacttaaagacctcggaatgttcgaggattggaaaagaaaacacgcaaaggtcgctctgtctttgttgggtattgtgaaaaacaaagctgaacaaaagaaattggaaaaattgattaaacaatggtgatgtatgttagaaattcaactaatcagcgacgattcttttttaaagatccgtgaaacgctaacccgtattggtattgcaaacaacaaaaagaaaatgctctggcaatcgtgccacattctgaaaaagcaaggtaagtattttatcgtgcattttaaagaactgttgaaactcgatggtcgtcaagtcgatatgacggaagaagacgaactacgccggaacaacattgcgcgacttctcgaagagtggggcatggttaagattgtaaccactgggttgaagtttgcagaagaaaacaacttccgcgtactgactcactcgcaaaaagcagattggatcctcaagtacaagtaccggatcggtcactaatcaaaaagcccttgcattcgtgcaggggctttgttatattgggtgtacaccattgagagggatatattatgactattaacgaaatcatggattcaatcaaatccaacgaaactttgatcatcccgattgtaaaagatgacatcttgttatcgttaacttgcaatctgtcagatacccgcacttacagctatgcacaacactactttcctggattttacgatcgtaacatttcagagtacacattgttatgcaatcaagttgaaaccacttatttctatgagcgtattaaaaaatctctggacttgatccaacaagcaaaagaagtctttatgaaaagaatggaggacgcgcaatgatccgcacttacatgaataaaattttcgctgcccgtatggataacgttattgatcaacgtgcttatgatgatctggtttcccttgcaacctgtcaactggatgaacatacagtaacggaaaggaaactactggttaacaaagctatcatgatggttaatcagggcattgcagaagcaaaatatcatagtatcaattccagtatttttagcatgttattcgacgggtttaaacttgaacgccagcttgttcaactgagaaagatccgtgacttgttagcagaagggttgttggttttagaacatcgagtaaacttgaatttgctgtaggtagtgttacaatggaacattatattaatggagaatacaagatccaatgaatgaattttacctatcagttgaacaaatgggagataccatttacgagcgcttcgttgactctaacggcaccgaacaggtacgtaagacgaaatatgcgcccgtaatgtatcaacacgctatgaatggcgtagaaaccccatacaaagacatttacggcaagccttgcctcaaaaaacagtttgacagcatcaaagaagctaaaaactggatgcagcgtatgcgcgatgttgggatggaagcgctaggtatggacgattaccgactggcttacatttctgacatgtaccggaatgaaatcgaatacaaccgcgaacacattcgcattgcttctatcgatatcgaggtgaccgctccagaatttccggatccgcgtgaagcaaaatatccaatcgatgcgatcacccattacgatagcattgaagataaattctatgtatacgatctggttgagggtggccttgcggaatggtgcgcggaaaacgttgatcgcaaagacattagcgaagaagatttaaacaaaattgtttatcggtctttccagaccgagaagtcgttattgtctgcgtatatcaaagattggaaagagcgaacccctgttattgtaaccggatggaactctgacaaattcgatattgcatatatcatcacgcgatacctgaacattttcggtcaaaacgtggtaaggcattttagcccgtttggtaaagtaaccgccagaaccactactgacgcttacggcaacgaacaattaggatatgatattttcggcgttgctcaaatggatggtatggcgctgtataagaaattcagctttaccccgcaaccatcttaccgcctggacgcgatcgcggaatacgaaactggtaaaaataaagttgagtatgaaggttccctgtctgaactacgccagcgcgatcaccaactgtacatcacgtacaacattgttgacgttatccgcgtacttgatatcgacggtaaacgaaactttattgaactggttctgtctgtagcgtactatgcaaaaattaacttcccaggggttatgtctccgctgaaaacgtgggacgcgatcatttataactctctgcgtgaagataaggttgttattccggaaaacagacgccatactaaaaccccttaccctggggcatttgtgaaggatccagttcctgggccttacaaatacatggtatcgtttgacttaacaagcctgtacccttccatcatccgacaggtgaatataagccctgaaacgattatgggaagttttgcggtacgtgctcttgaagagtatattaataagaccgcgccgcgccctagcgatgaatttagctgttctcctaacgggtggatgttccgccgtgatatcaaaggcgtgatcccagtagagatcaagaaagtatttgatcagcgtaagatgtggaaaaaacgaatgatggcgggtgagcgaaatcttgaactcatcaagcacgaactcgaacacttaacagacgcgcataaccaaatggttgatcctgactttgatttctatacagatttcagtgatgaatcgaaagcagttctgaaaactcttacaaaacaaatgcttaaagcagttaagcgcgtgtgtgagaagaagatcgcacaagctaacaccgcacagcttaaccgtaagatttctatcaactccctttatggtgcgttgggtaatgaacacttccgatacttcgatctacgaaacgccagcgcgatcaccatgttcgggcagttggctatccagtggattgaacgtaaggtaaacgaataccttaacgacctgtgcggtactacggatcatgcatatgttcggtactgtgacactgactccatttatgtttgcatggataacgtgattgcaaaagttggtggtgaggctaaatttaaggataataaccattgggttgacttcctggatcgctttgctaaagaaagaatggaaccgatgatcgataaagggtatcgtgaactttgcgaatacatgaacaacgtggaacacctgatgtttatggatcgtgaaatcatttctgggcctccgttgggttccgaagggttgggaagtttctggactgctaaaaaacgatatgcggctaacgtgtgggactccgaaggaacccgctatgaaaaaccgaaactgaaaatcatgggtatggaaacacagcgatcgagtactccgacctctgtgaaagtattcctgaaagaagcgatccgccgtatcctgcaagaaggtgaattatctttgcacgaacattataaaaagttcgaagaagaatataaggaacttgactacagggaaattgctggtgtatcatctgctaacaacatttcgaaatatcgtgatggggctggctatccaatcaagggaacaccaaaccatattaaaggggtgctgttctttaaccgtttcactgctggtattgatggtgttacgccaatcatggaaggtgaaaaggtaatggttctaccactaagggataaaaacccgtggcaagccgattgcatcgcgtggcaatccggaaataaactaccgtcagagatcgaaagtgatattctggcatgggtagattatccgggtatgtttgaaaaacatgttattagtccattgactaatatcacggaagtatgtaaaattgattatgaaaaacgtgccagtttaaacgacctgttcggtgactggtaaactctaggggcttcggcccctttcattaactagtgagatatatagaatgagaatgaataaatcggaaaaattaaatgtcaaacaaagcactactaaaaaaactgatcaaaaactcgaatagccaaactgcatctgtactttctgaaagcgacgtattcaacaatattaccatcacgcgaacccgtgtgccgattctgaatctggcgttgtccggtgcgtttaacggtggcctaacttctggtcttacccttttcgctggcccgtccaaacacttcaaatccaacttaggtttgctgactgtagcggcttatctcaaaacgtatgaagatgctgtgtgcctgttctacgattcagaaaaaggtgttactaaatcctatctgaaatcaatgggtgttgatccggatcgtgttgtgtatactcgtatcacgacggtcgagcagttgcgtaatgacgttgtaagccagcttaacgcgcttgaacgcggtgataaggtgattgtattcgttgactcagtaggcaacacggcaagtaaaaaagaacttgctgacgcgctgtctgataacgataaacaggatatgacgcgagcaaaagcattaaaaggtatgttccgtatggttacgccttatctggctgacctggatatcccgatggtttgtatctgtcatacctatgacacacaagaaatgtacagcaagaaagttatttccggtggtactggtttaatgtattccgctgatactgcgatcatcctgggtaaacaacaggtgaaagaaggtactgaggtagtgggttatgatttcatcatgaacatcgaaaaatctcgattcgtgaaagagaaatcaaaattcccgctgcatgttacctatgaaggcggtattagtatgtattctggccttctggatctggcaatggaaatgaactttgtacagaccgtaaccaaaggctggcgcaaccgtgctttcctgaataccgagactggcgaactcgaagttgaagaaaagaaatggcgtgagtcagaaacaaatagcgttgaattctggcgtcctctgtttactcatcaaccattcttgaaagctatcgaagaaaagtataagatccctgatcgtgaaatcagtgatggttccgcgctggaagatttatacagcactgatagcatcccagatcctgatctggatgatgacgatatcccagaatcatttgatgatatcgaagaagacaacgaaattttataaaaactatggggcttcggccccataaccgaggcaatgtatggatatcgagagcaaagcaaagaattatattgatgaagcgatgaaagatgttattcaggaacttctgattaacgatgaaaaaggtgttgcgcatctggtttatattcataaggtgttttgggatcatggtctgaaagtagaattcagtaccccagacgaagacaaagaagcgttgatcccgctggtgcatgatgcaatttatgcacagattaaagagcttgaaaaggattcagttgtcccaaagcctaagctgacattatgggatgtattcaaacaaaaggtttacaactttttcatgatgttcagcaacctggtataaggcaatacaatgatcgttgatacaatattttctaacctgatttataacgggacgtattttgtccaagcatggcctcatctgaaaaaggaatattttgaaggcaatgcacaagttttgtttgacctcattgataaacatgtacaggaattcaacggtattccgtcaaaaactgctttagaggttgcgcttgacaaacgaaatctaagtgatgtagtctacgaagacacgaaaaaggcgattcagtcgctgaaaaatgcgccagaagatttagattggctaatgaaggaaacggaaacatattgcaaagacaaagcaatgtatcgtgctctttctcgcgcaatcgagatccaggctaacgcagaaaaaccactggcagaacagaacaagaaacttcctggtgttggggctatccctgaaatcatggaggaagcattagcaatttcattcgatagttcagtaggtcatgactatttcgaagattatgaaaaacggtggatgctttaccaatcgaaggcgatgaaaattccgtttggtatcccgatcctgaacgcaatcaccaaaggcggcgcggaacgtggtacactgaatatcatcatggctggtgttaacgttggtaaatcactgggcttatgttctcttgcggctgattatctgcaacagggtaaaaacgttctttacatttctatggaaatggcagagcatgtttgctctaagcgtatcgatgctaaccttcttgatgtgactatggatgacatcgacgaagggaacattacatacgcagactataagaacaaaatggagcgccttaaagcgggtaaggttgggcgtttggtggttaagcagtaccctacatcgggtgcaggtgcaaaccactttagagcgcttgtgaaagagcttaaattgaagaaacagtttgttccggatgtgatcattgtcgattacctggggatctgtacttcaacccgtgttaaaggtgctgaaaatacctatattctggttaaagcaattgccgaagaactacgcggtcttgctgttgaaactaataccgtgatgtggacaggcgcacaggttgggcgttctgcatgggatagttcggatgtgagtatgggtgatgttgcggaatccgctggtttacctgctacggctgattttatgttagctgtaatcgagacggaagagttagctgatcagggtatgcaactgttcaagcaaatcaaatcccgttatggcgataagaacactttcaacaagttcaagttggaagttcgaaaaggtaatcagcgctggatggataccgacaacagcgaatacgggtttaaatctgactaccacggcaatactatgcctaaaacagtagaacagacacaaggcccgatgattaaacaggctgaatctacccgacgtgaaaaaatggcgcagattgcaaaatctgacattcaattttaattgactggggcgaatagccccataaagaatgtaaggtaatgaaatgactaagactataacgattccgattccggctatcaaacttctgactggactgacactgatttttgcagcggctaaagtatttggcttctcgcatatgtcatggttctgggttctcttcccagttctattacccgtctacattgtagtaggcgttgtgttggtgggtgttgcgatctatctgctgttctcactgattgccagtgacaaggccgaagatatgtatcgctgggtaaaagccaaatacgaaaaacttttcaaaaaatcgtaaaaaggtattgacctgaatctccattgtggtaatataactcacgtagacaagatactgagttaaacaaaggagattcaaaatgaacgtattcaacaacccttacaacgaaatgctgaacccgaatgttgatttcagcgatggttattttgacgcaatcgtaaacagcatcaaaaacaaaggtttgctgttagcgatgctggaaaaaggcaaagatgacgttgaaggaagtgttgatttcctctggaacttcctccctatcgaacctggtttcaaagttggttgtaatgaggaacaagcgaaaaacgttcttcggtatctcatcaataacgcataaaaaataagccccgaaaggggcttttttgtatctgtaggtattgcattctttcgcaaaagatgataccttaatcataacaaaggaggacattatgaaaatcgcattcgttatcactttcttacttgcagcactcaacatcgtaactggtaattcttttagttggtgggtggtggcaatgccttacattttcgtgtatagcaaaatcatggtgattgctggtgtgaatcttgtccttgctatcttactatttgtattcgccgccctgaatggtgaagcaggttctacctggaaagccatgaaagagggtgttaaagagggtttgaaatgataaatttagatttttgtaaggcagaaatgcaagctgacgcagacgaagaagaaccgaagttcgatagtcctcatagttcgcgctggatcgtagctgttgacgatgaaggttatgttacggtattatctcgaccattcattcatgatgcattctttgaatgtggacgcagcgcggaagatatcgggcttcctgattctgtcgaaatgcctcctggtgtatatgaatggatctgtggttttgaacaaactactgactgggaaaccggatacgtggacggatgggaattctatccgaatgaatcaacattattgtatagctgggacaatggcaaagttaacgaaagcgggtgttaaagagggtttgaaatgacaaaacgcaccattaaggaagaactagaaggaataattgagttattacctcttctgtgtgttaatgtcatcactggtgatgttttatggaacgcagatgtgggacaacgagcaagaaaagggaatgtcgcaggacataaaaacgcagatgggtatcatgtcgtaacatataaaaggaagcaatatcttgttcatagaattgtttattatatccatcatggtatacttcctgagtatgtcgatcacataaaaggtattgaagctggaaatggaatagacaatcttagggaatgtactcttccagaaaattcaagaaatcgaaaggtctctaaaaggaaaaatattccttatatcggcgtacaaaagcatggaaataaattccgcgctgatattcgttcaaacggaaaacagatgtatataggtctttctgatactatggagggtgctgccttgttgtacgatgcaaaagctaaagaacttcatggagattttgcaaaattgaattttggtgatgttaatggcaaaattgacaaagcaagagactaagaaacacaatcagataatggatctggttcactctgacaaagcgctaacttacgaagagaagttgttcattattgaaaactttcatgaaggcgcgtttacaaataattccgaattaggggcgttctttacccctattggacttgctcgcgatttcacaatcgatgcttgcacaggtggaagtgttattgacctgtgtgctggtatcggtgggttatctttcgctatggttcattacatgatgtacaatacgccgcgtgaaatcgtctgtgttgagttaaatcacacatactatgagttaggtaagcgtatcgtaccagaagcctcctgggtgcatggagacgccttaacaactgaatttaatcaggtgtttgatatggcgatcagtaacccgccttttggtaaaatcaaaacctctgattttaagggtaagtatacaggggcagaatttgagtataaagtaatcgaacgtgcatcacagatcgcgcgtcagggaactttcataatccctcaaatgtctgcaaatttccggtattcgaaaacacactgtttccgacaagatgacagcaccacatcaagtaaatgcaaaaaatttcttgatgaaactggcctcgttatgaatcctggatgcggtatagatactgggtattacctggaggattggaaaggggttaaaccactatgcgaggttgtttgtatggagtttgaacctgaaaccaaatctgatttattcactttcacaatagagtaataatcatgagtgatcaattagttaaaaatatggatttaacatatagcgtccggatgatccggctactcaaaaaaccattcacagagtggtctgcttacaagctggggatccttgatggacaaggcgaagtaattcgcaaccccaaaacaaaagaagagttagaagcgtattctccttttcatcgttcagtacgccatatcaagcgtagaatgaattctgttccgtatatgactgggtttatgaacttaacaagttcatatgataccctacgcaatcgctacaatctgacagaacaagagcatgaagaaatcatgatgaacgttccgcgcctcaaagaatattatgataaggggcgtatgttagaggatatggtcgctggtgattctggcggcgatacagaaaagattgcttctggtgtgactactggagcagtaaccaacatcgggccgaaagtattaggcgttacccgtgcagggaaaaggaaaaagaaatgataattcctccgctgaatatcactatctgggctactgctaacgattatacatggtttccaatttgtatcatgtatatgagtgacaacgcgaccgtttatcagaatcgtcgaaaaggttctgataaaattgatattgcaataaattattcgtttaaacaggcatttcgtggttggaagttaatgcttgacggaacagaaaagcaagtaagttcttgacagaaaaatcctcttagtctatgatattgaaatcatttgattaggaggatttacaatggcggttggatttggccctgctgacggtgttcaagataccattcaggcaacaatagacaatgcgatagattttgcacgttctcaaatcagaaacggagaatcattaacgcattgttttgattgtggggatccgatacccgaaaaacgtagggctatcgtgaagggttgccgttattgtattgaatgccaaaaagaacatgacgaaatgatcagcgcggggtataatcgacgaggatctaaagatagtcaactgaggtaagaaatgtatcttgatatagaatttgcaacccgaatcatgggatcactgcctcaaagcgaaatcgttcgtaaatcgggggcattaagcatcaatgcgcgttgtcctatttgcggcgactcaatgaaagacaagtacaaaaaacgattttggatctacccttctaaaaagggtgatcatatgaattgtggttgttttaactgtggttatggtgtaccgtttagcgtattcctgaaagaatattatccagacgattaccgtgattatctcatggaatcgtttaaggatcgcaattcgttaaagccaacgcatacagaacaaccgaaggaagagaagaaatttattcctactcttcaattctgcgaaaggttagataccttgccggatgaacatccgatcataaaatatgtgcagaatcgttgtatcccccgtgacaagtgggatcggttgtggtttactcgcgaatggcaacaactggttaatacggtgaatccggatacctatccgatcgcaaaaccagaaccgagattagtgatccctatcttcgataagaaagggaaaattgaatctttccagggtcgtgctttacgcgacggggcaaagtcgaaatatatcacaatcaaagcctgtgaagaatcaaccaagatttacggacaggatacgatagatccgctaaaaacggtttatcttcttgaggggccattagatagcctgtttgttgataatgctggcgctatcactggtggacagcttgcactttctgaggttccgtataaaaatatgcgtgtctgggttcttgacaatgaagcacgtcatccggatactactcaccgcctctttaaattgattgaggctggagaaaaggttgtaatgtgggataaatgcccgtggccttccaaagatatcaacgaaatgataaaaacggacggcgcaactaaacttgaaattatgcagtatttgaaagataatactgtttctggactcacggcaaaacttcgatttaagtcgtgggacaaatcaccgaaaaaatgagattgatatgactactgataaaactcctgtatttaattcatgtgcgcacctggttaacccggaagatctggaatttgtagattccgaatatcaaaaggttctggcccgtaatggcgatcctttacaatccatgctggatttacaaaaccatgcacaacaaagcctgtctgataccctgcattgggttccgcgtccggataatctggaaacttgcggagaaatccttgattggctgaaactgcaagatgacgcgatcgccgatgaaacccgcgaattgtataccgctctgggtggaatgtctcgcggtgttaaacctgcgtccggtgtttggaaaccgtggaaagcaaatcaccaggaattgcgcaatactaaatttgcggatctgagtgaagaggatcgtttagaagttctgtttgaaatgatcgaccaattccactttgtactatgtaagtttattgcattgggtatggatgcagaaacaatttataagatgtacgctcttaaacaagccgaaaatcttcgtcgttgggccaacagctattgattattagcccactcaacccaatcggtatcttcgtaagggttccacccctttttgaataactcgattgatgttctaggaacacgggagattgttgcaatttgcaattcttgtagcattctcttgtgtccttgtcttttatagattccagctttaatatcgttaatataccagtcatagaaaatcccagcatacctccattcatgctttcctttcattgttatttgatttctccagggtttttgaccataagcaggatgattatcaccgcgtaacccatacatagagtttttgtctcccctatgggattctgacatctttttgcgttgttcttctgttgcctttgtccctgtcctgtcttttgatatctgagatatccactttctgcggatccatccatatgctttattatttctctgtgttgcattgacgcacatcatattggcagcatatatcaatttattatcgtgcggatacatcttgacaagaagttgatgggctacataatgttcttctgcggtaagttctactaaattgtcatgttcgtcactacctcccatacatcggggaatgatatgatgcttttctgtataacaatctagtgttcttcctcttgctttttctataagattggtgtaaattttacggtagtccattgatagtgttccttagtagttgttttgttgctggggtgatccatccgataggatgtctattttcattagttgaactatctgttcgataggaaaagtgtatttgaatgtgtagatatctccttcaaatacgggggttgttgtataatgagcatgaacaactattgtgtttacggtcgatatcatgtataatctcctttattatatttatggtatcgatcaatggcactttttgatgctagtagctgttggggttctttcttatggtgtttgcgcgatgaccacatatcttttcggttggtgtgtgtttcacgtaaatggcgttgaaagaaaacttttactgattatactatcagtgttttggtttgttggaatattctacgtttgttatgaggggcgagaatgattacaaaatattatatcgtcgttagtaaggataaagacgggtttaaaattcccttcattaaggaaggagagttaacacctttgttgtttctatctccggacgatgctaacgagtataaaaattcgattatcaaagaatatcatgataagatgaatccagttaaacaaagtggtcttagccgattctttcgaaaggaagaagttgaaaccgtaaccgaaaagaaaaagaaagatatgcgttggtttattgaacacgcaagtattcaaggggtattgattaaagtatgagcgaattaacttttgacgatctgagcgaagaccagaaaaatgcacatgatcgagtgattaaaaatatcagaaacaaaatccatactactatcacaggtgggccgggtgttggtaaaactactctggtaaaatttgtgtttgaaacattgaaaaaactgggtattagtgggatctggttgacagcaccgacgcaccaggctaaaaacgttctctctgaggcggtgggtatggatgcaacgaccattcactcagcactgaaaatcagccccgtaaccaacgaagagttacgagtatttgaacagcaaaaaggcaaaaaagccgctgatctgtctgaatgtcgtgtgtttgtggttgaagaagtatcgatggttgacaaagaactattccgtatcatcaagcgtagtattccgagttgtgcggtgatcctgggattgggtgataaggatcagatccgtcctgttaataccgaagggatcaccgagctttcaccgttctttgatgaggaaatttttgatgtcattcgcatggataagattatgcgtcaggcagaaggaaacccaatcatccaggtatcacgcgctatacgcgacggtaagccgttaatgcccctcatgaatggtgaactaggggtaatgaagcacgaaaacgctggcgacttcctgagacgttattttagccgtgttaagactccggatgacctgaacaataaccgtatgtttgcttacactaacgcaaacgtagacaagttaaacgcagtgatccgtaaacacttgtacaaaactgatcagccgttcattgttggtgaagttgttgtgatgcaagaaccgttagtgacagaaggccgtgtgaatggggtttcgtttgttgaagttatctataacaacaacgagcaaattaaaatccttgaaatcataccgcgttctgatactatcaaagctgaccgatgcgatccggtgcaaatcgattatttcttgatgaaaacagaatcgatgttcgaggatacgaaagcggatattcaggttatcgcggatccggttatgcaggaacgtttaggcgattatttgaactacgtcgcgtttcagtataaaaagatgaaacaggaaaccggatacaaagccccctggtattcgttctggcaaatcaaaaacaagttccagacggttaaggcgcttccggtttgtacgtatcacaaaggtcagggaagcacgtatgatcattcatacatgtatacgcgcgatgcatacgcatacgccgattatgaattgtgtaagcagttgctttatgtaggaactacccgcgcacgattcactgttgattatgtctaagggccttcggccctttgaggttattatgaaaattattgttaaagtcaaagatgtagaaaagattttgcgagaagttgaccgtattggtagagaggggcttgattatctcgaagggttcaattctatcgatatcaatttgttgtttgcaaaattgcgctgcgttgtcaacgcaaacaaagaagttgggttatactgtcctaacgggccgacctacacgtggggaaacatttcacaagatatcgaattcacttttgaagagtatgcagtgatcattgatactttgaaaatgggtcgtaacattcgtgaaaacaaaaacatgcttgaggggttttaaatgaatattcaccttccgcgcctttatgctgaattggttgccgatctgattttgaaaagtgatcgttctacaatggaagattaccacgattgggaacatctggacaatttcgcagaggctgtagaaaacatgatccgactggaaaaatcgattgctcgttgtgggcttcgtcagttcggtatgatggcggtaactccaggcatgatcgaatccgttgatgttactccggaagtcgcgctatcattggcctatttcatggaatcgtataagcggggtcgcgaatgagtcatttacccgtagatttcgtatttgattatgaaagtattggcccgtttccaaaaggaaaactagctgaacttagctatgttccgtttgttgatgatccttatgatccgcctacctttcaggaactgattgctaaaggaagaaagtacaaatttgacatccggaaacaaccagaacgcatcaaagatgaaaaaacgatcgaatggtggaaacagcaatctaaagaagcgcaaagggttttgttcccttccgatattgacatggatttgtacgaaggtcatcgacaattctttgctgatttagcggctgacggtgtgagtcgttggcagtcatacgattatacgcgcggccctgaattcgatcgttctatgctaaccgatgttgtacgaactatgacagggaaacttgatacgtttgaagatatgccgaccgtgttctggaatagccgtgatgtgcgtacagctattgaaaaccgtttactgactcgcggagtgaccacgtgtccactacgtaaaggcatgttagatggattcattcagcatgattcgattcatgattgcgctaaagatgcattgatgctaatctatgctaaacgttatgctctggggctggaagaacctccatccttagaagagacagacgaaaacagcataggaaagaaacgatgatcacattaactattatggatcgccattactacgggaatacgattaacgaagcgaaagcaaaagcctttgatgatatcattaaccaggatctggttaagattgaatctgatcgctatgtcgtgcaaccaggcgatagcctatattctatagcaaagaaactgtatggtgttggtgaactttggcctgatatcgctaaaatcaaccgtgattctattccggatgcacgtctgatccatcctggtatagttcttcgattgccaaaactggtaaaaatttaaaacaaagcccttgacttcggttgagggcttttgttatattgggttctaagaaaggagattgatatgaattttactaaatttgaaatccggctgttgattacgctggctatttgcggagcggtatcattgattagtttgttaacgtatatcgctgtaagaacaacgatatggcttcatgactggtttactgtacttgacacaattaaggggtgatttatgcgtatagcgattattggggcggctttgggtgtaatcggcgaccgtttagtaaactgtatgatcgaagagttaaagtcatcaccctatccattttcgatggaatggaacagccaatttcctaatttggttggggaagaacccacgatccataaagtcaaaccataccgaaatccggttgtgcctaaatcattgcaccgtcaatcagtaaacaggggtaaatgatgtcagaattcgcgttagctatccttgtcgtgattgctgtaatgggttcgatcctattttgtcgcatgtatcagttagatgatacacaggaatggttggacattaacgaaaaacagtttcgtaagcactttgcaggtgaatttgtttttgtgaaatttcgtagtgactacaaggtcgagtttgagtttgacggaaaaggtaacaactaccacataatcacttctgttattgatgcaaagaaaatctttgataagacacagggcggcgggatccgtaaattactcaaagaaataaaatagcattttttgttaaagaagcctcttgcattgcgggaggctttttggtatcttgtattcatcgaaacgaaacagagaaaggaatacgaaaatggttaaagtaaaatatgcagcacacgttaaagcaggtgagattgttggtttgactttcggcgctgaaattggttctcagtgggcgctggttgaaaaggttgaagacctgggcgataaagtagcaatcactgtgaaaatgcaaaaacgttttactaaccgtcctgtaatcactaagaaagtgaagaaggaaaaacgtgttaatactcagactttcgaagaattcatgaactggtgcaaaatgtataaactggatacctactaatagcactttttgttaaaacattctggggtagctttggtatagttaccccatcgaaacaagggaggaaattattatgatggttaacggttctctttatcaacaagcagttgcacaatggaaacagaaagttcaggatgcagaacgcgggatcgcttattgtgatgaagcgttggcgagcaatcttgaaaactgggaacgcaaagagtatgagaaagttaaacaatgtcatcttaacgaacttcctgcattaaaagaacacttaaaatatttgcttgataacgaaaaaagccttgcatagaataactatctttgatatagtacttacatcgaaacgaaacacactttaggagatataccatgaacactttcgaaatcctcgcagaaaaagcagcccctttcctggaagcaatgtacaaagcgcgtaacgctcgtttccaggattctcctttcgaaactgttttcgttctggagaaaggtcgcaaatatcatcgcgttgttcaggatactcgcaacaaagaaactggtgaaatgttcaatcagcgttctgttgccgctttcatcgataatgatggtaatatcctgaaacctgcaagctggaaagcaccagcaaaaggcattcgtggtaatatcttcaatgacgcagaccgcgcgattgaccaaagcggttatgtggtttatcttcgttaacaaaggggcttcggccctttttcttaaaaggaatatagcatgagtaacaaaaacgaagacgctaaaatctggaaagctgtaggggttatggctgtaatcgctgttgtgggttactatgcgtataattcctggcaagaaacgattgatgcgcaagtacaggaacaacaaaaagccgacgcaatcgaacagcataaccagcttatgcaattgcgctcgctgggatataccacgaaggaagattttaaaaattcctttggtgactataccggatccctttataccgcgtggggaatgactgacggcgattacatgtacattgaaacagatcgttataatgtcccacaaagtgtatgtttctatagtacgccgagagacaacggcaaaatcacgtcatacgcaccagaattcaaaacgatttctgttgatatgaagattgacgggggagaaaccctatcatttgccgctaaaggaaacaacggatccgagcggttgtgtcttctttctcctactcgtttcttacgcaacattcaagatgcgagtaatttaaaaattgctttaccatacatcaaccattatgatattgttgatgaagtaaaagaatggaacgtatcgcaaataggggtgaaattcaaatgagaaaagcacgtaaaactaatgcagtgttgatgatcaacggtgaagtaggaaaaccttgcaccaattctaaattcatgcacattgcagggcttccgggcatgacgcttaaaacgtcgtatgatacccattacaacgaagaaactacttcggtatacatgggagaagatctaatggctgaacgcatcatgcaatgcattcacttccctggtgaacgtccttcaattgattgttatatttttggctaccataaaggtattgtaaatgaatctgtataaagaaaatgatctctatgtttctgcatttggcctactcacgtatcacagtatgtcggctggatacgggaaagagttcgattttgtagcaagcgttaaacgacatttggaacgcagcggcgggttgtctattccgcgccaaatccattatgtttgtaaagaaggggtgtttttgaatggtgttcctcatgtgatccctttcaacgtgtttgaaaactattttacaaaatacgttgttcaacaaacggagacgacatccgagaatactgcaacgcgagaagaaacggcgatcgtacttgataagttttttgaaatcgctcataaagtgaagaaacgcacgaagagtgatgtggttcatcacctatcagcggaagttggcgagatcagcgaatgtctcattcagcctcaacgcggcggtaatatcgttgaagaaagtattgatgcgattgtgtgcgcacttgatgtgatttacctggaactgggtactactcacggacggtacgaaattgcaaaaattatcaacgaaatgcttgcagaaaaattagataagtggtatcgtacttgtaaaccttgagtttacttgtgaggattatatcatgttcgtatatcgtgtggaattttcttgttctttctggaatgattgtacagaaaaatggcaaacaaaaagcggcccatatgtcaatcgttatgtgtcaatggatactgctgaatggttggatcaattctgtatgaatcctgatatctatattgatatggatgataaccgacatccagcaccggatgacgataatcgattgatgcgcaaccttgaaaaagataatatagactttcaagaggctgggttatactttggttttcagtcaatacagcgcctttctcgttggttcaatgcatatgaacgcgagtacatgcaccatgttggtttcgtctgcatggtatacgaagttgaaaagttgtatccgggcgcacgtcaatgtgtttttgacatagacaaagcccgtttagttaagatgttaagtttaaaagagatttattaatgcctacctatacctataaatgcaccaagtgtaataaagaatttccaaaaatggcaagcattgctacccgtgatgcaccgaaagattgtgattgcggaggcgaagcaaaacgaacggttgataaacctcaaatggttcgtgatggtttcccttataacaagtaaaccccgaaaggggttttctttttcatagaaccctatataatgtcagtgattaaacaaagaggtgaatatgagtttagattttcttctggcagatgatgaaccagaacagaaaccacaaccagccaaaaaaggcgcaaaggttgacgaatcattttgtatgagcgatcgcgatcatattcggttgcgtccaaatatgtacgtcggatcggttaacaaagaagcgcatgaacgtttcataatgggccaatatcgcaaggttgagtacgtggaagggttggttaaaatcatcaacgaaatccttgataactcgattgatgaagcgatccgaactgaattcaaacatgctaataagattgatgtaaccattgatcataatctggttaaaatctctgataacgggcgcggtattccccaggatgatgtaaaaaccccagacgggaaaatagttcctaaaccagttgcagcatggactatggcaaaatcgggttctaacttcgatgataaaaaccgcgtaacgatgggtatgaatggtgttggttctttcctgacaaactgttatagctcgatttttattggcgagactgcaaacgggaaacgcaaagtaaccattaactgtacggacggcgcacagaacatcgattaccgaaccagccccagtaaagaacagggtactactgttaagtttactccagacttctctatgtttggtgtaactggtatcgatgaagaaaccaaagaagtgattaaggatcgcttaatggcccttgccgttgctttcccgtctgtgaaattcacatataacggcgaaacgctctctaatcgcttcccgctgtacgcttccatgtatggggataaaaccattgtccagacaaataatcgcctcagcttcattctggcgagcactgaggacgggtttaaacagaaatcctttgttaacggtctggatacgaaaaacggcggtgttcatgttgagtgtatgattgatggtatctattctgaacttgaaccgatgatcaagaaaaagcatagtatcgagatcccgaaagcacgtgtaaaagaatgcttaactcttgtggtattcctgcataactttaatgcacctgcattcgatagccaaacaaaagagcgattagcaaatacagcaggtgagtttaacaatcatgcgaatttgaactacaaaaagatcgcaaaaatgattatggataccccagaaatcattactccgatcattgaatccgcattgattcgtaaacaagcagcagaagccgccgcgatcaccaaagcgaaaaagaaagcgaaaaaggcaaaaattgctaaacacgttccggcttccggtattgatacccctggggtagaaacaacattgtttctgacagaaggcgattccgctgttggtcagttcatcgaatgccgtaatgaagaaacacaaggcgctttcccgctacgtggtaagcctctgaatacatggggtatgagttttacagacattatcaaaaacaaagaactgtttgagctaatggctatcctcaatattcatcctggtgatacttccggaatgacttatgataatatcggcatcatggtcgatgctgacgttgacggcggcgacattttaactctgttgcttgcattctttagccgttggccttctttgttcactgagaaacggatccgatatattcgaaccccgatcgttatcgctaaagttgggcgcgaggaaaaatggttctattctcttgatgagttcgcaccgttccgcgataaagcaaaagatgtacgatatatcaaggggctgggttctttacgcaaagaagattacgaccgtgttctgggtgatcagttgaagtatgatgtcatcgtacttgacgacgaatacaaagaagtgttagaactatgcttcggcgacgaatctgatccgcgtaaagattgggttaatggaaaacacaaattttctaaggttgactaatggaaagaagtattaaagatgttgtacaggtggaagggctaacgtttgccctttacacgatttattcacgtgcgatcccgcacctggtagacgggtttaaacccgttcaccgtttctttattcactctgctatgcagggcggaacgggatttcagaaagtagcttctatcgctggcggtgttgctatgtatgggtatcaccacggggaaacctctgtagaagaagcgttatcccttatggcggcgcactggtgcaataacattccgttattcgaccgtgatgggttctttggttcccgtttggttaagaaacctggcgcacctcgttacatcaagtgtaaactatcgccaatattcaaagcaatttatatggatggtgatttaacgccagttcatgaagatccggaacatgtaccgccagcgtactatctcccgatcattccgatggtactggttaacgggtttagcgggattgcaaaagcatatgcaacaaacattccgcctcatgatcctaaatcggttgttaacgggtgcattgcatatctgaatgataaagatttcacactggatctgaaatacccttactttaaaggtgaaatcacagacgggacaatttacggcacgtatgaattgcaaggtaaaaccaaattggtgatcaccgagatcccagtgaaatatgaccgtgtgaaatacattgcaatccttgacaagctggaagaaaaaggcgttattgttagctacaaggatctatcgaaagaagattttcgttatgaagtaacgctcaagcgagagtatgccaacgggttaacccgcgaaaagatcctgaaagatttcgggttgattgaaaactcaaacccaaacattaacgttatctttgagggtaaattatactcatatgaacgccctgaaacgcttctaaaggatttcgttgatattcgtatgaatgtatatcaacagcgtatcaataagcgtatccaggaaactaaggaagcgttagataaagcactggcaaaggttgcgtttattgctcaaatggtagaatctcctgattctctgcgtggccttagtcgcagcgaagcggttaaatttgtgtctacgtggataggttgcgagaatcatgccgaaatgttagtggctatgaacatctaccatctaaccacggacgaaagaaaaaagctggaagacgaagccgaagaattgcgcaaacaattgaaatactgggaagaaacaacccctaaaattgagtatctcaatgatttaaaagaactttctaagaagttgaaataattacaaagcctcttgcaatgcagggggctttttgctatattggttttgtaccaagcaaaggagattctaaaatgttgaaaactcgtagtgcaatggaagtaacccactgggcgcgtaccatgatggaaaaacacggtttgatcagtaatggttggacattccggatcaatggacgcattacaaaaactctgggccgttgcagttataccaaaaaactgatcgaactatctggtcgtcatgttgcggaagatatctacgaggatattttagacactcttttacacgaaatcgctcatgctcttgtcgggcgcggttatgaacatggtaaagtgtggcaagctatggccttgcgcctgggtgctaaaccttcaccaagtaaaacaactacaaaggatgctaatctagttgataagaacgagatcctttattgtttgttcatgaaagattatcaaggccgtgaagtctatcaggctaaagctgataagaagttttacaacgatgtgatgaacggtgttaaggatatgaaaaacatttggatcagcgggcgcaaggcatacacgaaaggccgtctgtatatccgtccagtaacccacgaagaacttgcatacattcgcaaagagggataaggtatgacacgttgtaatgcgcctaagttgggaaaatatctggccatattcggattttgtgcgttcttttctatcattatcggggctatcgtgtggggtatccttgatatgaagaaacagcaggtcgaggaagaaaaattagtaaaattccttgacacttattgcgaagtagtagaatatggcctgaacaaaaagccaacgaagtactcttgtgaccaagttatttttaatgttaagtgagaaataaacaatgaaattacgcgaagatacaccgcaaaccatctaccgagttggtacagataccagcaagggacgaaacaaactatctctacgcgcaaacaagaaagcgtataagatcctttcttcgacagtatacaaatacaagatccgcgcaatcattcgcgaactgtcttgtaatgcgatcgatggacacaaagaagcgggaaatcagaacccgtttgatgtccagttgccaactgctgttgatcctcgttttgttattcgtgactacgggatcggtatgtctcctgatttcgttagtgatgcgtttaccgtttacttcgaatcaactaaaaatgattcaaacgacctgatcggttctatgggtctgggttgcaaatctccgctttgctattccgatgctttcacggtggaatccgtaaaagacggtatcaaatgcggttacacaatctatatggatgatggggaacctttctgcgatcctctgtatgagattgaaagcgatgaacctaacggggttactatcaccgttccggttaaggttgaagatatcaaagaatgggaaaacgaagcagcaagggtatacgaatcatttactgatattcgtcctaactttgttggtgcttctattctcaaaatcaactatcagccgaaagaagcaaccaacgatagcggggtgatccgtcataaatcagcatacactagcggtgtatatgctcgcatgggtaacatcatttatcctctggataaagatttgtatgatacctcgatgttctattgctatacagaaagccagtatacgtatattattgacttcccaatcggtgaacttgatttcatgccttctcgcgaagagttgagtatggataaaatgacagtagggattgttaaagaacgtctgaaacaaatcagccgggtgtatttcaatcgagttaaatcagaattcgataagttacaaaccgttcgtgataaactgacgtggttccattctctgccttcaatggtacaaaactttgttggtaaagatgctaattttcgcatcaacggtgattctattggctggatccatagcgaactagtcaaaccaaacaaatataatgatgattatgttgctgggtattgggcgaacgaatacgacggtaaagatgcatggtatcaggtaactggtagcggaggccgctggagcaagtataagccagaaacaaccaaacgccaggacatcacacgcatttattatccgtggaaacagaagaaactcattttgttaaaagtggataccaacacggttaaaccgtatatcgtcgggtatgctaaaatgcataacctaagccgtgttagctttgttgcatattacgatagtgattcaaagcgtgagattgttaatgatatcgttcggaaaggtcattttgatgaatcggaaattgtgtatctccgtaccagtgaaatgacaaaagaaaaagagatctatgatacagatcgcgaaaaatcaaaagcgctatatgcaccgaaaaattcagaaccgcgcccaaaaaccccgaccgtatatcgttatgagttggatagtaacggcaatctggcaaaaacttctctgtttatgacaaaatcagagtttttatcactggataaagccccaggtgttcggttgtatggtattgatgaatatagccgcttagatggtgaaaattccaggttgtctatggattcagcaatgaaagaatctactttatcgcgtatcatgcgccatactgggatccctgttgtgtttgctatccgtaacagcctctggaagtggatcccagattcaaatctggtatgctttgatgatatgctgtgcaagcagtatgttaaatccgaaaaggcattgaaagataattgcttgcctggatggattggcaaggaacactcaacagaaacagacgcattgcatagccgttttggtgtatcgcttgatcggattgtgaaaaaccgatataatgaaaaactgtataagattgttgataccctcgaacgtatagtgtgtctggaagggtatgagaaagatggtaaaaatctttccagggcgcgttgtccgattctgcgtgaatccgtagcatcaatgcgcgttaaacgcagcaatatgaaaaaacgtgttgatcaggcatgggaaatctttaaatcactaaacccgttactggcttcacttgttgaacatagcgattcttattcaattcgtccgatttacaacaacgaaaagaatctcagtgagtttaagaaattaatacggtggaaataatggtcaaaattcttgacgaagtacaacagaaagctatctataatggatggttgacgggggcaagtaaaacagcactggcccaacagttcaacgtaagcgcccgaaccattgggcgcgttatcaaccgcaagttagcggaattccctaagaaaagggatgtaaaacaaaagcctaaagtatcagacactgtaccacgtatgatcggatctgaatcgtttattacggttgtatacgaagggcgcgttttcatggcgggtgaaacacatccgaactttaagaaagcgcatgaaatgctgaaagctggtgatgtcaaaggtgctgtaacttgtttggatactcaagaagcgatccgaacctatagcaaaggcaacattaaaatcattggtcatcagcttctatataaagatgtagtgtttgattctgatatcactcaacgaatcattcgcgaaatgtataacgatcgtccgtatgaacatctggtgaatttctttgaacggttgatgcgaaacccttcacgcgatgctgtataccagctttacgggttccttgtacataatgacattgaactgaccgatgatggttgttttcttgcctggaaacgtgtgcgcgataactataaagatctcgctactggcaaatttgataatagtcctggtgtgactgtctccatgcctcgaaacatggtagacgaagataaaacgcgcacctgttctactggcctacacgttgcggctaaatcataccttccacactacgggggcggtgttggtagagtcattcaggtaaaggtggatcctgctgacgtggtagcgatcccagtggattacaataacgcaaaaatgcgtgtatgccgttataaagtcatgattgatgttacatatggttttagccattactaactaaacaaccgcgcctggagagttctgggcgcataggagactatcatgaaatttaaaaacatgccttcggctaacgaaactcgcgctagtggtgaatctattctgaaaactgcccgtgaaatgtgggccgacgaccggatagaatccgggaaaggttacgtatttcgtaaaggatttggtgcattttatgttgcaaccacctttatagtagggtatagttgtttaggaatcgcgtggatgcaacgatatcttgaacgtgctgttctttttgtgatacgttttctgtttacattgatcagcgtagtgattagcatcccatttctgagcatcgccttgtttgttaacgtaaaaacaggcgaaattacaaaattaggcaaactggtatctaaaaaatatgaaaagaattctgacaagacttgacattcacaaatatgcaattaaaattggtgacatgaaacgcggaaccttcaagaaattcgaaggcgtggatctgaaagaaaacgggttttacctggtagttgatgataaaacagggcgcgtagtattccgtttctacgtagcaccaaatcaacgccgtaaaactggtgctagtcgtactctgttacgtatcaagcgccgcgaacacgaaccgtctgcgatggttgcgatgctggaaagtgcttctctgtattatgtagcacatgacaaaatcaaaaacctgttcggtttcccgaacctcaacggatcaacgttcgaaagtgctattcaaatgcgttatggtgctggtgaaaactacaccgagtggaaccgcgcactgaatgacatttatgattttgaattccagccgtattgatgtatactgattaaaactaaccaattgagataaattatgaaactgtttaataaaattcgttctgtagatgaaatcgtagcaactttcgacaaaaccctgtctgaactggaagcgcgtattgctcacgataatgagcaggttgcacaggttgcagcagatcgccaagcagcagaagaagaacatcagcgtaagctggctgaactggctaccaaagaaagcaatcataccgaaagcgcaacccgtgccggacgtatcgcagacaagatccgcaaattgctggattaatacaggggcgaaagcccctaaatatttttctttaaggggcttatatgaataatttggtagcgaaacatgatttcaaccgcgcttctactcaccgcgatcgcaagcgagcatttaaagaagcaaaacgtaaacagaaacacaaaggtaagtgtgatgaaaaccgctttgatcattcttgaagaaattcctgaaaatacaacgctttacaaagtcgaaactgacgatagcgaagtaattgagatcctcaaaaccgcccacgggcattatgtaaacggttccggcaacaccaaagaacaggattatgctgttgatgttgttaacctcatgatggggccgaataccgatgataacctgaaatgggcgcgtgaatccaacattcctgaaaagtatgttggtatgttctatcagtgtaacatcgatagcaaatcaccgtttgaaccagaaaataaaatcgatctgattgttcgcactgggttcttcttatgagtatacaaattctgttcagtaaagaagatccattaggtacggaatcatcggttcagcgcttattctggcatacagattatataaaaaatcgatgtcgtggcccaaacaacacatggggaagcaacaacgatattgacaaagcaaaaatttatcctcgcggaaaggcgtactggaaaatttttgatattcatcttcataaaacaatgaaagattcgaatgaatgatgaaaaagcccttgacttcggtcaggggcttttgctatattagccatatcgaaacgagataccctttaaggagaaataccatgactaacgcaaccgtagttactaccacttacttcatttcttctggtcgtaaaaatgcaatatacaccttgcgtgttgagcgtagaggtggcggttatacttctgataactatatctgcaacttatctaccgatccggagaaagcggaagcgaaagcgcgtgagtatttcgaccgtgtttcagcccgtttaactgaaactgatactttcaaaatggtattccagggctttgcagatttcgatctgttcgaacgtcgcggtaaactgtcagtgttcgatactgaaaaactggaactgctggaaaaagggatcatgccgattggcaagcgtaaaggcgaagtaattgcagaaatgccaatgtttactgttctttggtgggctgaccagtctaaagaagacaacaaaaacagacctgtatttgacgccgtgtgcgcttactgcatgggtgttgcactggagaaggattatatcgccaaacgcgaagaaatccgcgaacagtgggaacaagagcgccaggaacgcatttctaaagctaaccacatcggtgaaatcaaacaacgtctggaaatgaccggaaccgttgagaaagtgatttcactgggatatactcaagtttcttactacacttctgtagaaagattcatgaccaaaattaatgttgatggtaatgttgttgtttacttcggtaataacattgcaaacgaaggtgatgaaatcacgttcaaagcaaccgttaaagagcacggagaatacaaagacgttaaacaaaccatcgttcaacgtgtaaaggttttataatgacatacgaagatatgcttaatgaagtgtgcgcgggtaaaaccgcgtaccgtactaccaatcctgatatgattgtgtttcgtgaaggggatacaatcatcagacgtacacaccgcaagtgtgaagtaaaccaggtattcattgccacggtagaagaacaaaaggctactgattgggatatcgtcattgacgaagaaaaccacgatgagctagatcatccgatattcattttgagtgaaactatcggaattcgaccattcatgcatagaaatttttgggggaatccatgacgttcgatgaggctatgagagccgctaagagaggttgtaaggttgcgccaataggtaggccattcttcgtgtattatcacgacagcgctggatacaggcgggttacgttgggggtttcggcaaggaatgaagattatgttccggatccgtgggacaaattgaaagtttgggatatttacgagaaaaatagcccggtgatgaacttctttaaagcaatcaaacgggctattggaagatcacacaatttaacaccagcattacgttaatcacctcgctcgacctaaaatgcgcgcggcctgtccacatatgatgtttatcttcatatctggtatatcaggccgctttgcataccattccatcaaaaccgatccagaatagtagttatcaagattgaaataagggcaactaaaagtataagctactggcacaaaatcacgtgtcggtaggtaggaacttgctttagtggatgaataatacaagccatttatatgattcgtgtattcttcggatgttttatcgatcggataaccgccgaggtttttaggatcgatctgggatggtaattttccctgatattctacaatgtcaacaaaatagtttatgttctttggtctgaatgccagtaccgccgaaaaatccgcgttggaagtaagatgaactatgctcaactgttccaacgcggattgattaaacttttctgttctttcaatttcgatagcccttgtatcgactacaagggcaccttttatcatcgggaatatatcagtccatttataccaagttactaccataagaaacataaccattattagaattatttttatcagcaattgtttccatgttttcacacccatcacaaacgatattacccgatcaaataaggctagtttatctacgggatttctctcagccattttataagactcttcttagtttactataggtatatttaggatgcaacaaaaaggctacctatatggtagccttttaatctatttaatagtgtgagtttgttggtttatctatcaaacgtattctaataaagcaccaaactgattattcattctagcttcaaaatatccattgaggccatcagcgttttcgcatctatatcttctccaaccgtcaatcatagtagttccactgaaataaacatcatattgctctccttacatagctatttattgttatcttctagttataaggccttcccagtactggtcagttctattactaaaccaatctttaagcttattagcttcatcatttgaaacaatttgatagtttcttacatctccatccatttttcctggattaaaatcaaatgtagttccatctgacatcattactcgaagatttatagcgtccccatttcttattcctaaagttgtaccttgagggtcaccattccaatagttaaccccgccttgtccggatacagacacaaataaagtaacttctttaccttcgaagtttccttgcacagtattttgtgttgtcggtttaggactccagttccaaccaccaacttgccatgaacctctatagtaaatattgttccagttacgatattgcactgttaaactaaagttaaaaacacttcgtcctatcatattagacatccagaaaggtgttcctaatcttaattttgctccagcttgagccatccacgactcaccagtttcagcctttgctgaacttccgacccacggccctgttactgccatagttatttctcctaaaagatggggccgaagccccatgcattatttagatttaagttcttcaatttctgctttaagatttttaacttcggcagaaagctctttaacagattcaacgagaagtgcaattactgagttgtaattcagacgcaataaacccccgtctgcttcaatatcctgagtaactgcttccggaagaacttcttgaacttcctgcgcgattaaacccgcagaacgagtagtaccaccggatgtgttgtgaagctcataagtattaccggttagtttttctactttttccaaagcattttcaataactttgatatccgatttggctctacggtcagaacgaatctcaacgttatcaaatgaaccattacgagtacagaagaagtcacctccagctctgaaatagaaattgtcatctcgaccatagccgttaacattaagaatagcctggtgataatttcctacatattcttggaagtataaggaaacataagcaccattgctaaatctgcttgttaacccagccgtgtttaaataagccccactaccgccaccagtgtagttagtagtactattaattccgttaaagttactaatagcacctgggaattggcaagaaccgctgttccagaagttccacgttggcccagagacaccacctgctcttatactaacgttaccaggttcatcagcccaaataagtcctttttctgtaccatcagctttacggaagaccaaatgactgttaccagtgttctggacgttaaccgaagttgatacaatgaactcttgattaaatctagcccttccatcaacagttaaaacaccattaacagcagcgtctcccgtaacccaaagcgatgtagtttttaactgatcgcctgtaattgttaaccgcccagttacagtaccacctgctaacggaagataagtatcacccgcattactaatggcagaagcaacccgatcatcaacgtattttttgttggtcagatgcgagttatcagtaggagcttggcctgcaataacaaaattaccagaagcaacgttgatgtttccatcaacaactaatccgccgaacttaacgctctgtccttcaccaacaccgaggttattacgagcagcagctacagaagttgctccagtaccacctaaattaattggttgaacaccagcaacaacctctttccatgcagaccatgtaccgttttggcagtatcgaacatatgtgccttcaacatcaccgttctttgtagtaaaggtctgcttacatgtccaatcggtatcagaaattttacgcaaagatagaacttcaagaacaaagttgccgtcagaggtaggtttgttcgatatattagaaccaccaccagtagaagtacacttgtataatagacgagtacctaaatcactgcctttaataaccatgttgttaaggtcattagtcttatcagtaatatcaactgcgtcttcagcaccacgatatgtctggttaaaaaccaagtccccttctacctcaaggccgctagatttaactagaatatatttactaggagctggattagaaaccgcagtttgataaccaaattgcacgtatccttcaggagtaattttaagcattgctacggtagcaccgctaccaactttacgagcaagggttaatctactgtacttgtccgagttctctgaacctaaatcaacaaacgttccactaggattttcaacttttaagttagcgttaatagtcaagttaccggtcatggtgtcgccagtcttgcttacttgcttactatcgccagcagtgatatcatttttaatggtgttcagatagttattaaggttgccaccaaacatcgagccagaggtaatattcccgtctttggttagcattgctgctccaccaactttaactgctacaggaacatcaaggcggccatcagaacggaagctaaaatcaccagcagaagtgcctccagtggttcttgcgcgaatattaatttgtcctaagtccgctgtatttggagttgcccaaattacaccacgttcattactgtctgttctaaaccatacatgagcatttccggttccggcattaacatataccgatgcagtccccgtaccggaagcatgtaaattaggaacagttaaatcaccagtcatggtgtcgccagcttttttaacctgagtgtcgtttgtcagattaccaagccctacgtcgtcctttgtcggcttgtttgctgtgccgtaaagttcattgtacttaacatttcctgtagcaagaccactgtcgttagctgcgtatacacgaactttagcactatcgtagtcgatattaatggctgacatggtatcaccagcattcataaaaataccggagccgtggctataaaggccgttttgaacactaacgccagatttagtaacaccacgccagaaagtaccaccgtatgattttaagcgggtcaacatatccgcattagagataatgtcgttgatggatttaccaccattaccgcctaagccataagcgccattttctaaaacattaccagcaccttcaccgacatcacgaacggccgcagtaccaagacctaagttatttctagcatcaccaacattagtagcacctgtaccaccacggttaaccggaagagtacctgtggtatcaccgaaatctggttttgctaaactatcaaaaatctgtttcattgaaacaagaatacttccagacggtgtagtagcaccagtatcttgattggtttcatagataattactgtacctgaatcttggccgttgtatccagctgtgtttagcactgtaacataaaggtcattgccataacgaggaatcttagcataaaaatcaaatgacgcatccgcatcagtagcagaatcgtttttaacaacgtaatactctggaacgttcgttttagaaggagacccaacccggcgccattcaacccacttatctaaactgttggtgctccatgatgttaaatttcgtcctgataacgtgataaaatcaacgtaatgtctaccgtgcccagaatcaataccaccgctaatcattaaatccagttgcgaagaacccattcctggatgctttattgtagctacttttacccaacgtggagttgacgcagttgcagcagaaatggtatattgccaggcttgacgattgttttctacattcgtcagaagagtaccagatttaccaggacctcttccgttcatggcgtaataaacctgagaatttctgaatgccagattgctgtcattagttaattgaagaacacctacgcctcgttggtttttaatatagacatcgttagagcctacgcccatttcaaggacaagtgtgcttccattgttaattttaacagtcttattagtagttaatcttaactcaccaggaagagtagtattacccgagccgtcaagcaagaccaattttcgggcttcaacgttgcccgtaccgcgttgtacaaactggattgtttcagtaccatcgtcaatagtaccgatttcaagaatgccgttattgcttgtaccaccggaaccgatgtaccatccatcattgctggcacatttaccgacgatatgacgagttatttcaccacttaaattctcgttggtgaaagtaatagctttaccttccgctacggtaacggtatcattaagagcactaggcccatcaactgttaattttttggtatttgtttctgggatacctttacccgctaactgaacgatcgaagaatcatttttcgtataaatggcataatcagccatgttgatcgccagttcaccatctgcaagctgacttgtagtaggtgttttccccgcaactgtgctacgtaggaattgaatttttgctaaatcagccatgtttcaccttaataagatccaaaatctatgatagtccctttagtaattacctggtcgagccgtggtacgtgttcgggacgggaagccgcgcctgtgctcgcgaattgcggggcagttaacagccctgtcattgtatcgccagcgcgtaataccctgctattagcatttgttgtgacattatttatctgtccatcaacataactttttcgtgttgcatgacttgcgtcagtagggttagtggttgtaatactgatttgtttttcaaccgtaatattacccttcgtgtttacatcaccatttctagcattgataactaatacgcgaccacttgttccggaagatgaacgaataccaataccataccatgatacaagatcaatgttggccttatcaaatgtcgcaccatcaccatcaccagaatataaaccgttctggtcacttccgcctgcgaaagtagcgttaatttgtagcccctgtttaaaggcaactacacccaaatattgaccaccgcttgctttagaaacgaagtcgttatttgatgcttgcggtttatcgttttcagtataaaccttatatccgcgataggttagagtattaccaaccggaaccagcggaaatgtgccggagtgccaaataggtaaacccccgactgtagaaccagcttttaaatctgccataataacccctttttacatatttataaggccctatgatccgggcctttgtttatgcatcaacttcacggaattcggaaacagaataatcgccaccaggataaaccttagtattcggcaattcaaatatatacggtgttccaccatcgatcatgttgttcattctgataccgttaaccccaaactgtgcagcaaagttttgatcagcttcggcagcagatacctgaaccatcacgaagttacggatcgcagataaactatccgtagcgggtttaggataacgagatacagcaacgttaaatccatcacaaccactagggatcgtatagaactgttcaaatcgtaaccactcatcaggtttatttgcaggaacttcaatcaccgatgatgaagtttgagcagtacccgtaaaccatcgaacagtaacccttgttgttgatccagcatccaataatgctttactggcgtaaaaatcaccagtaatcatcatagccaatccaggagccataccgtaatcagctagtttagagatcactgggtttgcaacaggatatactttatattcagatccattggttgaattgtattcttccgtatcttcaacagacctgaaaggtacaccagttcgcccaacatcaccaacgttatcatagacaagatcgattgatgcgcgtgaatcttcttttaaaattccatcgttagcgtaaaacgattcaatcagtatacgagattttgatgccccatacaatgcaacatatgcagaatttgggaatctctgagcgaaatcagcgccttgccacataacggatctgtttttagcaaaccaatcatcaacgatttggcttgttttgtattcaccgttagtcattatcaaatacagcccagaagtttgagcatccatatattcaacaaacgctttgtttgcagttgctgaattatcattcgataatgtgaaggttttaattggatcaactatagcattgttaattctccatacgttgatcccaacactaggcggtgtccctaccgccttttgatttagtgtaaactcatactgattaggaaccgcattgggatgtgttgcctttgcggttattctgtaagttacgctgtttgtttccgatagaatttgcgtttctacaaaatcggggccgaaccccgccattaagtttgacattatgccacccactcaaatttaactgtctgagtaaccggatctgggtaaatcttaacgttaccaactttgatccaatcggtaacagtcatgtttttaaccgtagtaccaacagcagacgttgcaccaatctcaccagcagtaggcgggttgttgctagtatacatgcggccccaaccatcaaatttacccgtaattgggttcatttgacggatccagaaggattgcgccagcgcattaacaccagtaccagaggtcggacgaggtgcccaaatctgataagtgaatgcggttccgttaccaaactgcgttaaagtaccaggtgctttaacataggtataacgggttacaatcatgatatccggattaatcgggtctggttcaagaaccggaaccgcgtaaccaggaagtaagttgtactgttccgatgctgtgatttcagccgtccagttacccctagatgcttctgttactgcatccagtgttgaccaagccgcttgacctgcgatgataattgaactgttgtttactgtcaaccgtccagacatcgtatcacctgctttgcgtacatacgtagggttaagcaaggtttgcgcgttcttctcagtaaatactttataagagtttgctgattcttccgctactatgttgccagcatcagaggtcaggatcttagttgtcttgttgttcgtacccatagatagaacagaaccagcagcagtgatcacggtatcattacccagagtcactttgctaatcgcctgaatttcaggagcctggaatttaacgttagctacaacgccacgagtatcattatacacagaaagatgaactgtgctagtgttacccgttgagatcattgcaatacgcccagaggctaaacttgcttgaattgaccagtcgttagatgaaccaccattcaaacgaagtttacccattgacgaaccatcaccaacgttcagatctccattaacattcattacgcggaatgttgcatcagcgcttgaatcaatgttggcctgtacagtggttgttctcgttagagtcaacgccccgttgaccgtctgatcaacatcacgacgaatgaactgggaagaatccaggttatccagcttatcagcatcaaccgctttagccccgatcggcagataatgtttcagcgtcaggttcaattcataaggagaaacagcaacacctacagcggcataaccatcatccggaagagtagaaccagccacatcattaccagaccaagtaccaagccccttagacagtttcacagtaccgcgtaccagatcggtagcttgccatgaagtatcaacctgaattgtatttttcaagttcttaggagaaacagccttgtttgcaacggtgccagcggtagtttcagcagccgtagccacctgaatgataccttctgcgctctcagtcgctttcttagcgtgtaacttcttaggggtgacaaatactgtatctaatgtccctgcgttcgtctcggactgcgtagcgacgcgtaaagtaccacgttgtgtttcagttgctgattgaataccgatgttaaccgtagtccaaatagtcccagattgagttaacccgtcagcagtagcaacagtaatatggcttgtatcgtccagataacctttcagtttagacggtacgatcgctttatccgttacagtacctgctgatacttcggcagtggttgcaattgcaatgatacctgtcagcgtttccgttgcagcacgatcgttaagcgttttaggcgttaccgctcgcgtgtaatcagtaccagcgtttgtttctgcctgagttgcaatctcgatcaaaccaatacgaccatcagtagaggttttcttgtgcagcatttccggagtaactacggtcggaatgtttgcacttgcaacagtaccattaataacttcggtttcagaagccagccatacagcaccagattgtaactgagtcgctttatactcacgaagagttttaggcgttaccgctttctgataatctgaatgatcataaaccccagtaccagcctgagcacgatccgtgttggtgttaggagcaccacctgtagcaacaagggcaagtataccagttaaggtcggcgatgcaatacggttatgcaactttttcggggttacaatcgtaatatcatcggtgcttccgtttgtttctgcctgagttgcgatttctgccaatccacgacgggtttcagttgctgttctttcgttcagcttcttaggggtaacaatcacatcatccagataggtatcggttgaaagtttgttaacctcagcagttgttgctaaccgtgcaataccacgacgggtttctgtagcagttttatttgctaacgtcattggagtaatagcagtttcgtcgttcgggttgtcttccaagtttttgtttacttctgcctgtgcagccagagcaataacaccagtacgcgatctgttagttgcgtcaacacgttcaacgatcggacgataattagcaacaacccattctttcgtagctttcatgtaagaaaactcgatatacgggaggtaatcactagcagcattaaatgctaatgaagttacactaaaccaatcatcaggcggatagtctttgcgctgcgggaactgcatcatatttttgttggtgcggatcttgtccgttgtaccatctttaactttgattgtacagttctggtttttacccatcatataaagggatacgtaaacgcgatcaccatcagcaacatcagttggaagggtaactgtaacgtttggtatagtcccagaagggtttgcagtaacaaaaacgtaatcgttaggaactgtgtttaaatcactatagatacgacgcagacgaacacgattatcagcatcatatactttccattggctattctgtgcatcaaagatgaacataccaaagccagatttctggctagttaccgaagtaacaccagtaattgcaccgtcagaaatagtgtgtccactacctggataaatctgcaaaacggctacgttgatagagttcattttatcagcgtcataggttgtgatcacatcaccatcatttgcatatttcggcaactggagagtgattttacccgtagcactgttacggaaaactgtcataccagattgtaactggaatgaacctgttccggttgcgttcacgatctcagaatcgcggttatccagagtttcagcaacacgccatacgttaccgttatagataaacgttgcgatcatgtacgggtgggtcagtcgatactgtgccgattgtacagtacgtaaacggatctgacgggtgttagacttaacaaggatactgttcacacctactaaaccaccgcaatctttaaacgtgattacgtcgccctctgtcgggttgtccggcagcaggtacagaagttcagtaaagcgtccatcagccataatgtaactaccagattcaataatgctaccgtctggagtggttacgttactataaacccatttcgggtcattacgaattgcgatccatttggattcgtcgaaagccccagcaggggaagcaatattctgttttgcgtaccagatacgacgcgcataaatgatcgccatgtcttgagaatagccacgggtcgggtcatactgctggattccgttaaattcattgaaaaagtcaacgttaacgccgtcactcagcgtattacgatcagccttcccaacgttgataactttttcaccagcagcatcaaggccacttcgtgcgcggaatgatttagctaccattatcttttttcctatattgtattcaataccaatatttatatacaaaaaatggcccgaaggccatttaactgattatttattacttccgaaccatctttttatatttcttgattgtttcgtctgtaatctggtttcgcttatatagaggggttacaccgaacgcctcaacaccacgttcattaaggatcgttgctacgatttcctgtctgataaaccagcgcttaaccttttccggaaactgttcattgatacttttaaacagtttggcttcccaactatccagcgtttcagggtggataatatgatcaaacccttccagaaaatcaatcgttgttgcgtgaatagcgtttgctactttgcgaatgtattctttattcatgcttcacccaaatactctttcaattgcatataaccaccaataaaattaccatctacaaagatccgagggtaagtaaatgccatgcttcgactacgaacacgtttcgctaactcttcaatgcggggccgatcgtaatcaaaccccacactgttatttgctggctttagaacagaataaaattcgtattctaatccatgctcatcaagtaatttccgagcttcaatacaaccataacatttatgaagcgattcgggaataccgtaaatctcgattttcatcaattgctttccttcgtgccggagtgattttgctaatgatatctttctttgtatcagaaagcatacgctcaatcaattccaccgcttcaagttgttgatgcagagaaagaaggttgatgatttcctttttctgttcatcaatagcagcttccttgtcaatcgcgtacagcttattatcaccgaaaacatgctgtaatgcaaattcaagtgcctgtgaatcagtcggcgctggtagtacagaaatcgaagtgatccgcttgacaaaaggataatcaaatcgcagatcattgatatcttgttgaacaggttttacagtcatccacattttaggatcggaagatacgaaatttaaatcaggcgcggcgatttcttctttagtagcaatcttcggttcttcttccggtaaatcatatggtttgaagtatttccagatatggctagggatctcatattcgaaatcatcttgcagaacataagcaatgtcctcagtatccccaatcgcaatacgatcgattgtaatatagccgttgtttttgatcaattcagctaaagcatttcgccaggttttttctgcaaattctttagcgtcgatgttcagggtataagatttaccttctaataattccatgtgtcacctcataaaaaagggtgccggagcacccagtttaatttacttgcttacttctgctacttttcgagcagctttgcgaaccaggtcggaagcagtacgcagattttgaagcgcgtcctcatgggctttaaccgcttcttcaagctgtaccattgcttttgcgatttcttctttcttagccgcttcgtctacattgatagcgatagcgctattaccggaaacgctaacaggttcatcaacaattcctgtcgccagttcacggaagaacgaacgttcagaatcaagcagatagtaaccaacttttccggtctgggaatcaatggtttctaccgttttgctcaattgatgatgaccgagcgaagtcgtatggtaaacggtgtatacaccattactgtgttcatcggtatatgatttgatcccgtggttagcgccacaacgatttttaaattgctgcggtttaaccagaacatacgaacggccttcaacaaatttagtcggatccagttcaaccgacattgccgaaccgccatcaagcatttgatcaagatctgcggttgctggtgcaacaggcgcaaccggagccgtaacgttggcttttttcggtttagctttcgttttcttaaccggagccgcgccaacttcgacgaaataacgagcttcccacgaacgcagagagctaaaagtcatttccggagtatgctcaattttgaaagtatctaaattggttttcgagataatttttacctcgttattcaggaatttttcgatctgtgtcgcctggatagtgtttgcggtgttagatccaccgtgtgaattggtagtaaacccttcacggtcaaccagtttgtaagttttaccaaccacgaacgttttcagttcatttgcttgaactgtccacggacaagaaccgcgccctgtattacggatggttttcaggggaatgttccacttccagcagtagttacgcgcttctttacgggttttgaaattcaggatcatgatattatctctcaattaaagttaatcgtcatttacgatgtggtaagattaccatagttacacattaggtcaagcaatatttttaatttctatcgaatttttagcgaattcgatcatacgttgattatctgaaccgcgaaacggttttttagttggtaaatctttttcatacttaccatcaatcagaacatcaatgtaaggaagtagcttagaacgttctgggtcggcctgtaaagcctccagggtatatcctgtccataaccatacgtttttctttggaagttccttagaaacgcgctcaagcagttttaggatagtaggatagttgtcacggtaaagcggatcgccgccagttaatgtaagtccatcaacatgcggattactcaacagagaaatcagatggttttctgtctcttccgtgtacggtgttccgttgcaagggttccatgaactgcgattatagcacccatcacacttatgattgcacccggccacaaacaaaacaacacggatcccttttccgttgaccacatccatattataaattctaatataattcattcaaatctccatgtatagcctttataactttttatttcaccgcgacagcaagaatgaacctttcttcacgaggatcagttctttgatccgttcaacaataacgatgtattcccatttagctaacttttgggtatcacaccacttttgaaactctttcatagcctctaagtgacctttactccagtacatttctgcaatttcgttgcaaagagtttcagtagcagtgtttttgattttcataacatcctccttagttgacaagaaggatgttactacattcagatatacaggtcaatacttttatggataatattgaatgaaaaatgaaggatgtccttcgtagttcacatcaacagcaccaattttaacgattgcatcgcggcgggtagcctcttcgacaatctgatcggttaggcttacaatctcaccggatacccaatgcaatttgtgttccggatctgtagccccacagaaaaacagttcaatttcgttagcttccagttcacagcgtagatagttcaaattacgtgaatttgttttgttgaaaatcataatattgcctcaaagttaaattatcgtatatcatcccgaatcgaatcaagaacaatgtaatctatcccattcactcgcttaccactgggatttcaaattgatttgcttcgatgtagaaaatactaatcgatttgattcggcaagtcaacacctacatagaaccaatttacatttttctgtgatttgcatcgagcaacgattgttccttgcgacaaccccagtgtttccgcagcttctttgacggaaccatacacaacaccatcaccagaaaccatacggcgattcgatgcaggtttgccgaacataggatttttctctcctgtatgttttcctttatgagcaatggatagtttttgtttggtttcttccgaccgaaccttccctgtatgacgcaatcgacgttgatttttctcttcttctgtttcattagcataatgtgctttgacagaagatgatatttgctgtttcaattcaggacgagatttatacagttctgtaaaatgagcagacatcttttctttatgttcgggtgtactaacagcaatctttgatgcttcactcagtttccgttgatgttcttcactacggacatgatttttcaatgcacgggagatccgatcgcgatgtaatggagtgatttctcttccttttagcgcattactgtttttgcgtcgatgttcttcgctttgttcgtaggccgttccgcctttaccaccgggtttgatgttgtatgtgtgaggaagcgaaatatactcgtctgttacgagttcagcttcttttagatacatttcctcttccgtatcaaaaacatacaatatttcctttacgaaagattcaatgccatagaaatcaatagcatgtttgatgttctttccagaacccatgtatcgatcatcgagattatcagttttatgagcgccgatatattcacgcccattgatagtgttggttattttgtagattgtgtaaaacatattagcgccctcaatttttctttatttattgaaggcgctaatactaggtgttcttagttatgttttacacgatgaataatttctttttgtttccctgcattcatcgggcgatctaccgcaccaagataaccgcatgtacggcgcgtgacgctcattttttccggatcatggttcccacaatgggtacaatgaaaaccgtcttctgttggcttaaattcatcatccgagccacattcaaaacatttatcgactggaaggttagttccgaagtagtccagtttatccattgcataatcccagactttttcaagggcttccaggttgtttttcatatcagggaattctacatagctgatatgtccagcagttgcaatgtaatgataatcggcttcatagtcgattttctcgaacggcgttaccttgcggtcaacgtccagatgaaaactgttagtgtaccagcctttatctgtgatccctttgatacttccgaatttctcatagtccagtttgcagaaacgatgacatagagattcagcaggggttgaatacagactaaacccaaatccggttttctttttccatgcttcggtcgcagcgcgtagatattccaggatcagtctacccatgttctgagaaccgatccggtcgaatgggtgctgtccagatccgaaaagcatcagggtttcatgcaatccgatgtatcccagactgatagaactacgcccatttttgaacagttccagaatttcatcatcgggtttcaaccttacaccaaacgcaccttctgtataaaggatcggggctacactggctttaacaccgcgtaggctatcgatacgagtcatcagggcttcaaagcacagttccagacgttcatcaaggatacgccaaaatgcatcatgcgcgtcttcatcttcctgtgcttcggcttcaatcgcaatacgaggaaggttgattgtcacaacgcccaggttattacgtccatcaagaatttcattaccgttatcatcatgccacacgctaaggaaactgcgacaacccataggagatacaggaacgctagaaccagtaatagcacggttgttagctgaactaatgatatctgggtacatgcgtttcgaagcacattccagggcaagttgtttgatgtcatagttgcgatcctctggatcaaggttgattcctttttccatgaacataaccagtttagggaataccggagtgataccctctttacccagaccgcgaatacggtttttcagaattgctttctggatcatacgttcaaacatgcccgtacccgtaccaaacgtgatggtaacgaatggtgtttgcccgttggcagtatgcagggtattcacttcatattcgtaggactggaacgcgtcatacacgtctttttcagtcttttccatcgcgtatgtacgatcgccagaaataccgtatttccttgcttctttttcgtgtttttcatacgtcatgcgagcatatggagccagcaccttatccacgtttgcaaaggttgtcccgccgtactggtgagaagcaatctgtgcggtgatctgcgccatgagagcggtagcaacaccgatagatttaggaggttcgatgtccgcgttacccattttgaaaccgttctcaagcatacctttcaggtcaaccagacaacagttagtgtaaggggtgaacgggctatagtccagatcgtgatagtggatgtcgccggagtcatgcgcttctacgatatgtttcggaaggatatgattacgggcgaaatgcttcgctacgatacccgccagcaaatcgcgctgtgtcgggaatactcttgcgtctttgttcgcgttctcgttggtgatctctttgttggacagattcaccatgccggagatatctttgaacagtttacttttctgttcacgggcaatatcgcgatcgtggcgatactcgatgtatgcacgggcgaccgctgggttcgttttcatcagggattcttcaacgagttcctggatacgggcgatcttcattgcgctaccatcgcggatctgattgtactgaaccagcatgattgcggcatcagcatccgtcatagtcccgccagctttatacacagcgttgcgaattttttctttatcgaaatcgacgtttttaccgtcgcgtttttctactttcatttcgttgccttatggataatatctaaattgtgtccaatctcgttaagatatttgatcagttcaaccccgtcaacaggtatatcccttcctacaatctcaagtagttcccacatatcaataacggtgataggagaaaaattagtcaatgtttgaccgcgatcatcaaacatcgttcggtctttcggtttgacataacacaaatcagagtcaccccttccaagcatccaatcatgcagagatatgatctttttgtcagtggaggatatcaacatcatcagctttttcttctgttgcgttgataatcgagcgtttagatatttcatttcgttgccttcattaattgctttctatattttgcggttaaggctttgcgttcgtctttgtcggcgtactcgaagcccatagaaaccatttcggcaatcatatcaggtttggtaagtcttgaaaaccattttaccttatctggtatgaatttgtcatgaatacggttttcggagtagtcttgcttgagatatgcaagcagattctctaaccaggcgatgtagtcaacatcacgggacaccagaccggatcggttgaatttgtgctttacaataccttctgtaccgttacataggttacacagtaggccgcgcacacgtccggcgttttcgccgtctaaagcatggtcatggtcgaggtgatgtttttcaatgtcgccctctaaaggacgcttgcacagagcacagcagcccccttgtttctcaaagagagcttgcttgattgttgggtaatcttttttggtaattcgtttcgtcagcataataacaccattcagtaaggtgtcattatttatcacagggtgcgaacgtactcacgcagttggtcaaagccgccgatgtgcttaccatcgtggaaaatttgaggcatggtcagtctacgagtacctaacaggctttcgagttcagaaatgaccgtttcattcaggatcggtttgccgtctgcgtctttttcatcggctacagaaacaaactcatattcttttcgttttgcgtccaggagacgtttagaattcaggcatggagcgcaattgtaaacagaagggatataaccaaaaatcttaaacatatgttaccttacattaagtcatccagtgtttcagggtatgtatttacgtcgcgtttctggtagttgcacacgtagacttcttgcgttttattttgttcgtaagaatcagtatgctggcctaacagatactttttatcgaggttatgcacattatatttttgcatccactcgatcaggatatcattttgctttcctgcatgatgtgtcacgtttgataaaccaaacttgataccccgctcatgcagggagtcaaggaaagcatataactcgcgttcgtgatctgcgttccagaatttgttatacaccgcatcagtgatcagatacggaggatcgcaataaacaaaatcgttatcgttgatttcaatatcagagtatgaaccagaacgaaattcaattcctgtcacattctttttgaaatgttcgaaacgtttttctgtcataaagttgagggttcgttttcctacagcagcgttaaaatcgcctttgtcgtttgtccggttaacgttgctgaatgaatgcaggatcaggacatagagccataaaggatctttgttctggttgtattcatcacggaatttcagatactcttctttcttgtctttccccagccccttcgatgcaatcaattctcgcaccggagacaggtcaggaagcgttttaagacgctcatacatatcaatcagcgtcttatcataatcgttgcttagaacgggtttagggacgtttagcgacacactaaggccaccgcaaaaacaatcaatgaaacgcatgtatgaacttctttcggggaacagcttgaatagttcaggtaatagcgattgcttgtttcctgtgtatgggatcacaccataataactcataattcacaaagccctttttcaaattttgcaatggtatcgtacttgtaaccacgattcactatgaagcattgagtttcacccaatttattgatcatgtcaatagctttttgttcgtctttcttacctcttaactgtaaggcaattcttacgatctcttttagtgtttcgtcgttgacttcttccagtttaaaggaatacccagcgattttagcaaaaagccccttgcgagctacaaggggaatgttgtcatagaaaatcacggttcctttgttgtttttgcggatactaaatcccgacacggttcctaatttcctctaaagtgtcacgggaagtaatctttccgttgacatagtatgtgatcatagcatctttccagccttccggcactttctgttccagagtatcaatggttttaaagttaacaccatcagtgatagtcatcaacaacccttttttactctttttccattcagcgccttttggacatttatacacaccagtccacacaccgttaattttgattgcgcacattttcatcgcatatttttgagtgtcgcgggtaacttcttgaagcaatccgccgcccataccaaacgcgatgttttcagacgcccaacggttagactccatccagttcaacacccgattgattgtttcagggccatgaatttcatcgccttgaatgatccttactgctgggtgtagtactttatacccttttgagttcactgtatagccaaagatacggcccagttcttcaagagcgtacatgatattgtctaccatatcaccagaatccggacgaactaccagagtaccgcccttagaaagaatcgaatctttatattctgcgatacggcgaaccgccgctttaaaatcccaggaatcatacacacatgcatacatcccttctccgaagatctcaatactgtttttgtacgcaaggtcttcgttttctttgccgtaagaaacggtagtggaatgttcgcgagcaggaattgaaataccagccgccatttcaccatcatcaaacgctttctgacaatcttcaaacagagagatagccataatcagcgcttctacggtatcagtaccgaggaagttatacaggtgcgcgaggccaccaataccagcagattcagcagaagaggttccacgtgcgccgaagtcatgcaaacgggtacgtagtaccatatcaaatgcttcaccttcgagatcggaggttttcttgagatatttcttcaacacttttttacattcgcgggatagagttgctacggttgaagggaaccatactcccctgatcgccagggtttctacgtgtcctgctaaccacagcgcatttttcccagcatggaaagttgcaaccggatttttaaccgctactggggttccttccggaatcgctctgaattcaagagggatgtaacccagttctgcaatttctttccaacctttgtagttgaagatttcgcgtccaaagtgcattttgtacaaccgattagcaaaatctacgttttccatagtcaccggacgtgataggatttgcgcaaggcggttacagccagccgtaactacttgatcaaatttaccaccacgagattcaatataaaacagcgcctcttcggagccagttggatattgcgaccagtgagaaaccttataggaatctacggaagtgatgatgctgttcagttcttcgaaagttttgttgttcataaacgtactccacgttttaggtttattttaaaatacccgatccagtcgttcgggatggattgtattgtgatatttagacttacaatccttactggtttttctgccattcgaacagaaaactttgtgatacgttgtctttgtgtgtttttctttgcacacagggcaaacaatcacagaacctattttagcagccttagccacttcatacaagttctttacatcaatttgtcgttcttttgtgataacccgaccacggaattcagcaacaacggtttcatcacgtacagaaccatcactatactgaactttttgtttactactttttcgtttggatcctgatatttgagaggaaccggataaaagttcacgaagttctaaacggtctttgtaagcaccactgttaacgcagaaatattccctgtcttcttcgtcatcaaaatcagcccaatcttctaaagcctcagcttcatcgctcatagtggttccttagaaataatctttgttgctcaacaggtaaacccggttatcgttgtagtcaatgtaagcatcccaccaaccagcacaatcaacaccatcaacttccaacgcctggataagaacgctacccgctacgttgtcgtattcgtacattgcatgtaattcatccagcattgcttcaacattggcccgtaagcctttgccattgttagcaacaccttttgcttccaggcaatatccagcataagttgctttcattacgatttccatgatgtttatccttctgagttagtgtcttgtctacgggagttagaatactactataaccaacccccgtcaacacctttttaccaactaatgtaaaaagtgaattcacttacacggcgatctgttttcctttcaggaattttgaaaccgaacacttcacgttcttcctggtttctatacgtttgattgtacttactagccagagaatttgtgatcttagcggcgttgcgtttttcttctgtatcgaattttagcccttcttcttccaaccattcagaaactcgttggaatgcatagcgagtacattcaatacccagacaagagccgatatcgtgcttcatatcatagataaggttttgttgtgtcgcgtgtttcagaacaccttttgtgattgtatcccgcgcatgttcgatcatcttagcattctgatcgttgataatttctcttgctcgttctgcgagagtgggggatcggccttctaccggagtttcgccgtcagtaccgatactacgtacatgaatcatattttcacctattgcgttattaacagcccatctttcgtatgtttcacgaagtaagggcgcatgttcaattaccataaaaaatccaacgttgggggtttgatattgatccctaacgtatcacacacatcgttcaatacactttctttgaagagattgaaacatggaaccctgtacaacctagccaatcttacagcgatcgcggttccacctttaacacatccttcacgttcttccgcccaaaataaaacaaaatcagttggattgtcaagattttcacgaagaacttgaatcgtgtttcgcgcataccttctttgaacgtattcattctgtgtatcgaagttacctgctacctttctggcttcgtcagcggctttctgtgtgtttaaatctcgaaagtcgatgatatcctttccgtttgagaaaaggccgttaaacccgttctcaggaaggattatacatctgttatccggactatagtcaaacagaaagtgactatccataccaggagcgccgccagaataagccctgatcccgcgttcgttcaaagcacgtccgattttaacagcaatgtttgcgatacgttcaggaggtttacgactgccaattaatgttactgtcttggcagttttaattactgtactaaaatcattcgacataaaaattaccgaacaattcttttgctttttcgttgtaaacttcataagccttttcagggttatcatatgaacctagaaaaatctgcttaccatcaacaactattcgcgcttgatagttatttcttcttttatcaaaaataacccctctttttccagaagcattgcttcgtttctttatctgctttcttatgttctcttgttgcgttgcctcttgcaaattatctataccatcaccaaattcaacaccattcttatggtcaacaagagcgggaagatacccattagcaacataaaagatgatccgatgtctgcgatattgtttcttttgaaactttataacacaatatccatctttcatagtaccagcggaatcaccaaccctcctaccttgacgcggagaagaccatacgatatttccagaagtaatatcaactgaaacgtattgaaggagttctcttattgcggctatttcatcagaaatacttctatagtttccgtgactgttcatagtttaaaattcatggttcaggattttgccccatacagggcgaatcatattttgggcttcggttacaaacaactttttagccattgctgggtcttcgaactgttcgaggaaaggcccatgattacggctgatttcttcgatagcatcctgaaccgttaagcccataatgcgaccgaaatctttcgcagtgatcgaagccagatccagtttcgaaagaacgtttttcacacggttctctgtaaggtaacaaacaaactcatcgagttggtttttgtctttttctgacagtgaaaccggagcattaaagcgggttgctttcttcgctttcttctcagtgaatttggttgttttgcatttgattgcaacgcgttcaccgtttggcataaaagcaggtgaaacaggtttcattacaaaaccttctgcaatgttgccctcttcaacgtccatgataggatatacgaattcaccatatactgtattatcgctaccaatgccgctatttgctttgttcacaacagattcaaacgtgatcggcagttctttgatctcttcaaaagtaccgtatcccaacagcggggccattttcaggccatgagatcgagagatcagcgaacacaggttatccggaaggaattcaccatttacgcggatatcgaatacgtagaaatctttttcgccgtaatcaacatctttctgtacaccacgccccgcaaattcaccgtagacttgaataaccaaatcatcatacgttccggtctttttgagggtttcccacatcttacggatccctggtgaatactttgcaactactgctgaacagccataaaaatcttcggctggcttcacaacatcagtacgctttgcgggggtaacggtaattccgtcatcggtgataaaactaaagttagcaccgtggatcttttcacgcgcaacccacacaccgccagtaagcccgttcataattacaccattgatgaacttaccttcataatggttagtaagagaagaatatttcttaaacataatttaacctttcattttcacacgtttttcgacttgataaagtgctttacgcagcaacttcacttttacttcatccagaatgacatcacccttaacgaatgcatctagatttgatttttcagcattagcagcattgataaccgctattgtattttcttgtgtatatcccagacgtggattaatacgttccattgtacgggcatacgggctaccgggtttattgctaaacatcttgcctgaatactgacaacgttcagttgtcatcaatactttccaatcttccagagtaaggtcaaaagaatggttgttctttgcggcgtgttcatgcttgagattgtatgaacgcgcaatacgcagatccagttcaatagcagacgcacggcggcgatgctcaatgagttcggggctaagggccacaatctcaggttcttttgctttacgaaccgcttctacatcaggagcggcttgatttggttttacgtttgaagtagcaatactagcccaacgatccatcgcagatttacgcatcagataatccccgcatcttgaaacgccagcgccatagaggtgttaagatgttcgcgtttaaacgggcgaggtttcttttctttcttcatcggacgtttagcacgttctaaattgtacacacgcttacgatggatttcgatcgcttcgcggcgcattgcatttttaacaggtagatttgcagaacggaacgcgcggatacgttcaatttcctgtactacctggtaaatatcgccgttatctaacccatgttcacgggcaatttcggcataacctttacgcaaatcattgaatttgaaatggatttgcactttttcggcttgagacagttcggaaatgctacggtgtacaattttcatattattttcctttggtagaatcgatttttgcaactacattcaacacgctatcgtttcggctgtcaacattttttagaacaaaagttactaccgtatacactccagcgctcatgttgaaattatcaacaaacgggatctgctgatcatcaagagtattgaccatttcttccatgtcatttgggtggtcaacgttgatgaaaatactttccgatacatgatttttgtatcgggttccaattcgttcatcgagttttttacacattacatcaactaacatttgtttgtcaatgcctaaaacaccagagtagatcacatgatatagtttcatacaatatccttttccgattcattaacaattgcaaaggaaaggaatgtaaaagcaacccctaacccgaccatccagatagccgttaaatcaccatacattgatgaatacgcgcccatcacttctaagcgatatcccaacaagaaaacgagatacgccaacactttatcattcataattcctcacaaaacgcccatgctgcatggtaaacgctcgcgcctttgtcttcgttcatgcatacaacatcaaccggacacacaaccctgtacagaacaggatccccacctatagaacgtgcggcccttccagcatatatacgagctaacccgatatcagcggtaaagaaaacacggtctaaatttttctttctgcctttttcagacagagtatcagaatcacagggaggcaataacatgctttcaataccagcagcagtacacgaaccgtgataataaacaacgttttcatttctgcaatgtatcgttttcatgtatcctcccttaaaaagatgcttacattatatcaaatggataaatccatgcaagaaatttctcggtctacatcttcttttgttttgttgacatacgccaggtattcatcggtatacattttccgctttctggctattctttcagcagccgcgcacatttgagcttctgacagtctataagacaacctttctccaaatccttcaacagttagacgaacgaaaggaaccgcagaagttataatgtcattaccatacgcataaccatttttagcaaatacggctttgttgaatcgttcatggtgtacgccttcaacctcaacctgatcaccatagtaagcaatagtatcaatgcgatggttaagaatgatagcaccagattcaatgattttcagtgcagcggcctttccttgttcgcgagcataagccacgatttcataagaaccgatatctatagcggaaccatgattaccaacgatgtaaaacatggaattaattaggtgcttagagatatatgcatacgttttatacatctgatactgttcattacgcagacacatacccgctttgtattcacgtcgtaactgcataaggttttgaatcacttcatcaatacgccatccgttagggaattcggcccttttctcacgtgcgatatggatcaacgcgtttccatacatcgcgttaaacgtcatgatccggatcccttcaacgtaaccatcgataggggcttgccatgtaatagggctatacttcggatcgtggtcaggacgcattttaggggtatggtggcgaaggaatccaacgtgagccgcaaaaagatcttcaatctcacgggagtaatagttgtaagagtccatgtcacggttgcgggaaaattctacaatgaagcgatgtaaattgattttcatatcatataccttatggtttaaagttcttccggcctatccgtcgaacaccctaaccatacaccactgtcagaaagcatgtcaataaataatagaaaataaactggagaattttacatgaagtcatttaaacaattcacagaaagcaccttaaccgaagcgctgatcaccttcggaggccgtgcttatcctaagttcggtcaggttgttattcttgctggcggtgctggttccggtaaaggattcacactggaaaaactgctaggcatcgaaggtattaccctggacgttgacgccctgaaaaaacttgtaatgggtagcgataaactcgcagcagagatcaagaaacaaacgggtcatgatgtcaaaacaatgaacctcaaaaacccagaaaacgtatctaccctccatcatgtgatcgccgacgttttcaacatttccaacaaaaaccaaaaccgtgtttattccggtattatggcagcaccagaagatcgtaaacctaacctcatctttgacgtaacgttaaaaggtatgagcaagctggcaagcatcgcgcgtgatgtcgaaacgctgggatacaaaaaagaaaacgtacatatcgtatgggttatgaacgatgtgcatattgctatgcagcagaaccagaaacgcgatcgtgtagttcctaaagaaattctcatggatacccacgaaggcgcggcccttactatggcgaagatcctgaacatgggtgattctcttaaacagtatatggacggcgacatttggatcagctttaacaaagttggtgttgatagcgagatcaagaaatcaagtaacaaagggatgtttgttgttaagtcaaactacatcaaagttaaagcccgtggtaagcctcagaaatctgtagctgaactggataaggaaattgtggctaaagttgcagcatacgcaccgaaaactgacacttggggttgacattaatgattaaacattatagtatgcatacacaaactgaggaattgatatgaataagtttttctttgatatggatggtgtattgttcgactgggaaggttcatttgtgccaatgtatggcgaaccctctatgatgacagaagatgagttgaaaaagtgcaaagcaaaaattgccaaaactgatttctacgaaaatctggaaccaatcaaagaaggatttgaattattccatcatttaagaacacttggtgatgtagcaatactaaccagtgtcggtaaattcaattctgacggtgttgccgaacaaaaacgtaaagcattgcaaaaagtattgggttacgttccagaattccactacgttaaaagtagccatgaaaaagcagcattcgctggtaaaggaattctgtttgacgatcgggcaaaagcggtgttgcctttcagaaaagcaggaggtaaagcaatcctctttgttggtgataagaaaacagcgcttgatgaattaaaaagattgtaaaagaaagggaaccattgcggttcccttttttgttattgattagcctttgcaagcgcttccgtgactagctgaatattttcttccagggtttccgcaaggaaaataccaggaactttattagctagatgagaattgttccagatttcaagatgtttctggttgcgggaaatcagaacaccacgataggcatgttctgcgaactgttccggatagtcaatgcgactaaaatcgagacgagggatccccagttcagcgcaaatcttatctgtatagttcagtttttctttcataacccaaagagggctgaccgcttccgcgcgaagcagcaaagtagcaggatcaccgattcggcgttggaaactccattgaaggaggtcaatcccagcctgaatacggggaaggtttttataaaaatcagtacgcaccaaagaagccgccatttcgtcatatcgttcttttggcgttccttccggacgtacaccgaacttatcataaaaagtctgagaaaattctgctaaagtgtcgtcgaaatcaaaaagaagtgtattcattgtttgccttattttattggtcaggatctggttcaggagcaggagtcaatgacaacagactaaccagtttaccattacgagattcgattacatgaatatcaccataatcttcaaacgcctctttcagagtatcaaactctaatttatatttttcttccgcataatcgcgccagtcgtcgcctttctcaaaagcatcaacgataatatcgtatagccagtatggaagatatgtaaaactggtatttctccacggaataggatgaaccgtagtccatttttcagttgccatttaaagcctcttagatttcactcattttatgaatatagccgtttcgtgaatcctggatctcacattcaccgttttccatgaacgctttcaggatcgtttgtacttcctcactatacttgtaatcagcataatcagttttccaatctttaccctgtgctttttgatacagaatttcatcaagtacccaataaccgatcggggtaaagctggtatcacgccacggaatcgggtgaaccgtccatttagaaacaagatcatcagaataagtggtcacggtgattgtatcagacgtggtttctgttgctgattcttcatcagcaccgtgttttaagatcagggtataatcgccagcagttgtaccgtcaaccgtagttgtgtaagtatcggcggttgcgcctggaatatctacaccgtctttttgccaacgataggccagaaacacatcacccggatctagttcagtagtttcaacctctaaggtcaaagtttcgccaatcaaaagttcgtttttgttggcgctaattgttacagaaggaattgccataaatttagcctcttatgtttattggtatttatagccggagtattttaccgttacacgttccgcatttgtcgtagccgttaacacgtccatacccattgcattcaggacaaaacggagtagtaaccccgaaaatgttacggatcgcataagtggattgttcttcggtcaacccaacaaacccatcagttttaataaaatgttctttttgtgaagaaagcatatcggtatcatcatcaagaatgagatagtttttacatccgaaagtatcgatccatgccttgatttcatcaccacgcattccagtactatgagggaagttagtgcaagttttaccaatgatccgatacaatccccacggataaaatatttcacgtagattatgggtactgttgccgattctccacgtagaggaaatgacgatatcacaattagcgtgattcactatccggcgtaagtgtcgtgcgcattcgatgtccatatgttcaccaaatttcatgcaccgcatattatttagaacgccatcgatatcaagaaaaataacgttaccaatctcgttaccatcgctcaaatcttttaaacattcgtgatttaagttcatatttcacctaaaagaaaaggggccgtagccccttgttaatcaatagaatccgcgagcttcattatccagtctacgatctgcaatcatatgagcttccatttgacgagatacgtaatcaggatcacactccattctttcttcttcgtagttgtcccaggtatcagcaacccatttagaaccgttccaacgagcataaccaggttcggcatgaacaggataatttgcttccgcagcgtggcgaagtgcttcaccaacagtgtaataaggagctttagaattgacgattttcttaacttcaccattagtccaaacaaacagaactgggtagtaagcatttttcatcatgttcattttgtatttccttcttcactgcgagagccattcccccgccttcgaatacaaatatactcgaatagcagggcaaggtcaactactttttaaaattattttttgaacgtgtagaactggctgtttcgggtttcccttacagtaaccatcccatcacgatgcatgtaccatgccagcgacttgagggtttgacgcgctgaataatgaggacaactgtcagggtgcttgtaccaatccggattttgtttcatccaatcatagatccaatacggacacgtataaaagccagtattcgaaacagagcggcccatcatgatgatagacggggtaaacccttccatccatgccagttcatcagaaaccgtctcagaatcgcttgtaggagcttgtagagcgtcgggaacaatttcaatctggtcggcaatttccggagcaacatcaggaacagatggttcaccttcgtatgtaacaatttccggatcaggggagtcgatcaacagttccggtttttcttccggtacggcagcttccagatcagcaagcatattttcgaatgacttctgacggttcagtttgacatcaaacgtttcttgcgcgtaggtagcaagctgtaatttggcttctttttgttctaaggctttgaaaccttcaaccttttcgtaatcaatactcattgtagttctccaatgtttatcattatttagcctataaatattcatataaaccgtatataggatacacatagtggatatcgaagtcaaattccttaacactagtcatgtgcagattcaggcagaggctaacatagtctatgaattgcgcgactatttcagcttccagccgccaggttatcagtaccaggcaaaatacaaatatggtggatggaacggctacatatacttgatggactataacgggaaactgccctacggtttagcctatcttgtaacaaaattcgcggagtctcgcgggtattctatctggatggatcctaagatccacgaaacagaagaaattacccagccagattttgacaagtggttagaagaacacccagtatacgacggaaacaagcaaattgatccgtattggtatcaaaaacaatcggtgtttcatgcgattaaaaaccgccgtgctgtgcttaacctcccaacgtcagcgggtaaatctcttattcagggattgatatctcgttggtgtctggaaaattacacaggcaaagtactaatcattgtcccaacaaccgcccttgttgatcagatgatcggtgatattgtaaactatcgccttttacctcgcgaggcaatgcttggaatacgttcaggaactgctaaaaacagtaatgcattgatctacgtgtctacgtggcaatcggctgttaaaatgcctcctgagtggtttcagcagttcatgtgtttgatggtggatgaatgccacaaatcaacaggacaaagcatacagaagatcatcaacacaatggatcagtgtattttcaagtttggtctttctggttctctgaaagaaggcaaagcaaacatgatgcaatacattggcgcttttggtcaaatcttcaagccagttgatacaaatcgattgatgcaggaaggtcaagttaccaaccttcgaattaataccatcttcatgagatacaaagaggatgagattaagaaaatgaagggggccgattaccaaagcgaaatcaagtatataacatcgcataccaggcgtaacgcatggatctgtaagctggcgttgaaactggcaagggaaaaagatgaaaacgtgtttgtgatgttcaatcagatcaaacatggtaaatggctgtatgagcaactcaaaaaggtatatgacaacgttgtatacatttctggggaaacggggattgatgagcgaaacgaaatgaaacggatcgcggagtcaacgaaggggctgatcgtaatcggttctattggcgtactgagtacaggtatttctgttaagaaccttcatcacatcatcttcgggcatccgtgcaaatctgctgttatagtcaaacagtcaattgggcgcgtactgcgtaaacatgattctaaatctcttgctactgtttgggatttggttgataacttagcaacgctggcaaagtccaaaaatgctaaaaataaatattcatacaaaaactatggtatgaaacacgcaatcgaacgagtacgcatttacaatgaagaaaagtttgactacgtgatcaaacaaatcgaaatttagaggtcaaaatgaagagtttcaacgattttcgactttatgaggcggctattgatgatttcatgagcaaggtcgcctcttgccgtactatggacggccttaaagagcttgaaaaatattacaaaaatcgtgtaaaagaagttgatgttgcgccgtcagacgatatttctatgcgcgatgcgctgaaaggtcgagccgaagaattaaaggccgaactagaaagcggagaagaagaaaagttctaaaaaagaagccccaaccgaaaggaaggggctttttaattttgggacgcaatcagcccaacacgtacatttgattatagccagtgaggtactattctggctttttttactcatgcccttgatcgaaggtatgttatcaatcaccccgccgaaggtaaactccatcggacggcgcaaaagagtacgcctatcatccagcattcttttatcaagcccctttcgggtacgctagtatttatgcactaaaaatcagggtgttcgtcagattctaagagatctggacgttcatcacgatctgtaattccttcaccgtaaccaatcataagattctcctacagcaacatttgaacttcattcagatcatcggattcgttgatctcgccgttttttgttttttctgcgatgtagtcagcacagatagtactacacacgcgcccagattcagtcacaaaaccagtagaaggaaccggacacttgcacactacacatttttcattttcagtagacattatgcaccactttctaatttacggatctccaacatgtttttgatagagtatcctttgtttttgacgatatccagtgctttactggtgaaatctaccaccatgtcataatactggatcagcttgttggtttctacaattttcggatccccagcgatcgcgattttaatttcagtagtcccagtatacaccacttcgcacatttctttgtcatgccttccggtgtagtacaacatacgatccttcacatcagcttcttttttcgcatgaagttggatcaattttttcttagcgtttgaatggtatcgaagccatttagcccaaatcttcgggatatccgctgattctgattgcaacttgaggggatctatcagcatatccttctcaagttcattttgcagatcttctaatttcaaactcataacatactcaccaatttacccagttgatctataatatactatattaatttgtagtcaaattttatttgatctaatataatatattattaaaagaataattatacatgatctaattaataaaatcaaatttatttttacttgatttcaaaaattatttgatctataataattataattaataaattttatcataaatcatttataaattcaagatctaatttaatattaattataataattattaaaaggtggagtaagtttccctactccacctattgaatattatccccgttgggttatactatcaacccagtttaggaagtttgataccaacaatctgactcattttagatttgcctgagaggtttacccagtcatcacctttcacaagtctttcattagcagcagtggtatacgggttaaccgataaaccgtagcgcatcagaatagcaactttaggctgtaaggattgaggatcaacagaaatcttgatcgaacctgcctgatcagcttctgtgtatggcgtatagaacagagagccaacatgatccatttcacccagatcgtacttgcaaccagtcagcaggtaatcaaacggtgtattggtgtcagtatagacatagtaaccgtttttaagtcgacctgttgctaacgggtgggtttcatcagtttcatgcatccaaccagacgcagacagaacgcttacaacgcgagaagaggccaggacataggtagcttcaaatgaagtcgttctattcatttcctgccccatttcacacactaattgatacaggaaacgacctaaagccggagcatcctttgcagtgtatgcggttgtagcatcgaaaatgccatttgttaccacaccatcaacgttgtaacgatgtgatacgttgatcagagtctggatgatatctttgtttacttcttcgctggcaacagtacccagaacatcttcaatcacattttctgcgttgaattggtttgcttccagatcctgcataagttccacggtcatttcagttttgaatttacgggaacgaacgttgatattccaacgatccatttcaaaagaagttgtgctaatatcttcgctggtttcatactgacttgttggcgcggcttcgcttgccaggcgtaatttattgctgaatactgcgaccataattgcttcatcaatatcagcacctgcgagagttacgctatcagttgcttcgtatacgacatcgcttgtcggatgtttaaaaacttggcctttggtataggcagtaccaaccgcaccaactggaatgttatcacggcttgcatacttaccggaataggtagcagcgctggaaaacgtcatatcgcctttagggttacgataacgcacaccgaacagggttgcggtaggcaaattagtttcctgaattgctacaagttcaccgtagatcaggttgtttaccgcacgggtaagagataccagatccggacgggtattagctacgttaattgtttctgttccggttgcctcatcaagaacctttttagacaggccaggcggtagctgtgactgacgcaccagcttgttaattgtgtaaaatttttcactcattttatgttcctgcgtaaagtgtataatggtatttatgcaacaaatttccaggtagggtatttgtcgctattaatccgatattttaaaccagagtgggacatactaagggattttgccgcctccgatccggatgagtatacaactccatctatcgatacagaacggcctaatttggccttgtgcgcctctgtgagaggtttatactctctgtctgtacgtccgttcacgtatttagcttttaacgtctctgagcgcttcctgttggattcttcggactgtggtttacctaaacgggattgtctcatcttctcccttagttctggtgttcgcatagcctttgcagtattttcagaaatctttttcctttgttcgtcagaccaaccaatcaatgacataggagcacctttaccacctatgccagcattatacgtatctggacgatttatgaattcgagattgacgatctctctttctttttcatacatttcttcacgggtatcgaaaacatgtaatatttcttttacaaagttattcattccatatttcttttgtgcttttttaaccgcaatccctgaacccatgtatgaatcattgatgtcttctgttgaatgagcaccaacgtaaattttattattgaccaaatttgttattttgtagataatatgtttcataatatagcctcaatcgttttcactatttatagaaatgaaaaagggaacccgaaggttccctttaatatcgttatttttcaataacttaggatcaaagtcctttcacataaaccttgcggaagtatgcgtttttaccgaacatttctttggtaatcataccagaagtgatacggtcggacggagcctgagagcgagagttcgcaaacgggttgatacctacaccgtaacgagttttgaagcccattactggctggaagttcttcggatcagaaccacgcagcggggtcagcgcaacatacggagcgtagtagataccagcatccatttcgttatcgcctttgtaacccacggtgaagtaatcaccacgtgcatactggtcgatgtatactttatacacgccacccagaacaccagcgaatactgctttagtggtgtcaacgttcagagtcttctggagaccttgacctgccggagtgataccgctatcgatacgagccagagcggaaaccacgttacgggaagcgatgatgaagttaccagcaccacgaccagtttgacgtgcgatttcgtttgcttctttgtcgatctgaatcagcagagctttgtagctttcaccagcccaacgagcgccacgaacatcaatcggatcctggaagtcaaacgcaccagctttagagccaacggtctgagtgaaaccagttttaccaacctgtgcggtatagttgatcatgtcaacgatttcgcggttgatttccagcatgatttcggttgccagaatagcagacagttcggcgtcagcgtccataccgtgaacagcgcggagatcctgagccagttctacagagtactgtgctttcagttggcggctacgtgcttcgataacctgcttatcgatacggaagcccatttcgttccacgggttgccagtagaaccgttgaactgttcttgcagttctgctacactggtagccataccgtaagaaatttcagccagagtacctttttcctgttcggcgataacagcagcatccagagcatcggcggtagaaccagttacagtaaccggagagccagaaacgttctggaggaacacacgaccagtttcagagaaatcgtggaacacgatagcgccgtcagcgatagcagtaccggaagccagttcggtaaagccgttgctcggagccgcgccctgaccggagtacatgctatccggggagaacatcggatggaatgcttctttagcaccggaagccagcggatctttgccgtacactgcgcggagagcgaacacctgaccagtagggccagtcataggctgaacaccgcagatatcgaacgcaatcaggttaggaatcgcacggcgaaccataccgattacagcagggccgatgttggtgatagcaccgcttgagttaccagaagcgattttggttgcgtcgtaaccgtggtcaccagcaatttcagcttccgccaggaaaccaccgaaggattcaacgattttctcgtcgcggtaaaccggatcaacttctgcgtctttttcctgtgcttccataatggcagcaatcagttgttttttggatttggtagcgatatccggtaagccttcctgagactccagaagatcgttccatttttccatcaattcgtttttcttagacattgtttcttaccttttgaaattaagaaagggcttttgccgcttgtacatatttattgatcttggatttctctgccggaacactttcaactaccggaacaaagtcatctttcgtttgcggagtatttacagactcgtcaacgggtttttcagctttggttgctaccatttcaacaattgcgctgagtttattttcgaaggttgcggaatattccagcccttcaatcagagattctactttttcgacctgagattcggtcaaacctttagttttctctgaaactactgcattgcgtttcatttctgaaatttctttggtcagttcctgattcgcttcaaacagggttttaacttcctgctgattctcagtcagttcgtcttccagttcggcgactacatcaacctgttcttccggaatgacaacgttatgttcaaccagaacttctttgaggcccatgatcagggattcaaacagatcggctttgatgtcacgggaaacggcttctttgttttctttcagccattcttcggaaatgtgcgcaaaatatttatcagcatcttcgtacagcttagtttcgatttcagcggcacgttcagttacctgagcttcgaccagttcgtcggaacgttccgcgatctgggtaatgtgggattcagcgagttttgcagcgccagcttttacagcttgttcgaatacagtggtgaatgtcgctttcacgtcatcagaaagttcaactgattcgaaaatgctgtctaactcgaccggagtatccaggttctgggcttccgccagcagttgttctttaagcatttttgattttcctgttgttttgtttaatgtatttatagacctttcaaacgctcggacaattcccgaaaagcgtcatcagcactattattctcaacaagcggtttgctttgctgattttccactataggcttaacatatgcatcaggtgcgcttggcccccagacgacatcaacgcctacagctaatttaaagcccttttgtacaacgccgtagcctttgccggaatcggagagcttacctaatccacgggaagaaacaccaggaacccaaccagcacgaatcaacgccgccagtttgtcaccatcaccaccgtcgccttcaacaacaacagcgcggccccaaacatcgttacccttccaccacaatttttcaatcaggatgcaagcatttcgcggatccacattcgggcgcggagggtgattcatttcacctaatgcttgacgggtgttaacttgagttctaatataatcgttaactgcttcttcaagtacgtttttaggatacaaacgacggttacggttaaccttttcggcttgaaggaaaataccttcgatccgcaatttaccgtcttttgattccccaacagattctaaaatagattctgaaacgtcaccgcaaggtaaaccccattcttcgattaaaagcatatcgccgttttcgttgatttgggattcattcatatttatagccccagtgcagcacgtttacgcaatgctttcttgcgcttacgttgtgcgcgagtagcaattgacgggttagcacgttttgttttgagagcacgacgcgcgatctggcgacgttgggatttagttaatccggtcgtctgatacgcattacgctcacgggttttcctgtctttgaggcgttctacgttgccacgggaatcaacatgcttgacaattacctcatcaagtgttaaaccttcaacaaccgccatcatagcaagggctaaatttggttcggtgaccgccaaattttcgatgattttaaccgtgccttcatcgatacccagaatatctacacgggctttcgcttcgtctaaatgttcctggagatcttcggcggtgatttcgatgtcaagttgcattacacacctcactcatcatctttatcggatttatcatcctcggctggctttttatcgccattttcgtcatctttatcagcgccttcgtcgtctttttctttgtcttcttcgccttcgatgcgtacagcttcggcaagttcaacgcgtaattcgtgacgaagcgcttctgtgcggtcttccatgatggagtaaaaagtttttttagcttccaccagattaccgcttttgattgcttcgataaattctttcatcaaaagttttcctcttccgcttctggatttttaaaacgttcttcttttgattcttcttctatctgtttggcttcgctttgaatttcctcatcagacatccggagaacttctttcattacgtatttatgggagatatatttgccgaccaccccttcaagttgtcccatcaggtttaaacggcgttccaaaatctcaatatctttgatttcggaatagtaagaatcttgctgatatacaaaagcaatcttacttacgttttcatcccattcatcttctgtaatgattttcttcgcgatcaagttagtttttaacggatccgcaagaacagggttgaattgaatttgcaattcgcgaataaatttgctaaagttcaattcgtcgcgggtaataccgccatcgttacccaactggataccgccatcatcgcgaggcatacggcttaacggaatacgtaacgcttcatacagcttacggttaaaccatttaacatcgtcgatatcagagaaggcagtgccaccaggaagcgttgaaacttcggtaactgctttaccatcacgacgcatcagccaatagtcctctgtcattgacaggttattttgctgattcttaactttaccagtgctcgcgtcatatacaacacggttttttaagccctgtgcaatgttatttacgtactgtgtagctttagggccacccatctgacctacgtcgatatagaacacacgacgttcaggcgcacgggtaatacggtaaatcaccatagcatcttccagcaaacgcaactggttagctggcttgaccgcgcggtgcaggtagcctataatgttgttgtcacaatcttcaaggccgctatgagcgtaaacaatcgcagagcgaggaatttttaccttgtcattgtgactataaatctgtccgttgtagctataaccgtttttcggtgcggtgtatacgaagtattcacgatagccacggaaaattttaaccccaccgggtagggtttctgtaaccgattctcggatcagttccatgcaacggggatctaactggcgcaattctttgatgccgtcagcttcatttttgtgcatgattttatggaaatagatacgcgaatcaacataccaatcacggaataaacgagagcctcggttatcgaaatcgtgaatattcattacggtatcgagttcttccatgatcttatcttggatatttttactaaaattcgttttagtaagatccatcgtaacaatatctttcccttgttcattaacaatcgcttcgttaatgatttcagaaacagcgttttccacttccgggtatgtcatgataccacggtatgtatttattagctgtgttttgttctgaattcgcggatcctgtccggaatagaactgttggaacacagaagaataacgctggtttgataagtccgtttcgatttcgtgcgccccatcgttatttttcggaggcgcaatcgaacctgtatcatcttttaattgggcttcaaattccatttcatcctgtttggcgaaatttttgaaaaaccctaacacattgtctaatccaaaaaagttcatttacaactccgaaaaataatgataaggggtattgctacccctgtatttatagcgtttaaacccaccagtctagcgcgaaagtacactcaaaagtgctcacttcgttgttgctatcccagtctaaagtaacctcaccaacgttggtcgggaacaggccataaatggtatgttcggcggttacttcgtcgttacggtttttctgtttaaccgtagcggtttttttgtagtttgcagggatatcccctgtaatgtcttcacccataccatgcagcatgtttgaccatgctacgattgcatcacgggttgtgtgtgcatcgtcgttatataccgtgattgtccagtcatcataggtacggtcaccagcaacgttaattttgcggttcatgtaacctaccggaactttttcaacggtagacgctggcatagtagcggctttacattttaatttaaagtttttgcccaggtacgggatctctacttcgaacaggttcggacgtgcgaaatcaccggattcaaaggcgcgtacaatatcagtaagcattttctaacctctatgtgtatttataggggcttttcagccccttacatgttatactgacgttgaaccaatcaactcatcgaaatccgcaccagttgaggttgctacgaagttcagtgtgatgtagttgatagaacgtgctggtttgacgtagattgatgcaataaactcattgcgatcaataacatccggcgtgttgttcgtagtgtcacaaaccacacggtaatcgtatacaccgcccagagcgcgaacgttagacatatactgtcctgcatccatacggaaggaagaacgagtgaaatcatcgttattctcaaacagtttatattttgcgttatcgccaatgtctttcttgatcatgttgaacaagcgacgaacgttgatacggtcaaacgggcttggaacagtcgttgcggttttatcaccgtacagaatgtatccagcaccaccagagaaaccagtaaccgcgttaatctgtacctggtacatagaatcgcgatgcgcgttagtcggttcgatagccagtttgatgcagttacgcagttgaccacggttgtagccagccggagacatccacggttgcgatacctgatcggtataaacacagaggccagccatatcacccgcgagcgggatccaacggttaacatcgttgtatttatcatactggaacttatagttaccgtcgatgaacgcataacttgaacttacgttcatgttgttatcaactggggtagtattaccgattttgtagcctgtacgccattctacgaggttatcaacggcctgagccagtgggatattaaccagagcagaacgcggcggagaaacgaatacaacgcaatctgaacgggtttcaccgatagacacagcgtgtttctgtacagtagacgaaatttcggcagtttcgccagcacaagcaccagcaatcagcagaggaacatgcagagattcacgatctgcgaacatatcccaaccagccatgagttcatcagcgcctacagtggagtttgcagaagtaccgccgcccagttccagaacgccggagaatccgacaggccagtttagggacgtaccatacagatactgcgaaccaccgtttgcaaagaaatcatccatgtagatcgttgaaccgtagatatctttatcacctttagcggttgacacgataaacgtttcttggataataccaccacggcgaacgataaacgcgtattggttatcattctgagggccaaagttcatcgaactgcgaccgctgtttttaccagacttaccagaaggataagacttaatgacagccgaagaatcgtatgcagctttagacagaatttcaaccgttacggtgctacccatttcgccaggataaattgcaataacagacggtagcttgtatttggtgcaaagtttctggaaagcagttgcctgaatagtttcttttgcggtgtcaaggttgagcagagtaatacccggatcaacttctacgccgtcgattgtaatcgtagcagaaacaccagaagaactggaaacgatttctgtagtccagccactagacagatccggatatacaccaacctgtttagcgtgtgcgatgatcttagtgctcggaatgaacacagacaggactttaccctgatcatcaacgctggtaacaacaccatcttcttcaataacaacgttattgtgtttaactttgatctgatcgtctactgcatagttagaaccagcagcggtgatcgtggttttgatctgattatagatcgcggttgcgttttttgcggcttctttatcgacgacacgaacaacacgcagatcctgaccgaactgtaaaaagtttacagcgttcatgaaataatcagcggtgtcattgtctggggagccaaaatagtttaccagttcgacttcgttagaaatctgacggatctggtaagctggcccccatgaaaatttaccaacaatagcagcacgaccagttgaatttcgaacaacggtagattgtaccgatgtttctttagtttcaatgcctggagagattaaagccattattaagtttcctctaaatttatataaacgaaataccgtgttggccgacagatattgtttcgtcgccactcgttacgataacaggacataacatatcttcataaagcagttcgcgctcacgtgcgaatacctcatttgccaaccgcaaatcgtctttctcgcaaaattctgcgaatttcatttgtgttgttagccatgcaaagcaaaccagcgccataacgagatcgtcatggaaaccttcttccgcagcccacgaaacacctttttctgagaaagtacgaaattcaagtattgtctttttgttatttatgatgagtttatctttctctatcaagtcttttagggttgagcatccaatcgctttcgatcgtttactttgtttcatccccaaatcattatagctatcacaaataacgttatcgtaatccaactcagaaaacaaagatttagccactgagtggcctgtgctatttagctcgatataaacccatgcttcgttgtacatcataagataacgtaacaggacatcaggcaaaataaggtgcgatgttttgtttgaatgatatacagcaacctgttcaaacggcatagatgtaatatctataatatgcatcgcgtgatagtcctgaccgcgcccttcggctgggtcgagtaccgcaatatatttatgtccctctacaggagctttatactgataaaaattagtttctgtttcatcagtatcaacccatgatagtttagacaatttccagccagcgatcagggttccgttggttcccatgaattcagcacagtgttcctgtaaaaatgcttctttacttgaactggcgatcatcttcgaagaccatgaatacccgtcatcaaatacgccatcatcaccgtctgtatacaaacgctctttaaccgatgtccagatcgccgtgtatggcacgaagccggattttccttctatagcagcgttccatatatcatagaagtggttaagcccgttaggtgtcgttgtgataaggattttcgatttacgaccagaagaaattactggctgaatcgctaaccacgcatcaataaagtttggaataaacgcgcattcgtcaatgtagatcattgcgaaggagttaccacgcaccgcatcgggagaagatgcaaacgcaccaattttacatttgttatcaagttcaatagaacctttgttccattcaacgataccaggttgcaagaaatcggggagaagttcaatcgcctgttttgtacgatccagaacttccgcagacatagaggctttatgagccaaaacgccaacatatttatcctcgttgaaacacacaaagtgtgcaaggaagatagcaacaacggttgttttacccaactggcgagacaggttacaggcaaccatacggtttttatgcatttcgatcagcatttcgcgctgatagtcacgcaactgaaccttaattgtaccatagtcaatgtgggtgatcgcgcaatatgtttcagcaaaataaacaatatcgtcacgacacttaacccactccatcaacatctgttgcgtccatttcgtttggatgtacgcgcgtttcaggtttgggtttccgttatatcgagttttcttgtttcctttgtttttataagtcgcaaagtttgaactgtcttttgcttgaatatcaactttatggataccgttaatttttaggtaatcactaaactttgtcggataccattttttatcatgttcgctttgcgtccactccatcccaaattcatcaattttctttttcagataatcgggatgcattaatccgattgggtgatctgattccttactcggatcgatcgtcggttccatttccatcagggtttacctctaccgcttcaccattaatgaagccttcttttggttcgtatgcactaccatatttctgcattaattccgtaggggaaccaacaaatacagttgcattctctatgttcatttcattaccgccgccattacctttttcagatcctggttttgttgtttcttcggtaatttctcgcatttctttatgaattttcatcaatccctggttagaattgtttaactgattcatcagggttgtaaaaacttcaacgtgtctcggagattcagagtttttagcgttatgcaaggcaatttgtgccatatccatgatcatctgattcatgtaatgcgcggttttacgcgcaagtgcatagtcttcctctaaatcaggttttcgatctgctgggtgtgactcgacatcaacgagttcgagtttttcatatacaaccatttcttccccagtttcagcaccagggagattttcaagatcaagtagttgttttacgctaaattcttccattattggcccctcggtttaggaggttgatcaccgctaggaattgggatatcattagcatacgtttgaatgtattcttctcccgtgtaatcctgtataggcatatcagccggatccacctgagcatcaacggattcgaaattgtctttgtccaacgggttcatattggaaaagaaatccgtgtatactgttctgatctcgcctttaatctcgttaacaggcggatacaggtagccctgtaattcaaacattaaagaccattcaatgtgtcgccgtgtcgttgtatcaccttcaaacgtggtatcaggggaaacagattgcagagatattttaatatctcggtctattttaatgtcgtttttatgtaattctgtaatacgacagttgaaatgcggctggaagtatggcagtatttgttcgataatctgaaacacatcatcttcgtaacgggtatacactcccagttcgaacatgagacgatacggagcagggttaaactgcgttactgtttttccaggtgcgcgtaactgcgtcattttttggtttaccgcgatccccgttttacgaattgcgttatactgcaaatcaacgagggatagattcatacgtggtaaaattgtttccgttttagcaacattttcctgactgtatgcatagttcagcttgttcatggatgccaggaatttttcttttgatgcgtaggtaatcggaaccttgataaatttttcttgttcgccgcgaatgcgtttaacttgcacgtgattgaaaagacaacccatcaagacaatataatttcgcagcgaactattataccagtagccaaacattttctttttcctgtatgggttaaagcgggtataagatttctcctatacccttacatgtatagggtttcccctggttatatttatgggaactgtgcgaacggtgatccgcgcccgttaacaacatcaaacgattcaatgaattcatcgccttcatcttcaaaggcttgatcttcttcgtactgttcaatattggtatcagccaatccatcaagatttcgaataggttcgagatccagatcagcatcgggagcaagattaatcccttcatttcgttgcagtttaggatccaattcttcaccagtatagataaatttaacgaggttgattttacgttgaggacgatcgccgaactggaagaacgggtcaaactcaatccatgtaatttcaaacaggctgttatccatagggaaataaatcaaatcccccagaacagggatcccgccatcagtttgatgtgcaaataaacgaggattgatcacaagtgtcatttcatcgtttgacatcataccaaatttgctgtaaaagtctctctgtccttcgtagtttgcatacgaatcgatgtatgctgcaattttccacgattttgtaaacttcgattcacggtcttcgcccaaaattttatcaatattaacaaattctcgacggacgtaatacatatccggagatttcatttgaattgcttcggctgttagtgaatcatgcaactgttgagtagggttatacttgtaccagttaacgtatttgttagtaacttccgtttttaaactattatcaacaccttcgccagattccaactgtgcgaataaattatcatcccaatcacgcataattccatccctcccatttcttagattttattcgactaaagacggagtttttagttatcccgtaatgatctccacattctttcaatgttgagtattctactccatccacaattacccttcgtgcggctgggtttttgcttccagaaacatcacgaggctttctgtgttgaatcatgaccctagtggcttcctgtcttcgttttagtccttcctcgctataaaccctattttttgccttttctgacatctttattttagattcaatagatcgtttagaaccaaaattagggttatctgctggattataaaaagaagcacctcctttaccgccacgaactaaattaacacaattatcataagatgctatcaactcatcaacaagtaattcttcggcttccgctaataaatccttgtttggaaacggttttgaccattgtatattaacaatacattctcttccatatttttttaatgctcgtttgatgtataccccagatccgcaataacaatcatgtctaggatcattaaatggagaatggcgtttacctccatatatttttattcccgtagaagttttaaactctactagatataatctaaattgcatttttcctccttacatcatcaacactggaagtgcatcagacagtaacagaagttcttgacggaggttttctttttcttgcatagcttcctgaatcagtcgggttccatccggagcaacaccaccaggtaattgcataccctgaaacttagccagcacctgaccgtttacctctttaacaagagcagttgcgtaatctttcacccaacggttgttatacgcagaggatgaaccctgaacgcttgtaccttgaccagccttcacaccgcctgagacggctttgtaggggttattgtatatatctgctatagttggcttatcttcgccatcagaacccgctgtagcgtatccagagacgttaccgaccatactgggtacatcaacaaaggatctgatcattgcttcgataacaacaatatcaccatctttaacggttccgtatactgcaaactgtcctgtgtcgtcgttataccagtaatcaggaagcggagacaggagatcttgcattgaccgctgatagctcatcatctgggtaaaatagcccatatccgcgccgtatgcgttcattccgtaggtacgtgatgcacaaccacccccgcccagagaaccaccagtaaggcccatcaggaaatcagtaaaccacggataaaccgcagtaccatccatcgatacaagggaacccatgttagtacgcaacactttagtaattgcgaaaatgtgttctttactcagatcgaaaatgtttttcgggttgtccggccccagggtaagaatgatataccctttgttagatccattgtaatgatattctgcatataggtctaatgctcgttgaatacagtcataaacctgatcggttgtcacttcgattttgacgatcggagcacctaaacggcgcagaatttcatcttttaattgtgctgggttgttcgtaatcataaagatcctcaaaaggggccgaagccccttgttaatcgttaagcgacagtgatcgccagttcatcagaaacgatgactttatggcttgcatcagttaccgttactttgtaagttccggaatcagaaggctgtagcgaatcgatggtaaatgtgttggagtttgtgccaacgtttacaccgtttttcgtccactggtaagacagcggagaaacgccaccagtcatagttacgcttagagacaatggatcgccagtagtgtattcagtatcaccagttaggttagtaccgaatgacagaggcgggtttttgctctcataacggagatcggcgtcagcttctttgatgtacagagccagtttagcattcagatcttcgatagttacgcgatctgcaagtgcctgtgcaatgttcaacgcttctaaatcctcaacacgtttagtaaggtcggcaatcagtgcataaatgcccgtttcgttaccttcggagttatctcctacctgagtgaacaggttgcgggttgtcgttttcaaaccagcgcgagtaacaggatcggcactaacaccatcaccatagatttctttgttaacctgctggctagttgcaacgaggccactagaagagttacctacaacgccttgcagttcccatagtgcgctagtgttggtgcgtaattcaccctcaacaacactcaaacggcctttgatactggtaggatctgaatcttcaccaacgtcaccagttaagatcgcaacttgtccctgcaatccatcatcgccggattcacccagaatcatttccatatccatcaatctgcgtttagtttccgcaatatcataacggatactaccctgagcagaagccgtaccgatttgaccgttaatggttgcaatttgtgcagtgataccagttaccggatcattgatttgtgtagccagagaactaacggagttttccagactgttcacacgatcgttaatggaactggttgaacttgacgtgcgaccgatataactattaatcgcatcaagttcattttgcattacaatagaaccatcctcaaggatcttgattcgcgcatagattgatcgggttgtggcaagaccagaatcacccatttcagcacgaagttcttttacctcttctgtcagttgtcctacttcggaaagcgcccaatcatcttccagtttggttatgcgagtttcctgcatagaaatagcacgttggttactcagtacgcggtatttaaggccagtaccagtagaagaggggtcaacatcaccatcaacgttaaatccaggatatgaaccaacttctttcttaatgtaaatgatatcattacgaattgtgcggtgtttaggatctttttctggatcgtattcaccaatttcatcgttttgagcatttacagaaagggttaactgtgctaccttgttctgtgtttgggtgttagataaagttaatgcccgaacatcctgatccaactggttaacttttttgattacgctctcatcaccaatagcatcaatgttttcagtaatcaagttaacctgatcgattacttcgttgattttatcattatgggtgatggtattttgttctaactgaaccgcgttctgctggatgtttacaccagttcggttaagactaccagtgtttgacactttatctggcgaaccgtccagagtttcaccgtttttgatccaaataatcttcgtttgagtcgtggcgtcatctgggacgccatcaacaaacgggatcttcggcaacgggtttaatttgtcgatgatcatttaataacctctattgagtacgaattacgtagtttaatgcgatgtttttcatgcgggtttcttccccacccacaccagtggctttagttatagaagcatcaaatacgcgagcgctttggtcattcttttcggcgcttttcagttcgtaaactgcttgccatttaggaatattaccgccgttctggtagataagctgtaatgggtgttcatgccagcccaacatatcgccttcatatgtaccatacccacgattagggtttagtccacgcccacggtcatgaccacgtactgcaacgcctcgacaatctggaaggttaaaccaatcaccgccaccaccaaatgtataacctatacgctcaaaaagtaacggatagttatttttattcagtgagcgaccatcacaaatatacaaactaccgtggtcagtctgaaaaccagtcatgacaatagcacctactgggaaatgccaatcaagatctgtccacgtctgatatttgttgttatatattgcgctattctcataaagagaaccgttaattaccgcatttcgatcactaggtaataccgcagcgtttgaagaaagtgcagtgtttgccacataaccaacagttgttgctaatttgacaacaccgaactgagatccagttgcacgggtattgattaattttttcgcagtaatcgctttggtgtcatcagtacccgcgtttgcttctgcctgtgatgcgatacgaataacgcccaggttgctttcagttgcagttaaacgaataaacgtataaggtgaaattgcatacccttcacggatcgtaccagcctgaacctgtgcaactgttgccagttgtaccaaaccttgcgagctttcggtcgcgcttgactgaaccggaaccagagacgcgatcgcttgcttgactttaagcggagtcatagttacagtgttatctgtaccagcaaccgcctgtgcagtggtagcgattttagaagaaccccaaaccgattctgtacctttgcggttattgaacacatagttcagcgatcgcggagtaatagacgatacatcgttagttacggttgtagattccgcatcagtcgaatacttcgtataaccccatacggtttgtgatgctttagggttctgcatacgatatgctaacagtttcggagtaacaatcttagtgttatccgtgccagcgttaatatcagcttcggttgcgatctgagcaataccacgaacagaagttgttgcgataggaagcccagtatcagtacgcgcccaactacctattttttccaacgcatcttgtacgttggttatggtatcaggccaatcagtacctgttgggtcaaatgtcacgtaaatggatttatcacttacgtggttgattgtattgttactcatgtgttatccttatgcaattcgtttgaagtaatacacggttacttgcggagtaacatcaggtaagaaaccagaacccaacttaacccatgaaccatagccactttttgcggctacgtcgatagttccgatttgacgaataccgttttctgagatatttgttgccgggtgcggaacactatcaataaatcgacattctaggatcgtaccatcaacacctttacggttaacttctgcgaaatatttttccgctgcaacgaattcagtaaatttgttgtatgccgtttcacaaacagttgcggcgttagtcccattatcaaagatgaaaggaaagccgtacacgtgaactacagcctgttcttggtctgaatcgatgttctgtacaataccatcaaaagaaacgctctcaacctgctgtacagcgattggaggggcatcctcagtcatggtaacaacgccgttaatcgggatttgctcgataagcgtatacaggtcatcaattgcggattgtacgtttccatacagaacaccgcgttttgtttggtcaatgtttggttcgccgatcgaacgtttaccgccgatcagaggcaacttaccataagtatcatactgtaagtaatctgcttctttagagaggacgcgagcgccctcccttgtttttgaaatatttttgtaagccattatgcaacccttatccagcgatgtgcagtcatatacggtggaatagttttgattttatcaggtaatgtgttaccatgattcactttcaatgtatcctcacggtatttagtgtatccagggccagaagcatcaggatctaactgacaaccaccaataatcacagcaccattttcatcagcaataagaactttatcttttgatacaagttcaggaacgttgatgattttgatttctgtaccacgatcgccaccagtaccacctgccgtatgactcggttgaccaccactatctaaatcattattgtttaatgcgaaatcaggatccgttacatttgatgtccagccagccaggaaataaccttctgcgtaacgtttccaaccaccaaatcccatataatcagcagggtttgccgggttgtgtgcgttttcatagatggttccgatcgggtggataatatcaaacatagcctgaatatccagaatacgcccctgataggtttcccctgtattacgcattgttttctgagaagggttattataatcggtatattcgatacggttcatcaatataacttcttcttcgttattgagataaaccttatcagctttttctttaataccgccagttccttcccaatccatcagagtaccaatatcattgttaaaccaacggatcgttacaacgtcgccggattccagtttctgagcaaacttgattgaagtcactacagaatcagtgaatactaaactataatcctgtcctgacggaacccatacaccagagttaccaacacacgtactttcatcaacaccttccgcaccttcacaggaaaacgccggatagtcagcgtcaccgcctttaaccagttgtttaccgttgagaagcagttcaaacgagttagggttaatcaacacgcgagggttaacaccaaattcagcaggtgtaaactcttttttggttgccagatcacctacccactgttcaccaggaacggtttccagagaagtatcaccagtctgatacatgcgcatcacatacgcttcatagctcgaacgccatgttgctaacccatctagataggtaacaaattgaagcgtgtcaccagcgttacacgggtttttaagacgtactgaattaccatcaagtgcaaccagttcaccaggagcagagccaatcgatccatagtctgagttatcagcattgaatccgtctttctcatcgatgaacagcaagttaccgcgatagtaaacttcgaacgattgcaggttgtattcattaccaacaccgaatacgttagggaagtcagtttgtccctgagtagcaatatacgtttcttttgctactgttgccagatccgaagttgtgattttgtcaatctgtttgttttcgacgtattcccaacggcccggagaacaatacaccaattccacatccataaaatctttaaacagatctttaggagttggggaacctttgatagtatcaccagttgcggggatcagtctaacgttgttggtagcccaacgcgaccacacatcacgcagacgaataaccttgttataatcgcctacgccgcctttcgggaggtttacggtgattttgtttgcactggtattcaacgcccatgattcaccaaattttggtgatagcgtcgtacccgcaaaagttttccaggcacctgctggatgggggatctcaccatcccccagcatgttatacaattctgtaaagttgttgttagtcttttgaccacctcgacgcaggtaatcgcctgtaccatcgtctacaatctgacctattaaaatttcttgtttcatgacgcgatccctgatttaatcgtatctattgctttaatcgtgaatttaattcgatcttctttgatcgcttgcacgttagcgtatacaacatcaccagcaccgacagtaaagtttaatgtaaacatttcatcttcactgtttttcaaaatagcatattccgttgaataaatcgttttgtgtacacgatccacggtcattaaaacttctgccattttggtaactgtaccagctaagttttctgcgtatacaagcaccttagccccgctaaattcgctatatccgaacataggaatagcagtcgggtttgctttcagtacaagcgccgtagtgtcaacaggcatcgttttagaaccgaacatagattctacagaataatcccattttgttaccgcaccttcttttttggtacaccagatttttacaaaggtgtaaggtgacgtgatatacaactggtctgcaacccccgcgatagtatccccaacttgaggacgaaacgcgataggacgatcaacagagacactacccgtactatttatgaagtagcaaccttcgccaaccttaccagaaggaagaacaacggtaatcgaacctgttgaagtatctatgtcatgcagggaacccagttcgatcggtgtgcttgaatagtaagtgcgtggtagtttctgatagtatccggtagcatggatcaccatgttaccgacaccttcgtttgcagacagcatacgcacatcaccaaacgcattataaacgttggtgatcatttcgttcagtttaacaccaccatcataaagcgggtcgcctgttgatgggttgccgatttcaccgacatcaattagtttttttgctgtttggtaagccattgtttttccttagaattcgaatacaatactcacttcctcagtctgatcaagggagcgaataataggttgtctgttttccatgtaaatcatacgtccggaatcaggttcaagcgcgttagcattatagtaatcaccagttgctttcttttcaggctcggtcgggcttgcctttttaatcaacgggtttacaataatacttatctgacggaaccctttgttaccaggaagcgtagattgcgggaagaaaagagaatccatgtatgcacgaaaacgcattgaattcaccttcaaccgatacactagatcgtattgtcctggataccattgaatcacgttatcataaccccaacgtaccggatcctcttccagttcgccagggaaaggaactacgatatgttcatttgtacagcggttgatcacgacatctggcgggattgtgtagaggtattcccatttataaccgtctcccatgtcgatcccgttagcttctccgcgtggaggttcactagattcatgagacggactccagataccgccgatcctgatacattcaagttttccggtaatgctcgaaatggagcaagaaccgatatcaggaacatcaaccacacgataaaccatccaacctttacccggatcagtacggttataaggtgcggtgtttacaacaacaatatcgttaaagtaaaagattttcgggtttggataacgagtatcaccccagtctttacgtggtaaaattgcatctatcatatcaccaggaactttagtagccccgatcatatgcgtccacatatcactaacaccatcggtgctatcatttggatatggaggggcgaagttagggtcggattcgttatccgaccacgattcagttcgtccaatagacatgtaaatcgtgtttagatcggcggcatcgccgatcatatctttgaagttcatcaagttttcggttcggaattttgcagtaattaccgaccgatacaagttttgttgtgccatttaatttcctaccttaatctgtgatggaggatttggatcacgtgggtttcctgcatcatctttcagtcgtttatccaccaaattacggaactgtgaatatttaacgcctgagcaatcgaacaacgggctttgatcgaaccgtcgcgcagaaggaagaacaccgttaagcggtttttcttcaatgtcatattccggaggtacatcaaaaggttcccccgctcgcgggtgtgcggtgtacagaggttcaccagtaaccaggtcgaattgttggtttccgttaccgtccatactcgcaatgcgatcaggccagaacttaggataaccactatcgaaacggtagtttctcagaatatcaatgattgtctcgttatgagtcattgacaaaccagagttgatgaatactgttaacatcgtgatacccataaagccgaatcctaccggatgaacaaacctcaatacgtcatccttataacgggaagtcggtagatttgaacgaattttcatcacatagtaagatcgtccacggttgatatagtcgatcgagttgttagccatttgtttaccgcgaacaccacgaattaccattccggtgaaattggttttttctgacttgacaacctgcccttcgataaagttaccttgagcattatgcagagtcattgaccaacgcaattgaccattttcatattcacgttcgatgtacgtaacgttagcgcgtccagttggtgtatagatcgtccggcctacgatatcctgactgatatttgttgaactaaccaaaatatcatattcgagactgttggagctttcgatctcaacggaaacatcttcgttatacagcaatttaaacaggaacgtataacttgcctcaatcccttttgttgaatagaaatcgcttgcacgtgattcgaaaaatctaaccactgcctcacgtttggttttatccaggtaaatgttacggcggttaatttcagaccacaaatattcgacgttgtttttctctctcggatacttgttccggatgaggttcagcaatttgttatagtaactgttgcttcccaacgaaatgtattgcagatagtattcaccaaatttttcgaactgttggttgtccagatagctttgcggagcaaaacgagtgatcatgtgactcagatcagggtcgattaatccaggttcaatatccggcgtatatgggttttcacgttcctgattaaccagacttgccaccattaaagtgttatcgggtttccagaaaatagtgagttcatcccttgcgcggtatgacagttcatagaatccaattatcctaccacctgagcgatacaacagaacaccgtttgtgtacttcgtaaaaccagtaaacttgatattattcaagtagatagtaactgttcctttgtcccaaacttcatggtttacacgaatcgttgacgcaggagacgcgctatcagtaaccagagtatacagggtttccggataaaccaccagaggacggttatcattggtgatccatgtgctaaccttatcgcggaaatgccagctaaagtttgcttcattgtagtactcttgcggcccaaagttccatactgtaggatcgttctgatttgcacgaactgtagcaaagttaatcgaaatgctcgcagtataaccaggaacaagatcgtatttcaccgctgaatgcacatcttccggatacttttcaaccagatccagatctggcaaagtgcctggatatttgtagttaccaacagaaatgtaaacttcatcgccattggttgacatattggtatattcatgagtgatataaaaacgttcatcttcggttttaccataaacacgggtaaacgtctttgcattctcatcccacagataaacgccagcatcgtttgatgggatcacgttagccttgacagtcggatccatcatcgccgttttaacttcaccagttaccagaacgtatagacggtcattcagcacgtccatttttttaacaacaattttatcatttcctggtacgatggtatatgaaacttcatcaaaaatacgttcaccaaaggtcggcgaaccaggatcagtatcaattggtgtgttacgtaacgcaatacggcgcataacgttcttagcagccacgtagagccattcattagaacaagctatagcttcggcatacttcgacactcctcccggtagacgcgcatatgtgttgtatgaatcaacatcaaaatctaaccctgactggttccccagcttcgcaaacgttacatcatcagaagaaaaacgaacttcatcagaagaccaacgaatatctgttgacgtgcgcccgtaaaatatgcgatcgtatcctaacacatacgtagtgttagcgctctgataagcaacggtacgggaaaccggattgcctacacgatcgtttaatgctttgtagtaataccacgtttggcctttgtcatttgacactttagccatattctgaaaacgttcaaacaggtaaagcaatccgtttgagtataccaggaacgtgcgatctatatcattacaaacgtgttcgatgtgatcttgaatttcatggtagctttcttgtttcaggatcttatcgctgatctggcttacatcagaatacaggggagagtatacaaaatcctcaaccatcagagaagccataataacatcatcgttaaaatcgacgtaatcacgattgtttttggcgaatttttcattgataaacgaatcagcaggggtgaattcacgcatggttgtatatgcgtaggcgttctcatcaaacgtccataattcatcgctgatcacccaatcagaaggttcaaacccttcatgagttgtttgaatacggaatttataacgtgtatttggggcaacctgatcgctaaaccattcgttttcgtagctataacccaactgcgtccagattaactcttcgtctggaataatagttccgtccatatcacggctacgggccaattcaaccacataatagaaatccatgccaacatcatcccatttaaggtaaacgaagttagcagccagcttatcaacgcgcaaactcgtaatcgaaggcgctttaatcattatatttctccaaatttgcggttatgtatatcacgtatttataaaaagaaaaacccctatccgaagacaggggttaacgattattgactgataggattcatagtcaatgtggtgtattgaggacgcaggtcattttcaaacacgatcaacgatccatcgcgagtaaaaatggtttcttcgagaggctttgcggttagctcgatataagcagcactgaaactatcggcggatacgttcagaacgcccaggtcaaagctaatgaaatcggtataatgagacaccgatcctacttcgtaatatttattacgggttcctacatctgttaatttttcaaagtcatcacctgtataagcagcgatcgaaatatccccatccttgaacgggcctattacaatttttgcgttaccatcctgatccatttccgtagaagcataacgaacaacataactttcgtcttcttcgttggtgaacttgaacgtactggaaatgattgatttcgattccacctggttcaagaaatggatcccagacataggagcactgtaatagttgtcaatttcacggagcaatttaatatctgcttccgaaccgataatagaagtatcagactgatcgacataagtcaacatcttagatacactgaacgatttgttgaaaatttcaacgttgtcagtatagtaagagtcgatcgacgaaataacctgaccgcgtaaccattcctctgattccgtcaacttactgatatcatacgttacttttacagattgcacaatatacagatagttaggatccataatcgacggggtgatcgtcgcgaggttatatttcgaaagatacgtttgcatatcttctttctgtaccgatgttaggcgtaaacctgactttggtttaacagaaatgaaagcataaccaggtttttcgttatcagtaaagcactgtaccgcctggatgatagatccaaacctgtgagacaggaaggattcataatccgatgcagttacacaacggcgttgtgtttcacgcataacaggggctagttctcgaatacgctcgatatcttccgggtcaccaccaccatcagcaccgacataatcaggggtgttggttgggttctctttaatcgccgtgatgctaatattggttaatgtatcgacatagataaaatcttttgcaccgttagccgcttccccatcggttgacagatattcaataacgatagtcgaaccattagcaggtttcaagcccccgatatattcggcggttagtgcgccacccgccacttgttgacttgcttcaccttcaccgaaataaacttcggtatgtccatcaacagtttcacgcatgtagtaaatcgtgcttgcgcctgttgcgtttacaatgctttcgtttgtccagtcgtcccattgtgcgccgtttacagttaaacgtacctgactacggtcaatgtttggatctcggatcaggatactcgaaccgtcataaattagttcagtacgaactaaacggccttgcaccaggttcagcattgatgtatagttgttattactatcacgaacgataacaacgtcatctgatacaacaaaagaataactgtctgtattctttacagtaccgatgaattttgtaccgcgcgggatacggatcgatgttggggtcagtgggttagcagccgtaatcataactgctgtacttgcagccgtgcgcgaatctggcatatatcccagttcttgagcagactgtacaacagaactacgcaatgcagccgtgcgaataaacgattcaaatagagctgtgttacccatctgctgaatataaagagtagcatacgacagaaggtcgatcagtacgttcattcgcgagccggaaaaatcgtaatccttaaactcttcttgtccacccagccaatcaatcagatctgttttaatttcttcgaaagtacccccgataaagatatcggggatttggttaatctgttttttgacagtcttagtcttagcagtagccattattataaattcctcttgatcattcgactatttagtatttcagtattggaacacatacactaatagaaccaaagttgattgctaatcctatgagagacagcaatttattcacatattgtgtgactttactcaacgccaacgtacaaatttggttatagattactttgcagtgatctttaaacgagcgcgaactatcaatgaaatttttgtacagagactgagcaccagtaatcgcattttcatatgacttgagaagatcgtcaaatgcgacaccacagaagcctaaaaactcgtttattgtactcatcaaaggcaatttctttaattcttccatcgccatgctgtatgtatctttcattgcatcttgtagagatccaatctgttcctgtatagagtcatacgcggcctgtgttgcagctacagcagcgtttgcagcatccaatgcagattgataagccgctgttgcttcgtctgttacagcgccccacatccagtttaagtactggttgaattttctctgaattgtatcacgttcgaaaatctgattttttaacgttttgtaaagttcctgcccctgttcataaagccctcggatctgttcgtatgactcatcaacaaaagccttgactttttcctgtgcttgttgatacaaatccattgcagtgaatccagggaagttaccgcccagaattatatcaagtggtttgatttgcatcatgatgttacggatagccagcaccgcagaccataacgggtttgggacttccggagggatagcccatgtttgcatgatccgaccgtataagtcgattaatgcaacgcaaccgttttggaacatcgttaaacaccaatcaaataacgcgctacaagcatccacaaggtcgcgagcgccagctttgacatattccacagagtaattgtatgcgcttcctatggccccgtatattgcgtttatgacggtttcatatgtttgttgtccggatttgatgattgcattaaacgcatctttcaaagtctgaacagaattatcaccaaacaccagatcgtaaatgttgatcgcaacacctaagatggttacttgaggcaagaactgattaatcaatccccatgcaccaccgataatgttaaatgcagcgctaatcacttgtctgaaaactttcatagcagtttgccatgcttgctgtgacaatgcgagcgcccccgccattacttcttccatcgatacggataaaccatcaaacattgtcgcgatcccgaatccattctgtacagcacccgttaacatgttaaactgtagcttgaacgtattacgggtttcgttccatgcctgtaacatagcatcactgatatttgtatatgcgaaaccaacagttgccggaatgcacgaaatatcagcacggcttaattcactcggtaatgccccataagtggaaggcattgcaggaggaacaggaggaatgcttgtatctgcgttggtgttaacctgcatacccgtatatttgcattgatgcgcccctgtttcatcatgcttcatataggctatacgattaccattccaataataatcaatattggtgaatgcgccagtgtcctgattatacgtctgacgtatgcgagcatcacatacagggtttgttccggaaagatacccaccactgttttcgaccttatacatagccagttcgccagggtttttgtataggtttgattttgacagatccgcgccataccaatcattaccaccattgattttagttgcaccaatagatgtaatgtaagcatcaatttctgcttgagtgttgaaataatagccaatctttggaacaaggatccctgttgattgtccggtatttggatctgttcctggtgaattgacaacaggtagatccgtgcttctatgtccgaatggttcttgagtataaagatgagtaccgattttgattatctcggtatcccactcaaccccaacagccggataattttctgtatgcccttgccagataacccgccgataatagccagcggggatctcagcatcacaaggatgctgataattttgcataattccatcaattattgattcataatccataatcatgttagcctacctgtactgtgccgccagtgatttttgttaatgcgccagaatcaataaacgtgttattcgttgctttgatattgatatctttagcaccgatatccatcgtttcttcaatctcaattttcgcattttttgcagtgaccgttgcgtcttctgttacagcaacggttgcattctgtttcacatttgcggtaagattctgatcaacgttaactgttgcatctttgtttacagttagttcagcattgcctttaatcaggccaacgtactcaccttcaaccgtttgttgaacgtttccacgaacaaattcagttacgttaccatcaaccgtttgttgaacgttacccatgttgtaaatgaacgcatcgccttcaataactacctgtaagttgcctttaacgttgagtttccggccctgcatcacgatctgataatcatcccctacgattttaacaacgcgggttccatccgggcgaatttcttcgtaactccctgctggatgaacacggttatatcgttcgtatcctggggtatcatcgaattcctgaatgtgtccggatctcgattcaaacaccatgttatacggatattccgcattataagatgatgctggttcttcaaacatcacacgggtatcaccaggagtaaacggatcttccggactagtagccgacaatgtagcaccgttatacgcagcgtaagcagcactcagagagcgcccttccggatctggtacttgcaccccatatgattcaaggttgcccgtgaggacgattttagacacgcgagaagaacggcctggagtttgactagcccacagtgaatttcgaagaccattataagccgcttgccaatcttcatttttcatcgcttttagggtattggtgaatttagcaacaccaccgacgcccatttgaaacgacatgttttcgatcgccatttgacgaggacggtttaggttcacatacacttcacggacgttagcggttctctgaatatcagatcttactttggctaaatcttgagcaaataaggttgatacctcttctgccgtgattgtcccgtttgttacttctcgacctaccgctttactgatcgcagcgttaatttttgcagtgtcgcgagtcttttcgcggataagcaaatgcccgatcccgattgtcggatatccttcactgtctgtataccatcgtgtgcggatcccctcatcctgcttgagcatcttttcgatcgtaaatccacccgtatcagggcggttatcttctggtatctcatccagtgggcgatcgtctgggtttactgctatgcttgtgtttgaatcacgaatgatgacacttgatgatcctttgcctttcaaaccacctaatgcaagggagttaacatcgttaccaacatagcgagggtattcacccataggatcgcaaaaacctttctgtgtgtctggttgttcgacatattcaccagcgacagtaccgattatcataccatcttggtgccatttgtcacgccaataaccaacaacaaaggatccgcgagtgataccagttggagagaagcccacaccagagatcgcagcgcttctaatatcctgaataggcatcatccagggtaaatcttcaacaggaacaccgattgcatcggatttttgtttttgggctgggtgttgtccaaatacacggacttgaacacggcccaacccgcgcggatcatcaacgttttcaaccaccccatcaaagaaaggggagtgtaaatttccgcctaatttcatgagttagccttttccatttctttaataaaatcattcagaaacgcctggatgtcagacggactaatgatttttattgttcgttttgcttcattttgcaacactgcatcttcataaatatctacaggagctaatacaccttgatactgtaaatacagcattggtttgtcacctttgtcataccaatgaccagggttattggggtcttcgacaaggttataatacttgttgttgttttcatctacgtgatacagaacctgttcaccgccaacctcagaataacgctgtatagcgcactgatacgcggcttcctgatcggagatccaaccatagaaagggtcataaacagagttaagcatcaacaggatccagtagtattgctggtttccatataatgattctgcaagttgttcaggtcgtagtgtgcctgttatctggtaactacgggttttatattttccaatcacacgattaaaataaaatcgatagtctcggaaaatatcagttgtctgggtgcctttgtaatcaacaggcgggaagtatgaaaatagcacgataagttcccctatctaaacgttatattattctatttaggatttacgcaatggctggaagacagacgtataaagggtcgtttgtacccgaaaacatacagaagtataaaggcgatccgcgaaagattacgtataggtcatcgtgggagcgctacgttatgaagtggctggataaaaacccacacgtaaaacgttggaattctgaatgtatagtgatcccgtatttctgcaatgcagacggtaagagaagacgctattacatggatttctatgtggaaatggaaaatggtactacatatctttgggaggttaagccccttaaagaaaccatgcctccaccgaagccagtaaacaacaacgtacacaataaaaagaaatttattgatgctctttacacctatacagttaatattgataagtggaaagccgcaaatgagctatgccgtcaaaaaggctggcagttcaaaatcgtaacagaagaatcactcaaaaaagtttttgggtggcgaggtcagtaatccctggagggaaacatgagttttatttttgagtttgagatcatcgcggaagaggataaacccaaagcaccacccaaacgcaaattgagtgattgggttgaactggggatcaaattccgtaaggcaaaaacgaaaggtgtttctgctaaacgttttgccgattctgagggattaaactacgcaacgttcacaaagtcaatgcatcgttacaaaaaacagattgatgatgagattgaacgacgttccgcagagacagaagcccgtaaaaaacgtaatgactaccgtaaaaaacacgggatcgagatcatcaacgatttccgtaatagtctgaaaaagatcactgttggtgtatcggcggcaaagcgacagaaagattcaacagaatggtttggtaatttcatcaaaaccagtatcaaaacacaccgtgtggcaaaaccagcaacgggtcgcctgtacacgtttgcatatgatgcaaaatataaagacaccctgccgtattgggatagatttccactgatcattttcttaggatccggaagatcgaaagcgggtaacttagtgttctatggtttgaacttgcactatgcgccacccagagcacgacaggagtttttagaagagttattgaagcgagggtacggatccactaaacgcctctctaacaagaccgtgcttaaaattaactggggtaacgtgaaaggtatgcgaggcgcaacagaaatgatcaaagcatatctaccatcacacctcaaatcaccattagcagagattgccccaaaagactgggctaaatcagtttggttgcctacacaagcgtttgtttcaaagggcaagccttacagcgcgaagaaagtctggaacagatactaaaaagccccgaaaggggcttttattttgcaaattctccaaacaattcaactgctttggtatcatatgctagtttcgcatcttctatattttcatatgtaccaatataaatcgttttgccttcatatctaatgtttgcttcccatttacctcttttttctcgcactccctttacaccacttttactattcttttgcgcccctaatcggtttcgctggtttccttttgcatcagcagcacgaagattatctatagaatcccctgcgtcaattccatctttatgatctactatctgaggtaagtagccgtgttgataatagaaaattattcgatgtctcctatattttgcatacttgaagcatataatccaatagtcgcctttgtatgaacccgcttcttgtccaggtttcattttctttcctataggattagtccaatagattttaccctctttgggttcaactcttacatgttttagcaaatcaacgattccagcaatttcatcattgatgcttccatcattgccatattttttcatacaggtgccatatacagaagccccaaccgaaaggaaggggctttatttttacagggtgctaactatttctgcaagtttgccaggggtcgcaccaggtctaactttcatagcatctttcaggtttttgtcaaccatcttttctgcatctttttcgttaaacccgcgtttcaccatcacagcaataactttttcgcgaatgcctttagccgcttcattcagatcttcggattcagccagaaccagtttagaaaccatatcgcctttatattcctgggtgaattttttaccagataccaggcgaggttttccggaagcatcgactacggtaaacactgcatattcaccgcttgctttagttttagaacgcccagtgtacagaagacgcatatcgttgcttgggagtttgtaaactttacctttcaccagagcttcattcatagggatctcgatttcgaaatcttctgctaactggttatacagatccagattttcttccgcctcttcatacagagtagcagctttgaatttttctggtttgtcgaaatccagatcatcatccggattgccactgtagaaagaaacagtacctttagcccaatcgacataagccgcttgaactttaccagtagtcatacctttcaaacgtacaatgtttttaccgaagtatgccagatcgtgagaatccggtgctaaaacttcgaaatcagaaccatgtttgaagtgaagaaaaccgattgaatgtttatcggaagttttagcgcgttgaccacgtgctacggtacgagcgagggttttaccttcggtcagaaattctttgaattttttcaagtgagtcattttgtttttcctgatttccaatatgggaacatagtaccagtatttagtgacggggtaaaggaaaagttttcagaaaaagcataaaatttattagatctaagtattgatcttcataaaaatttatgataaaataaaatattaatatattatagatcataaaatttatgaattcaagatcagatctaaaaatttttgataaattatttattaaattttacttgatcttgttagatctttttgataaaattttaattaataattattatagatcaaagattttaaaaggtcaagcattttcttcaaatttttatattaccccgtcaggccgctttgatcccgttccccgctaaatagaggaaaggagatcctatgtctacagaaatgattttaaaccaaatctcacctacaaactttcgggttgatattcctgataacagttacatgaaaggtttgactttacaagttcaaggggttacactaccatcaatgaacctcccagcagttgatattcctgcaaatatgatggttcgaggtaaagtacctggttcggcttttgagtttgatcctttgatgatccgctttgtagtcgatgaggaaatgagatcgtatcttgggatttacatatggatgttgagcacaaacgattacaatgagtttaactctgttgcgtgggatgatcctaagcaatcattcgctgtgcatatcctggataactcccagatgaaaacgatcgccacatttagattttatggtgccttcccaacaaacttgggtgaggttgaattgggttatactaacgatagtgatgaagcggttacatgtatggcaacttttggcttccttcatatggaagttgaaattgacggaaaagtagtcacttctcaaaagagaatgagctaatgatttatgtgattagtggaaaaaagcgaactggtaaagatacggttgctaaatttattcaagaggcgtacaatgatgttcagtgtgaagcactggcatttggtatcaaaagaacgttaagagtagcaatgcagcgatatggttacgataaaccatacattcgcaatatgattgaaggacaatattctgatccggatgctattttttatgaaggtgatcgagagaaacctcttgtgatgtctaatgaagatgttctaaatattttcaaaatcgggcttgaaatcctcaaagaacgtggatacaatattgtttatagtcctgatgatattgataacctgattatgagtaacgatactccctggagtatcagacgcttgatgcaagtgtttggaactgatatcgtatgcaagtatgataacacggtttgggttcgttacacactggaaagattcgtcaataaatatgctggtgacgaatacaatcatcttctggtaactgactgtcgtcaggaacacgaatataaatacctgaaacgcttgggtgctaagtttgtgtttattgtaaaagataccggaattgttgatgaacattccacggaaaaaggtttgacacctcaaccgggagatagtatcatcactaacgaaggtactttgaaacaactaaagagcaaagtgctcgatacttttaaattttaacaatgggtaataaaatgtctgatattcaaaaactgcaaaatgaagtactggtactgaaaggccgcgcattcgatcttaacgaagttatcgcgcaaaaagaaagtgaactgtcggttcatcgtcaacttctgtccgacctgtgttcggtactgggtattgacgcaagccagccagtaaccccagaagcagtgattggcgcggtatccgctctgatcccttccgttgaagtcgaaaaagtcgcggaagatgaagccgcctttggcgaagaagcgtaaaaacaaatttattacaaaggggcttcggccccttttttattggggtgttttatgaaatcatttcttgaaatcacaaaacctgttgtagatcctggtatctacatgtgtgctaaattcgatcaggcttcatgtgaggctttgaaaaatgttcaaaagacattaggtatcacaaagaatgctgtttcagccgaaaagatgcatacaacgatcgtatacagccggaaaacggttgatttgttcccgcaacaggacatcacagaacctgctaaactggttgatgttgaaaagtgggacacaaaatacggtagcactattgtagggatcctggaatctgaatacctgcatagccgtttcaaagattctattgatgctggcgcaacatacgattatccggattacaagccgcacgtaacccttgcatacgattcgatgcttgatgatatcagcggagtgaaaaggttgttgacactgcccgtggatttgactattatctgtgaagaggctgaatcactggatctggataagtcgttaaaagatattacagaacacattgaacagcgtggcgataagtgggttgttttgaatcacgatcgcacaaaagaacttggtgaatacaattcgaaagccgccgctgaaaagcgtttgcgtcagatcgaatacttcaaaaatcagtgaggattatatgaacagaacacgtttaatgtatcttgttaacagtgtacgaaaagaagttagcgaggcgtttactagcgcgttaggtgactggtatacaatcaaggtagcggctactgctgaccacatttcagatcgctttaaagaccgttcagtatcgattaaaaaagatattgaaacttatcgcgatatcatgatgagtctagcaaatcattattcgtgttatgttctaacctacgctgtgaaggccaaaacagaagggacacaggaagttattgtttatcgtcgggtaaatggtaaaatctttgcttgtcctataactgttcaaatgttctttaacgaaggcgaagagaagccagtgatcgctatacggttacgaacggtgatccctgagtatgtttctttagctaacagaaaaacaatccaggtcaactacgttccaccaaaaattaattttgaatacgacggttatcgtcgggttatgtcccgcttggatcgtctaatcgcttctaaagattgtcctccgcaactttggatgttgaaaaattgaaaaaagcccttgcattagtgcaggggctttgttatattggccttgtcgaaacaaaggaggctatcatgaaactttactggttaattttctcaaacgggtttgttatgaaaggaagtgttcattgcgcaaaaacttattgtgaatggaacaattgcactttcaagatcctgagtgttgcggcgtctcaacctgtaggggattactaatgactggtgataagtgggttgataatactttgttgttgactttggtttatattatggtaagatacttaatatagaaaaaggaggatatcatgagaaacttaatgaacatcgcagaactcatcgcatacggcagctcactctatgttttggcgcacggtgacggaaaaggttacttaattttctttggtatcggccttgctatctctttcatcaaaaaattctttaagtgagaaatatattatggctaaaccatccggcaaaaatataacgtcattgatgtttatagaatgactttaaaagactttgaaaacatgtgtcgggcttatggtagttctaccacccttcgcgaactggcagagtctgctaaaaaagaacgtcctcatgtttgcccgaaatgcaacggaaaaggttatgaaaccattcgttataacgcatatccgtctgggttgccagattctggatgggtcgaagatatgaaagatttcaacaaagaatgtgacctgtgtaatggtcatgggcgcaccaaagataaatttgttgcaaaacctgttaaagtggaatatgtaaaatcatgaaaatcgtcgatttgattaaaatggctaatggccttgtaacaagcgatcattatgccgactattgcgaacagtacgaggtgccactgcaacgcgcgatcaatcaatccgggtatgatggtgttagcgaaattaccaccgaaaacctgaaaacattcatcgtgtttgctaacaccttctggatgtatctaccggataatcctggtattcgtcaacctgcattctttacgctttgcaccttctgtgaaacgtatttgcctgattgtgaggatttcgaagaaatctatggctaaagtagagttgatgtatcttgataaaccaactggatctgttttcccttgtgggtttgctgatagtgcagaacaaatgatgtctatcacgttttctcccagcatgaagccgatccctggtttagatgaaaatgtaatgaatgagtgtaaccagaacggaaaagtatggtatactcgacacgaagggaatgttgtttatcactccaccctcgaaaaccttaaatctgaaataggctatacaaaatgaatattgaacatgtatttgcacaggcattagagcagaaattaaacgcagaactcgatctgtaccgttatgacatggaagaacagattcgcggtgatcacaaaaacagtctggaacatgaatccagtcgccgcgaagtgtggaaacatactttctttgaaaatctccaggctggtgtgacaaaagccagtgctcgcgctaacaacgcacttgaagcatttgataacgcttttgcaggtgaataaatggaactatcagcgggtattatctttgttaaagatggtgccgtgttgatgggccatgccactgaaacgccccattgggatattccgaaggggcatgttgaaaagggcgaaactcatattgacgcggcgatccgcgaatgcttcgaagaaacaggatttgaagtgttcgcggaggaattggttagtctgggtgttctcgattacacgaaaacaaaaaaccttgctttattcctctatgtagggcaagattacccagtagcggaagaatgctattgtgcatcaactttcgttaagaacggacggactatacgtgaaatggatgattttaaatatgtcccgatctcacagattccgtcacatgcacgtaaaacgatggggcaactactgcctaaaattttagcaagatgagaaatatatcatggaaaatcaactgactttaatcgatatctgcaaatcaattcgcgatgctgttttaaccaaagcatccgaagtcactatttactcttcatggagtgctgaattcggctatgaagaaattgtaaacttccccgaccgcctcaaaaataccaaatggttccgttatatcgatcctaatgagctttcccttgatgaactggaagaactcaatttcagtcgctgggatgaacatagcggcctacgcctgatccctttgtggttgcttccatacatcgatccggaagcaaaggtcatctgcattgatggtaacgaagttctgtttaaagatgcagataatgatcatcgttttggtatgttggcctacggtgtgaaaccaaaggcataatatgaaatacgtcgattttaatactctatctgaaatgggccttgtttggcgcattaaccgcgaaatcttacaccctctggggcttgcgctttcccgtgatgtagaaacaggttcatcacctggcgcgttaatagctgatgatggtgtatggcatttcgacgaactcacaaacgaaagaaacgcagagaagttttctaaagttttggatttacatcaaagcggaaatctgttagattatctacagaagaacgcaaaataggggcttcggcccctttgaggatcatattatgaatggtaagcgggttattgtcgttggtgaatcaaagcataacgaaaaaggcgaccatctgatcattaacaatgatcggggtggatggtacggggcgacacaaataaaaagcggttatgcaacgctggttgaaaaagatgcggttagattggcaactgctaacgatcctgggtattatggtactcgcgaagagtttgaaagcgaaaaggatcaagagatcgcagaattgaaaacacaggttcataatgcgcgggtgtacgctgcaatgtgtttcactgtagcggttatgattacgattatatactggatggtgattttataatgacagacgaaattgtaagaaaccgtattcgtgagttaaaaactttccaaagtcgcgatcatgcgatcatggttggtagttacattcactggttcaagaacaacgatctggatctgaatccgtcctatcagcggccctacgtgtggaagcagaaagagcaagatgctttcatgaagactttgattactgggtttccttgcggtatcatcgcgatcgcggttgatagtgaattcaacgaatctctatgggtagaagtcatcgacggaaaacaacgcttgacaactatcatgaaattctggaacaatgaaattggaataccgatgcctaacggttcccgtttgttttggggtgaaatggaaagacatgaacaacgtgcttttgaaaacatttcattaccagcgcttggactcgatgagtgcaacataaaagatcggttgaatttctttttgaaagtgaactttgcaggggttccacaatcaccggaacatatgcaagcaattttaactatgtatgagaatgcaaaatgaattttacaacagcgccttttgaaactggtaaatggtacttcaaaaaacggcagagtcgtatccatagctatacttgcaagaaagaccatctttactatccgcaagtaatgcaaccaatgcagcagaattccaaaaggcgtatcgttcatggggagtgatctactctcgatctctgggttctcatgattccgttatgtggaatctcatgcacatggataagctgatctgggaagtgttaaaagaggaaggtatagaatgaatcttgaccgtgagttaagcggagcaatccgcacccttgagaaagtgcttgataatttaagcgctggtgaagagatcaacgttagcgacattgaagcaaaactgtatgaatggcgcagtgctttgtataatgcaacgaagggtaacgatcctctgttcgatgaatacgatgtgtatgaagtcgaattgtggggagaaaaataccttttcaaatggcctaacgatgcttttggatctattaattctttgtatatgtccggtggttatctgtatgcaactgacgtaagcgtacatgatttgggtatcagtccagatcataaaatcgatttgcctaacactttcagtcacacaactgtgtgccttggtaatgttgacgcatatcctggcgttagctgggtcaaagcaagcaaaactaacttaaaaagagtgtaacatgttaaaagtaattggatgtatcctgttggtcgtcgtctgtgtattcctgcaatcgagttgtaccgacgaacgagaagcgcaacgtatcctggaagcgcaagggtatgagaacattgaattcactggctatagctggttctcatgttccgaaaaagacacatacgcaaccggatttacggctacgggtgtaaacggtaaaccgatcgctggtgctgtgtgttctggaatgtttttcaaaaatagcacaattcgtttcgaataactgttgacactaatccccgttgtgataatatctctctcgtagacaacgaaacagataaacaaggggattaaaatgaacttactgaacgaaatgctggaaatggttgaagcgaacaaagaagcaatgaaagcgaaagaaggttgggtagttgttactgactgcttcaaaccgcaaagctggcttcctgtgttcctcaataaagatggtaacgaagaacacggcttctatgatgctgcaatcttcgaaaccgctgaacaggcttgcgatttctggtcttacctgagcggtgacaagcctttcaccaaatacggtgtttgccagtgcaaagacatttaatcccagccccgaaaggggcttttttgtaggtgaaatatgaccaaagcagaaagaattattaaccatcttcaaaccggattcccgtaccagggagatttacagcgcgatatcatcgaactgttatcccagcatgacggaatggaagcggagataaaggaattgacacatcctgacgtgaacatattcgcttcactgatggatgatgtgatcgctatcgactcagacgaactgatctgcatcgagacaacgaacccagaagataagacgatcctgaaacaagcgtatgaacggatcgaagcattacaagatcgcctgttccagttaacttttccatcaaaaaacgataatccctgttgacagataacctgactatggtaatctgtatatgaaaactaattatgaggtgtatattatgaatgcttttgaaaaacgtgctcaactgaaagacattaaacctggtgctattctgtatgaagtgtttagcatcactggtgttaaagcagaaatgggtcgtaaacatatcgtcactgggttcccgtacaaccatcgtggaatcgggctgtttgttaacggcattaccatctacaatgactgggaaaaccatagtcatttttcattgatggatcgaaatgtagtggggcgcaaccattataatttccatgcgttgttccgtagcgaagcagatgcacaagcatatgttgaacaaatcaataatgataaacttcctcttgatgacaaacaggaaagtgttgaaatgacgattcgctggaaacgcgatcgcgaggaagatgcaatttggagttacatgtaaaacgttgcgcctcttaaaccataaataccctgtgtacccaaacagggtatttttacaagaggtgatttatgtttaaatttagtcagaaaagcctgaacaacctgaaaggcgttaagcctgaactggtgaaagtcgtagaacgtgctctgcaactgtctcctgttgattttggtgtacgtgaaggtctgcgtactgttgaacaacagcgcgagaacgtccgtaagggtgtatctcaaacaatgaactcaaaacacatcacgggtgatgcggtggatctgtatcctagcgtattgcctcaaggctggcaaacaaaccctaaagtgtggttgcctgtcctgaatgctgttaaacaagcaggtgatgaactgggtgttaaactgcgttttggtatcaactggaaaaatgatccgaaccttccgatcgaaacaaaattcattgatgccccgcatgtggaattagcgtaacaaaggggctttggccccttaaaggtaaaacatgaatagtgaattttatgtaaagacaattgaagaatgtcgtaagatgcatcttatgcgagagttggaagaaccaacgcataattacggccctaacgattttatggtattcgaaaccaggctggatctgggcagagaaacgcaaaagactaaaggcgcgtttgattttatgaaacgttcccatagttctcttaacatttacgtagcgcatacgttaaatgcagcacaagacgccaaacagctaaatggtgctaccggatgtgatgtattgaccagtaaaggggcaattcttaatcatttccgtggacgtcgaatagagcaccaggcaataaaccttatttttgatgagtgtgatcttacgcgcaatgaacgcatggacattgtgtataatacactcatgcattgtgtacaaaagaaacatccattagcatatattcacgtaatttcgctgggtatgtaatgaaaagtcatggctattcatcaagaaccatacatgaagagattcaagggatcgaatctcttctgaattttgtagatgttgatacatctacaggtaaagtgtattggaaatttcagcgcggccctatgtctcctggaagtgaagccggaagcaaaaacgagtattcccaaattcattttaaaggttctatgtatttgcgacaccgaatagtgttttacgttgagaatggttatcttcctcctatcgtagatcatgtatatggtgttgagaatggagatacagcaagaaatttacagaaagcgacgaaccagcaaaatgcgatgaaaaagaaatgtaactcaaacagtagtacagggttgaaaggtgtttcttatcataaagccaatgggaagtacaaagcgcagataaacatagatggaaaaagaaaatttttggggtactataacactccagaagaagcaaaatccgtttataaccggaaagcaaaagaggttttcggtgcattttttaacgaaaccacataaggttaatgtatgtcaaaatacgtattagacaccaatgttttgattagtaacccctattcaatctattcattcactcaacctggtacagaaatcattattacctctgctactatgggtgaattagatcacctgaaaacgaaagaacgaacagcgcacgaagcacgattggcgatccggcttctgtcaaaagttattttcggtcagtcatatgatgcgattacgaaatcaggtattcctttaaacctgacaaacccagcactgtctgacactatcacccttaaagtggttgattatgtcggaaacaaaacgtttgctcttgacaagcaagacgaaagaatcattgaaacttgtatgcaacaggatgcaaccttagttactcgcgatattatgatgttgctgatcgcaatgtcccgtgggtgtaaggtagaacagtatactggcgacgatacgttaaaagatagcgatgtgttgtattccggttatgtagagatccctgatttttgggataccgtggaagtgttgggatatacggataatgtagcccaaatcacttacagttcgcttcctgacgaagatttttatcctaaccagtacattacctcaaatggtgagttagtcgggcgtgtggtgactgctgatgagatttgcttgaatgtcttacctgttaagcacgaacaggctatgaaacgcaaactcatgaaagctatccagccccgtgattctctgcaagcggcttttgtcgaatccattatgagcaatgaaatcgatgttgctaccattatgggcggcgctggttctggtaaaacaatgcttgctgtttccggtgctatgcacctggttaatagtggacattacgctaacttgatgtatgtgaagtcagatagcccgttatcaagtgaaattggcttccttcctggtacattgggcgaaaaactccggccttctatcgaaccttgtattactagcctgaacattctgtttaaggataatccggaatctgaaaaatacattgaaggtttgattgaaaaaggggtggtgcaattccctagcctgtattacttccgtggtcgcagtatcggacatccggatccgggcaaaggttctgtgctgattgttgatgaatgtcaaaaccttagcaaccacgaaattaaatctatcatttctcgttgcggagagaacacacttctgatactatgcgggaacattaagcagatcgacaaccctagaaacactgccgttaacaacgggtttgtatgggctgttgaaaagctgaaagaatacgaacactcaagccatatcattcttgatacagtgtatcgttcccgtctcgcggcgtttgtcgaagacaatttctaatgatgggggcgaaagccccctttttgtgaggtgtatatgattactgtcatctatagcccaaaactaattactgtttgcagttgctgtaaaagtgggttagaatatgaactatctgatatacagcaaaagagagaagcgatttacaatggatttttctctgctgctgattatgtcgtgaaaaaatttatcacatgtcccaaatgtggtaactctgtgaaattatttttgaattgaggtttccataaatgaaactagaaaaacgttattatgtagcaaaattgagcgatcttaaagaactgacgccagaagatttgaaaacgttcaacgaaatttgcacgaaaatcgaaatcgggcgcgggattaatggtaagaaaccgtttgatgcaatcgtgatcgagaatgattggcccgaatacgataaagtgttggaaatgctgacttctcgtattgttcgcgaagaaaccgatcgcaagtttgaaaagatgctggacaacaaagaacgcctcggatactttttcgttgttgaaactcaccaggggacttttctgatcaccagtgatgcgcacagcacgaatcggctgacgaaatacagtgggtacaaataccgcgcattgttcagccctgattgtggatttgacaacagtgagatccttactactagctggagcgtctactttaaacatgccgttatggtatcgttagatgaaatcattgcgctatacgatcctaacaaggctatttcaaattataacattgctgagtttatcgctgataaactacgtgacgcgaaaactatctaaaatagttgcataaatataaaatagggtgtattattgcccttctttttgcaacataggtattaaaatgaagaaaattataattgctgccagcattttcttgtgctctttttctggcaacgctgcgacggatccgctaggggatttcattgcggatttgcctactcatcaattgcctttacaaaaggctactgtgaagcctccggcaaacaaaaattctccatcctacatcaaggatttggataatatcacaccgaagcagaaagaggttctggagtatgcttatcgagttggacacaactatgatttgaagactgcaaaacctgtagaaaaagataaggctaaacgtttaggttatcatttagcggctattgtctggatcgagtctcgcgcatgtgagaatgtcggtaaaggtaaaaaaggccatcacgcttatggatgctggcaagttaccgcaaggagcgccagcgcacgaatggataagtcatatcctaaacgcgtagtaatcaaaaagctcgaaactcttcaaggtggatcgaagtatgcgatctatgaactggagtactggcttgattaccacaaaggcgacttgaaaaaggcgctggcgagctataacgctggtttcaagtatacaaagaaagaagcccgtgattatgctcgtatggttaatacaaccgcgaagctgttagaagaaaaacaaatcatttgacaaaaagcccttgacttcggtcgggggcttttttattatgagtgcatctaattgagaggaatacattatgagcgtttcacatcaagtcattgtttcacaaaaatatgattaccctaacctgttgcgttgtgtgcaagcaatccgcgaacattttagcaaacaagacaacatcgttatcaaagagattactttgagtaaatctctcgattgttttaacatttatttcacatatgataacgaacagcgccgcctgttcatttgtgaactcatggatatgtattatgatatggaatacaatcctattcctaaaaatgggatgtattttagtatcaatgtctggggagaatcacagaaaatcatggatcttgtgaaagaaaccgtgtacactgtcattacaagttcggatactgtgtatgagcgcccgaacgatgcttatgaatcacgattcactttggttaaatgaggaatacattatgagcgacctgatcctgaacgaaactaaacgcgtactgtttaaagctggttcctacgtcgtggcgactccgaaaggcaatacttcccattgggcggttgctgattggatcatgtacattgataaaaacggggaatgggtacaatgagaaacttagcgttcgaagtgaccgtgattgatcaacggatcaaagaacttcatgcacagatagccccgctgcaagaagaaatttctaccttgatcaaggagaaaagagacctgattgaactcatcgatcaggatatcattaacaacgtcaaggacggggaaaagatccccgtgatgttggaatatcgttcttccagtgtgtcttatcacgcggcaacaaaatttttcgaatctatcggtctgggtatcgatggtatggatccggacattaaccaatactgtttgcggatcgcgatggatgaagacggttcaaacatcaatcgagttttaaccgctttagaaatggttgaaccttttgtcaggccgcaagcaaacgggcgtaagcgtttcgatctgttcgaacatactctgtctgaatgggattgttactggctgacatacaatccagctaacaaacgttgggctgttgaaactggtagtgggatgagacgaaatcaggatccgacgttctcggatatgtctctgaaaaaagttcttgcgtatatctgcaatgcgcattattatacccctatcgaagaggatgaataaggaatcatcatgaaaaagttagcactgcttttaactctggttgctggatttgctcacgcgggtgatgctcgcctggatgagttatgcaacaatcgtgatatcaaagatgtcgcagtatgtaagcaagtgatcgcagaacagttagatgttgcttatatgtggggagaggaaaatgctcacctgtataaacgcggtaagttgctgaaacaaaaagagtttttgcagtctgaaccaatgatgaatctatgcaaacaagcgccaaataaggaacggtgcgaaaagttccgtacttatttggttgacgaattcaatgctggcataggactttactaatggctatctggatttttattattatggcggcggttgtggtgttcttggcgtacaatgctggtaagcatgagagcactgggccttgttactattgcggggatgatgactatgtttagtgctggatactttataggcgttgttatcggttttataatttttggtggtgttttatatatgtgccatcaagaagatcgccgccgtgaacggaaagcgagaaaatgagcgtaggggttcaattcactgtattgtggatccttgtgattttgatgggccttgttgtggccctactatatcggaaaaataaaaatgatcattaaagaagtgaaaggtaatgctgtcaatatgtatctgaacggtgaaggccatttgatccacggatgcaactgctattgcaatatgggcgctggtattgctcgcgaaatccgcgatcgtattcctggtgcatttcaagttgatgccaatacgttaaaaggttcccgtgataagctcggaacttgttctgtttacattggcgaaaaaggcaacattgttttcaatgcatatactcaatatgatttctggacacctgggccgcgtgtcgattatgacgcaatcggcaatgcttttaaacaggctgtagggcttgctgacgccgttaagactggaaagcctatcatcacgcctttaatcggtgctggcctcgctgggggcgactgggaactcattaagcgcattattaatgaggtgactggtgattacccgatcattgtcgttcatttcgatcctcgtaaggcgaattaatcatgatggatcctatcaaagcaggtcgggagattaagaaagcgaacaaacggatcgccgtaatcaaaggacaacgcgccgcactggttaaaacctgtaatgcattggcgcaagcgatgaaagcgaataacatcaacattatgcagcgtaaagaaactgttaatgttctatgtatcgttgacaattgtctgagtaaggaaatggacgaactgaaaagcaaaatcaatatgtggtatcttgatatccatcaagcacaagatagcgaaatgggcggttatacacatggctaacgcaaacattatagaaaatgttcgctgtcgggattgtcatttccctttaatttgtgtaatgaacattaccaaacccccttatgatgagtgggattggtggatctactgttcaaacaaaacatgcaaaaaccatgaaggggaaggaaaattccagaataccccagattttgttgagaggataaatggctaaactgtattttcattatgcatcaatgaatgctggcaagagtgctcgtttactcactgatgcatacaactaccaggaacgcggtatgcggatcctgatgtacaaaccagcaattgatacgcgagaaggtaaacagagtatctcttcgcgcattgggttggaagcaacatgcaccatgatcacgcctgatatggacttgtattatgatgttcacaacaatcatttttatagagacagcccgaatctggtttcttgcgtgtttgtggatgaagcgcaattcctttccaggaaaaatgtcatggatctgtgtcgggttgttgacgaattagatatacccgtaatgacttatggactaagaaccgattttcagttgaacttgttcgaaggttcttatatgttgctggcgctggctgatgagatcagggagttgcgaggggtttgtcattgtggaaagaaagcaactaccgttgcccgtattgatgcaaatggcaaatttgttgctaatggcgaccagattgagatcggggcagaagacaaatatgtttcactttgtcgaaaacactacttgcaactaaagaacaaccctgatacagtggaagcataaacaaaaggagatcattatgagtcgcacttaccgtaagaaatacaatcctcttcgtgaccgttcatctaacgaaaagatcgaagaagtaaaagagtattctcgttattatgctcaacatggtattgatccggatgggttacgttggtactcaaccaactggaaacacaaatcaggatgtgcatacattcgatttgataataatttgtgtcgcgacggtaacaaagctcatggcgatctgaacgcaatgctttctattgcagtaaagaaaattgattcaaaagtacgtacccgtttacgtcaggaactgaaacgtatgaaagctggtgtgatcggttgggatgaaaacgtagaaaacgtgaacaaaatacgcgctttcgaaagaagtttgtgttggtatgacattacttgattgactttacagcaaaaatattataacgaggcttcggcctcgtttttgctataaatatatacaggagtagacctatagtgggtctatgagtaaaagagtaattgttatgaacattaaacgcatatcaatggctgtgctgttcggattgttgatgatgacacccacaacacacgccgccgaccgtccggttcagaaagaatttgacgattatatcaatgcggcccttcaagtatacatcacaacgatccctcccagcgtaaatacaagcgaactattctacaactacatggaacgaaaatggcgccaaaaacaatgccgatctgaatccgaatgcgcaaagctagggattagggtcgcgtatgagtttgcaagtatccatcgttcataaagggatcatcatgcaatcatttaaacaaattacagaatctgagaactcaagcaagatagatgcctttattggcatgtgccttatgtccgttacctatatgcatagcgcacattttgcaacaggttcatactcacaacataaagcatatgagggtttttacgaagatatgcaggatttggttgataaattcaccgaaatccacataggaatcacgggaagatacaaacctgtgctaaaaaccgaaaatgtgcttgacacggtggcgtatctccgtaaaatagccaacgaagcaaacgagatctacgaatcagtagatagttctttgaagaacatcctggacgagattaagggcttgtgctatcaaacaatctacaagctgacaaaactttcttaaaaatagtttgacagcgtgaaatgtgatgatagaataactatcgaattgaacaacaacttatggaaattatgatgaacttaaacactatcgtgaacaacccgaagaaaacctctctgatcgctctgggcgtagtcgcagcactgtggttattgcctaacatgtataccattgtgcaagacggtacggttaaaactgaaaccttcatgggtaaagtatcaccgaaacccgtactgcctggtttccacattgtaaacccgctggcaacgtttgatacgttcagcaccaaagacatcgcgatgaagttcgacaaattacaggttccgtcccaggataaatttaaatccactgtggatatgaccgtaatgctgcaattcgacggtagcaaagcaccgatcaaccgtatcaacgcgggtaatcaggatcaggcactggataagtatgtaactgaaaaactgctttccactgttcgcgaatttggtaaatccgtaccaaaagcgcaagacctgtttgatgcgaagatccaaaaccaactgcaaatcgcaattcagcaggaagtagaagattatgcacggccttacggttacactgtgaaacaggtattcttgcaggatatcaccctgccggaagttatcatggaacaggtaactaacacgaagatccgcgaagaacaggttaacgctgctaaagctgaactgcaaaaagtagaacagacttcattacaagcagtaaaacaagcggaagccgatcgccaggcgcgtgaaaacgctgcaatcgctaacgaacgtgatgctgatgcccgtctgtatgcagcgaagaaagaagcagaagccaacgccgccctgcaacgcaccattacaccggaaatgatccgctggaaagaactggatgtacagatgaactactctacccgctataaaggtggcgtacctcaaactgtaatgggttcggattatgcgggtaaagtgattttcgattctcgtaaataatgttttaaagccccctctttgggggcttgacatctaaaacgagaatactataatgaacataaaacagatcgtattgacaatactcatttcactattctttggtttcattggtggattgtttggtgttttaataattgcgtctgttttatgattaacctttaaacgtggagcacgttatgaaacacaaatatgataaagctgtagtaattggacgttttcaaccttttcactatggtcatgagaaaatggtaagggaagcccttgctgttgctgatacggtttacattctgatcggttctgcttatgcatatccgaacacattaaacccattgaccgctaaacagcgtcaagcaatgatcactcgctggtctatctgcaaacttgatgttgaagatgcagccagaatcaaattcgctcacattccggattatctctataacgaggaaaaatggaaatcccgtgttcgtatggcaatcgatgaaactcgaaatgaccgaattgcgatcgtcgggtacgaaaaagacaaagattcttactggcttaaagcattcggatggaatcatattccggttgaatctgtgaaggttggagaccaggatctgtcctcgaccaatttacgcaaaattatctgggaacaccatgaaggctgggacgaagatttgttaaaatatgcgcctagcactacggtttcctttatcgatgaatggacacaaacaaaagaattccagcgtttgtcccatgaagatgcgcactggcaacgagagattgacaagttcaaaaaatatccgtatccggattctctgaactgttgcacggctgattcagtggtcgtatgtaataaccacgtgttagtaatccgtcgtaagtttgcgcctggtaaagatgcgttagcgcttccgggtggacacaaaaacggtaacgaaacgttccttgattgtgcgatccgtgaattactggaagaagtacgaattaaagtacctgaaaaggttattcgtggttctatccgtaattcgatgctgttcgatcatccgaaacgttcggtgtacttctcaaaaccgactgtagcacagtatatcaagctcgaacctaataacgatggttcattgcctcgtatcatgggcggctctgatgatgcagcagacgcgttctggctaccgatgcatgaggtcgtgcaacgacaaggggaattctttgatgatcatttccagatagtaaacgcctttacgggggttgcttgaaagcacattcatctaagcaaaccttagaacaagaagccgcacatatagatgatcttttatgtgcggttattgtgaatccagatttatacgaaatttaataaaaagcccttgcgttctcgtgagggcttttgtattatacacataccaagtgattaatgaaaaggaagaaaaaatgaatacaatcaacgtttctaaagctgatgttatgaaagcaacgattattgctaccgaagccctttcattcatggctaagaaagcaggagttgatagtgctgttatcctgatggagattacaaacaacccagaaggcaacaccgcaaggtatttcaaagatcttacttcctatgcaatggaagaatttaaatgattaaacatccctattgtcttgttacccgcccggttagtccgggtggtttgcctgttacctgttggcagttgattgaaaagggtgatgcgtttttaaacaaacgtggtgagaatgttttcgtttacggtgttaactcgatcgagaatgaaactatggttatcactgacgaaaaaacaaatgaaaaatacacgttgacatccgaacacgattgtcgtaattttaacgtatattggaaatctgatgaagaatttgaaactgtgaggaaatgattatgatccctgttattactaccgctgaattgcgcgggatcgcaaaaacattaaaggttgaattttgaaaactgtaatggaaaccatattcggattttgagtgataaatacgcataaaggagaatgtatgaactataagcgtatttacgaccaactaattacactggcaaaaagaagagatatacctaaaggttactcgaaaaagtatagaaagcacggttatgatatacaccatatcgttgctaagtcattaggtggcacagatgaacccgaaaatttagtatatttgacatataaagaacattatcttgctcatcatctacttgctaagtatgctggtgataaaatgagatatgcttttttccgtatgtctcataatactaagaaatacaaaacgacatcttcacaaatgagtgacgcgagaaaattaaaatctcttacaacattcacgaaagaagcgagaaagaaaatgtcggaaaggcaaataattccggttgtcgggttcaaccttgaaacaggagacaagattattatattaggtggtcagcaagaaatgaaattgcgtggatttaaccctagtcatattcatgaatgttgttccggtaaacttgccaaaagtcaaggctatgtatggttaagaaagaagatttctgatttaatgagtgaatctgatatcagaaatgcaattgcattagctaatatttcacaaaagaaaacagaattgataaaacctttgattatgaaatgtatcaaaacagaaagagaaactattttaaatggtggtattgcggaagccgttgaaatggggtataacaaagggcatgtaagttcatgttgtaacggtaaaagaaaaactcataaagggttttattggagatttgtataatgaaaacaattgttgagatggtatttggttctcacctgtacggactgaacacaccgacaagcgataaagactacaaagggatctatctccctcatcctcgcgaaatcctgttaggtactgcgaagaagtctattgatacatcaactggcgataaaaactcaaagaacggtgttaatgacgtagaccgtcagatttacagtctgcaaaagtttatcagcctcgcatgtgatggtgacaccgtggcgattgatatgcttcatgcagatgatagcaaactgatcgctaactctgatatctggcaatatctccgcgctaaccgttcacgcttctacactacggaactaactggcctgtttggttatgttcgtaagcaagcggcgaagtatggcgttaaaggttctcgcctggctgcattacgtgaagttgtcgatgtgttgcagatgattcctgattactggtatggcacatcattgctgggtaacgtagatgaatctaactacggcaagcgcatcaaagttggtgaggtttctaaccgattcccgaccaacgagttttgtcgattcgttacagacaaaacactgaaatcaggttgtcaggaattttatgaagttctggggcgtaaattccagtctacaatcaccgtagcggaaatgaagaaatccgtgtataaactctgggatgaatacggggaacgcgcacggcaagcagaagccaacaacgggatcgactggaaagctctttctcatgcattgcgcggtggtatgcaattgatccagattttcaaagaaggtgatattgtgtatcctcttccggatagcgcatttttgaaaatggttaaagctggcggtgttcctttcgcaaccgtacaagaggcgctagaatcaacgatgtgtgaagttgaaaagctggcggctgtatctggttatccgaaagaagttgatcgcgatttctggaatgatttcattgaacgtgtgtattctgaacatgttgtgaggtactataaatgacatatccgaaattatctggcgctgaaattgatgttctgtgtaaactttacggatactcgtcaaaaatgttggatttggatttcaacgatgttcccagtaaatcagggcgtgattccctgattcaaaaaggttacgcatcaatggcgtttagttcgccaacgaaaaatactgatatgtgtttagtgatcacccctctgggcgttgacgcatacaaacacggaattgaaacggagtggcgataatgagtgatgttattttgaacgttaaagatgtagtattgggtgatactaaaaccctggattctgcaatggaaaaggctgttgttaaaattatgcgcaatagcctccgcctggaagttaacgagattacagaaacttgttatacaggtgggctttgtggtcaatctctttatcgtgatgcgaaaagcgtgaatattcagctatgggctgatattggcgaagaatcatacaaaatcgatgaggttgatttcgacgtatgaaaataattgacctttgcgctggtgttggtggcgtgaggctcggtttcgataaggcattcggcggggtcgaatgccttttaacgtctgaaatcgataaacatgcacaacaaacatatgctgataactggggcgatgaaaatattcagggtgatatattcgccattgatgaaaatgatgtgcctgatcatgatatcctgttagctgggtttccttgtcaggcgttcagtaaagcaggtttaaaacagggcatgttagatcctcgcggtactatcatctttgaaatactccgcattatacgggctaaaaagccctctgtgctgttctttgagaatgttccccagctattaacccatgacaagggaaacacgtttaaaaccatctacaggctgttacaggacgaaggatacgatatccattatcaggtaatgaatacaaaagattttggattgcctcaacgaagagagcgtgtgtttattgtctgctttcgcgatccagtgttctttagttttcctgttcctccacgtaccccaacaagggtcggtgacattctcgaaccggataatgatcaatacaccatatcagatcgtgcctggaagggctttagagagcgtaaagaacgaaacaaggcaaacggcaaggggtttggctatcaggccgttacagttgattctgtgtgtactgggacgataacagcccaatatggaaaggacggtgttcaatgtctggtattacaggaaggtaagaaccctagaagattaagcccgcgagaatgttttaggttacaagggtttccggattcgtttatcatccctgaaagcaaaatacaggcttacaaacaggctgggaattcagtttccatcccagtgattgaagccatagcaaaacaaattaagaaggcgttatgtcacataatggattaagaacagttgaagaagaacagagaggaattgatgaattcctcaaaactgtttctgttgatgtccacacaggaaagattatacgaacatcgcataaacgttccgacttgatcggaaaggaagttggttcgaagatcaaaggaggatatacacgcgtttatttcaaaagcaaagggtatctacgccatcgaatcatctactacgttgcgaccggaaaactacctgatgtgattgatcacaaaaatggtgttgaggctggtgacgggattgataacttgcgcgaagcgaaccaatcccgcaactctcagaacaggaaacggcgaaaggaaggaaccagcatattcaagggtgtatgtgtacgcaatcaaccaaccggaatacgttacattgcacagataatggttgatggtaaggttaagcatatcggttcttatagtgatgagttagaggctgcaaaagcatacgaccaggaagcgataaaacattttggagaatttgctaaattaaatcttgcataggctaacgaagaatagtatagtgaccttgttgaaacgaaactgacaaaaggaacataccatgacttttaatgacctgtttaacggatgtactggtgctggcgcgaaattcaatcttctgaaagattatccgctgggttctaatcctggttatgtgatggttgaagttcgtaacggtgaatactataacgtgttcatgtgggatcgctctttctcttactgctggttcggtgcgaaatacaagccagattacattctggagcaaatcgaaacagtaaaagctaaaaatcctgaactgtatgcattcgcagagtctattcgtggtgtgttcggacattgattaatcaagccccttttggggctttttcgtgaggtttatattatggccccttcaatcgtgatgcttgttatttctttccttgcttttgtcagtattatgtgtttgctattgtcgttaaaacaaaatatcggaaccacttggttagttatccttttgataatgattgctggtttgttccttttgattgtttccgatgttgtgtctagtctcatgtggcacatcaactacaatcgttatgttcagtgaggtttatatgattaccgaagttattgaaatggttttatacgcgttaacgtttgttctcttgttccttagtgcggagtggactagtcgcggaaatgtagtaatggcccgtatttgtgcggttgctgtgttctggattctgggtttactgctggttagcatcgttagggggtggtgatgatttacgtagcttcttatagtgctgattatgaattcactgaaattgcccatgtttctgaatcattgcaaaactgcgttgatgcgctgaacaaagttcctaatttcccttatcttggtgatcatgttactattgatgtatgggaaaatgaaaaactcattgcaaaaagttcaacattcgggcatcgcgatgtatgggatgatgaatcactacagtacaacgaaatccccgtaacttttgaagaggttatgaaaaacatgaaggaagtgaaagatgaacatctatagcattgagttgatttttgatggccgttttgatcaaacgtctgattgtgtatgttctactgttgacctgaacgtcgcgatcaactacattaagcatacaccgcttccatctttgcattactattgtataactgtgtttgatggattcacaggaaagccaacacattgttgtactgttgggtatgacgaaagaaaacatttcacaacgtttgagtgggagaaattataatgaaaatccgttctggttttgtgagcaatagttcatcaagtagctttattgtacggttcccgaaggatccgactgatatcaacaatctccgggaaatgatgggtgattgtgttcctaactgtggttatagctggatgacttgcccgacagcggaagaagttgtacagcaggtacaccgcgacctgggcggtcatatgggaaatagcttcgaatcatactatgattataagcgttatgaatgggaaaccgaagatagcgccgaaactcgatatcggtctaatcctcaaattgcgcttgcttatgatgggcgtgactggtatgatctggaaacagaagagaaagacgctctgatcaagatgtggctgtatgaagagtacaacgctaaatttggcaatcagaacggtgtattcatttatgaatttacttactctgatgaatgcggagaatttcaatcccagcttgaacacgggcaaattttccgtaatctggaacacactatgaagagtcaccactgatggaatacgaaatctgtgtaaaaatgcccccctatcaactgggggaagaaataacgtttagtcaaactctaccagtaccgattgatttattttctttgcgaaaatatcttgaacggtttgatctgaatgagtatactattcaaatcgtaaggattaaaaatcctgttgcctacgctctgtcttttgacgttggtgagtctcaaacaacaacgatggatgattttgtttcattgttgagtagtaagtttggatgcgatgatgcattagatattattagcaaaaaagtaaacgaaattttaatcaaatttacctataaatgagaaaattatgatcactaacattgaattcaaaaacgccgtagccaaaccaaccccgactaaccacgtttttgtttgtgacgtatccggatcgatgtataacgaactcccgcgcattcgtcagcacctgaaaaacaacctggcaacgctggttaagcaggatgatactgtatctattctgtatttctccagccgtggtcagttcggttctgtattcgttggcgaaaaggttagctctgtatccgacctgagcaaaatcaatgatgctatcgatcgttatctgcgtccgaccggatgtactggcttcgttgaacctctgcaactggcggttgaagtcgctaccgatctgcaagcggataatggcaatctgaacagtctgatcttcctgactgatggttatgataactgctggcgtactgatgatatcctgaaagcgtgttctactctgccgttgacgtttaacaacattgctttcctggaatatggttattatgtaaaccgtcctctgctggaaaaaatggcggaagcaaccaacgcattacacaaattcgttgaagggtttgatgcgtatgtacctgcatttgatgaaatcattaccgcgcaaacctccgcacgtgttgaagtcaaagttggcgatgcaacccatgcaatctacctggatgaaggccgtgtgtatgtcctgaatgctgcaaatggtgttgttctggttccggaacatatcaaaaacatttgggcgctgggtgaaaacgcgatcaatgacgttgacggcttcgatccggcaacagcagaaggtgaacaggttctgtatgtggttctgtatcatgcgcttcataccatgaatccagatctggcatggaaagttctgaaaaagctgggtgatgtgcgtctgattaaagcatacgataactgctttaccaaacaggattattccaacgctaaagatatgatctcagaagcggttgttgatccggctaaacgtctgatggatggtgttgattacaacatggttcctgatgaaaacgcgtttactctggttgatgctctcgaactgctggcagaaaccgacacagtgatcgacctgtcttctgaacactgggcgtacaatcgtacaggccgtcagactgtccagaaagatgatgatacactggataaactgtcagaacagattgcaaacgcttctactccggaagaacgtaaagcactggcggcgcaactggtagcgcatgaagtatggaaaccggaatttacccaaaccacaacgaaagttgcagtgaaacacctggtgggtaacagttcccgtccgaacatttctatcaatacggatctacaaggttacgtaaccattccggaaagcaaacaaaaagagtttggattgccggaaaaagtagaaaccaaacaagtgcgtaactttaccattgttaaagatggtatcgttaacgttaaggtacttccgctggaaaccgatatcccgactctgaaaaacttacgtgcttctggtctgactatcaaaccgctggctaaaattggtgaagaccgtatgtctgtactggttgactttacctctctgcctctggttaaccgttcgatgactcgcggtatttctggtaaggaatttgttgctgataacgtccgtctggaaatcctgaaaggccgtcagaaggtaatgaagttcttccgtgataacgcgattggtttacgcaacgcagaagggcttaaacagcgctttggtgaggcggctggtgaatggttgtctgagcaagggatccgtgattacggcttttctccgaaggttgagcgcacagaatcgactgatgtttacatgtcgaaagaactgaacgtgaaaatcaaaggcgtttcatcacttccggctgttgctgctaccgttgcaaaacgcgccgaaggtaagaagaaactcaacaatggcgacctgatcattctgtgggcttatgatactgtatctaaagagatcgaagcgcttgacaagaatgacctgatcgagtatcttgataagcagacaaaggaaactattaaagaggttcgcgcccttaataatcgcctgagtcgtgtaatgtacggtattgtcgtcggacacgcatggtttgcggatctggatttcgaagaaaccagcgtaagcgttaccgcaacagatatcgttgcagcggaattctggaaagatgtgaaatttgattgcacaatcgttctggaagaaaaagaagttaaactctaatgagatctcgcccccgaaagggggctttgaggtgacttgtggaattacttgaattggactttaaaaatcttatgaatatatgcgaactgaatcaaggcgacatcctttatttctccaatcgtgatgggtttcgtaattcccgtcctgaaaacatcggctttcattcacagctacctgatttcatcgtcgttgatgatgtccggttaacagataacggctggcaggttgatgtagtcggattcaaaaataacaatggtgctatcttatggcgtcatggttctattgatgaatcggtgtattttaacaacattcgtgtaaacatcgatgaaatcggaaccgatttgagcgaagtgcgggaatctccgtatgtgttcagcaactggtttaaagttggtggcgcgtatcgttctgataacacaacagttgtgtatgttgatagtttgatgtccggtatggttaacttcaacccgtcattacctggtaacaacggcacgatgatggacattttcagagattataatcgctctggtacaatgttaccttctgaaaaagcatatgtaatcaatcgttgcttgaaagggctgtaccaggatatgcttacctataacgaaggtaacgtaaaagatgcgcttcacgatctgaataagatcctgaaagaagtttctatgagaatggatacctgcaaatgatttatttattcgcgttcgtttcagttgttgtattgattttcgctggaggtgttatctattatgggtgtgaccgtcgtgaagataaggtcattctatggggtatcgtcttcgcgctaatccctctattcatgattggtaatatggtgatgcgatgaaaattcgttctgggtttgtgagcaatagctcaagcagtagctttattatcgggatcggacttgttcgccctggtaaagaaaaggaagttgctgatatctacggtgagaataatattgagtcattaatagatatgatcaccgatgatactcgttcgaagtggggtgttcctcaagtcgatagcgacggtacgatctcactggaagcgttcggttcccatagcgttgagatttcgtatatctgggataagctgaaagaactggggatggacgatatcaaaatcgttcacttcaatgaacgcggcgatgaaccagaatatgatgatgaatgcggaagatacaattatagctggtatgaagacgccgacgcgttcgggcctgaactcgaaagaaagtataatttattacgtgataaccgcgaactgttcattgaaggcgatgtgaattgtggcggggattacgacggttaaccactggggtaatgcatgataacgatagtatactgggaagaagtcgaaagcgaaatgatcgatggggaactggcggaggttgacggggaatccgaaatgcttactgctactgaaacaatcgaaaacgctttcgatcgaatcaaagcgcatcaaaaagaaatggaaggtcgtgatattcagtacatgatgagtttctgggtcggaggcgaggcgttatgtcatgccgtaattgcggaaagcacctcagttgatacatgtcgtgaaaagatcgaacagtacgtgaaatctttcttgcattgatgaaaaagcccttgacttcggtcggggctttttgctatattggttctatcgaaaacaatgaggaatacattatgaaatatctactacttgcacttagtcttatgaccacaaccgcaattgcttcggaacctccaaccgattaccaatcatttaaagcgttatcaaaagaagaacaatgtacgtatcttccatcataccaaacgatgtatgattggattacgttatcttctgattacgatcaggtaaagtcaaaaatcgttagtgactacttgtataacatatcgaaaggttgtattcttaaacttcaactgcaagtggatacgatgaaacttgaaaaaatggaaagaggacaataggatgaactgcgtatatatcatcattgaaaaatttacttctcctgctggtaacgttgaacaaacaacagtctgtgctgctctgaatgaagaagaagcaaagcataaagtaaaatatctcaatgaaaatgcaattattcctttcggtttcaaaggttatactgtaaaatacgaatatactgcgatttctcttgaaactaacccttcatggctacttgatatgaaatgaggttaaaatgaatccttatacaaaatgcggggtcatgtccctgttattaaaagaagttgtgcggttctatagccctattggtaaagtgtggtgtgtatctatcgggggtagacaaatcggatggatccgccgtggagatacaatcaaaggctggcaccaatacactgcaatttctattatgggctgtgaatatggtgagtttgataacttcatgcaagcattgtcactgttcatagataacgctattcacgagatcagttcacagggttccaaagttacaaagtacatggatactctttatgtgaacgtggaaaccgatcgatattgcatcatcaaagaagcactatacgatgataatgatgaggtgtattattacatcgtatccgatcaaaaccagatgcaaagttatatctccccgtttgaattgcgatatcaaacactaatgggattcattgaattctaagagaaagccccaaccgaaaggaaggggctttttgttatgatgcggaaagctgtagtttgatttgctctacgtcatccgggtcatcaatgatgctgtaatagatggttactgttactgagttatcatcatactgtggaataacttcaacagaaagattatatactctaggctcatatgtccggatcgcagatacgatagaagttctaattgattccgctgtcagagggttcatgttctcaaacagcatatcactaatagcacaaccaaagttactatcaaatggacgtgtacccttgatcgtggttacgataccaatcaaactatttctcactgctgcggccccttttgaggccgatacgtcattattccaatctcgttgcatgttaggttctatatcgctatataacaacctcagatttacacccatttagaccacctttaaaaattgctgtaagcctctcagagagacgatatggctatgtccacacgaacaccttaccggaatgtttgcgaccactgctggcttatccagggcggtagaaatcgatttataggttgcatagtcgattgc

SEQ ID NO: 22 - DNA, 176466 bp, unidentified
  source 1..176466: mol_type = genomic DNA
tttttggatctgatcttgaattcataaattttatgatctataatatattaatattttattttatcataaatttttatgaagatcaatacctagatctaataaattttatgctttttctgaaaacttttcctttaccccgtcactaaatactggtactatgttcccatattggaaatcaggaaaaacaaaatgactcacttgaaaaaattcaaagaatttctgaccgaaggtaaaaccctcgctcgtaccgtagcacgtggtcaacgtgccaaaacttccgataaacattcaatcggttttcttcacttcaaacatggttctgacttcgaagttttagcaccggattctcacgatctggcatacttcggtaaaaacattgtacgtttgaaaggtatgactactggtaaagttcaagcggcttatgtcgattgggctaaaggtactgtttctttctacagtggtaatccagataatgatatggatttcgacaaaccagaaaaattcaaagcggctactctgtatgaagaggcggaagaaaatctggatctgtataaccagttagcagaagatttcgaaatcgagatcccgatggatgaagctctggtgaaaggtaaagtttacaagctcccaagcaacgatatgcgtcttctgtatactgggcgttctaaaactaaagcaagcggtgaatatgcagtgtttaccgtagttgatgcttccggcaaacctcgtctggtatctggtaaaaaattcacccaggaatataaaggcgatatggtttctaaactggttctggctgaatcggaggaaatcaatgaagctaaaggcgttcgtgaaaaagttattgcagtactcgttaaacgaggatttaacgaaaaagacgcagagaaaatggttgataaaaacctgaaagatgcaatgaaagttcgtcctggtgcaacccctggaaaacttgctgaaatcgtaagtaccctttaaaaataaagccccttcctttcggttggggctttttgattagtatttgctccagacttttttcgcgccgtaaggtttccctttggacataaattgctgagtcggtagccaaacagctttagcccaatctttcggggcaatctctgctaatggtgatttgaggtgtgatggtagatatgctttgatcatttctgttgcgcctcgcatacctttcacgttaccccagttaattttgagtatagtcttgttagagaggcgtttagtggatccgtaccctcgcttcaataactcttctaaaaactcctgtcgtgctctgggtggcgcatagtgcaagttcaaaccatagaacaccaagttacccgcttttgatcttccggatcctaagaaaatgatcagtggaaatctatcccagtacggcagggtgtctttatattttgcatcatatgcaaacgtgtacaggcgacccgttgctggttttgccacacggtgtgttttgatactggttttgatgaaattaccaaaccattctgttgaatctttctgtcgctttgctgctgatacaccaacagtgatctttttcagactattacggaaatcgttgatgatctcgatcccgtgttttttacggtagtcattacgctttttacgggcttctgtctctgcggaacgtcgttcaatctcatcatcgatctgttttttgtaacgatgcattgactttgtgaacgttgcgtagtttaatccctcagaatcggcaaaacgtttagcagaaacacctttcgtttttgccttgcggaatttgatccccagttcaacccaatcactcaatttgcgttttggtggtgctttgggtttatcctcttccgcgatgatctcaaactcaaaaataaaactcatgtttccctccagggattactgacctcgccacccaaaaacttttttgagtgattcttctgttacaattttgaactgccagcctttttgacggcatagctcatttgcggctttccacttatcaatattaactgtataggtgtaaagagcatcaataaatttctttttattgtgtacgttgttgtttactggcttcggtgggggcatcgtttctttaaggggcttaacctcccaaagatatgtagtaccattttccatttccacatagaaatccatgtaatagcgtcttctcttaccgtctgcgttgcagaaatacgggatcactatacattcagaattccaacgttttacgtgtgggtttttatccagccacttcataacgtagcgctcccacgatgacctatacgtaatctttcgcggatcgcctttatacttctgtatgttttcgggtacaaacgaccctttatacgtctgtcttccagccattgcgtaaatcctaaatagaataatataacgtttagataggggaacttatcgtgctattttcatacttcccgcctgttgattacaaaggcacccagacaactgatattttccgagactatcgattttattttaatcgtgtaattggaaaatataaaacccgtagttaccagataacaggtacactacgacctgaacaactcgcagaatcattatatggaaaccagcaatactactggattctgttgatgcttaactctgtttatgaccctttctatggttggatcaccgatcaggaagccgcgtatcagtgcgctatacagcgttattctgaggttggcggtgaacaggttctgtatcatgtagatgaaaacaacaacaagtattataaccttgtcgaagaccccaataaccctggtcattggtatgacaaaggtgacaaaccaatgctgtatttacagtatcaaggtgtattagctcctgtagatatttatgaagatgcagtgttgcaaaatgaagcaaaacgaacaattaaaatcattagtccgtctgacatccaggcgtttctgaatgattttattaaagaaatggaaaaggctaactcatgaaattaggcggaaatttacactcccctttctttgatggggtggttgaaaacgttgatgatccgcgcgggttgggccgggttcaagtccgtgtatttggacaacacccagcccaaaaacaaaaatccgatgcaatcggtgttcctgttgaagatttaccctggatgatgcctattcaggatattagaagcgctgcgatctctggtgtgggcttctctccaactggtatcactcgcggatcctttgttgttggttattggcgtgacaaatggcaccaagatggtatgataatcggtactgtcgctggtgaatatgtcgaacaaccagacacacagaaaggtttttgcgatcctatgggtgaataccctcgctatgttggtaacgatgttaactcccttgctttaggtggtttgaaaggtaaaggatcatcaagtgtcatcattcgtgattcaaacacaagcatagcagtaaacccagacgatcgcccactggatgagataccagaagataaccgccctgatacgggtggatttacgatcgaaaagatgctcaagcaggatgaggggatccgcacacgctggtatacagacagtgaaggatatccgacaattgggatcgggcatttgcttatccgcgaaaagactcgcgacactgcaaaaattaacgctgcgatcagtaaagcggtaggtcgagaagtaacaaacgggacaatcacggcagaagaggtatcaaccttatttgctcaagatttagccaaagtgagatccgacattcagagaacagctaacgtccgtgaagtgtatgtgaacctcaaccgtcctcgtcaaatggcgatcgaaaacatgtcgtttcaaatgggcgtcggtggtgttgctaaattcaccaataccctaaaagcgatgaaaaatgaagattggcaagcggcttataatggtcttcgaaattcactgtgggctagtcaaaccccaggccgttcttctcgcgtgtctaaaatcgtcctcacgggcaaccttgaatcatatggggtacaagtaccagatccggaagggcgctctctgagtgctgcttacgctgcgtataacggtgctacgttgttggctgctagtccggaagatccgtttactcctggcgatacccgtgtgatgtttgaagaaccagcatcatcgtataatgctgaatacccgtataatatggtgtttgaatcgagatccggacacattcaggaattcgatgataccccaggatacgaacgatataaccgtgttcacccagcagggagttacgaagaaattcgcccggatggaacccgcgttgttaaaatcgtaggggatgactatcaaatcgtgatgcagggccggaaactcaacgttaaaggcaacttgcaggtagttattgaaggtgacgcgttcatttacaacatgggtaacgttcaacaaacagttgatggtaacgtaactgaatttgttcgtggcaacgttcaacaaacggttgaaggtgagtacgttggcctgattaaaggcaatgctgaactaactgtaaacaaagatgcaacagttaacgttgatcagaatcttatcgcaaatgtgaaacagaatgcaaccgtggctgtaacagaagacgcaacggtcactgcaaaaaatgcgaaaattgagattgaagaaacgatggatatcggtgctaaagatatcaatatcaaagcaacgaataacacgtttattgattctggcgcattaacaaaaatcaccggaggaacggtacaggttggataattttaaatgcaaaatgaaggtaggctaacatgattatggattatgaatcaataattgatggaattatgcaaaattatcagcatccttgtgatgctgagatccccgctggctattatcggcgggttatctggcaagggcatacagaaaattatccggctgttggcgttgagtgggatactgagataatcaaaatcggtactcatctttatactcaagaacctttcggacatagaagcacggatctacctgttgtcaattcaccgggaacagatccaaatacaggacaaccaacagggatccttgttccaaagattggttattatttcaacactcaagcagaaattgatgcttacattacatccattggtgcaactaaaatcaatggtggtaacgattggtatggcgcggatctgtcaaaatcaaacctatacaaaaaccctggcgaactggctatgtataaggttgaaaacagtggcgggtatctttccggaacaaaccctgtatgtgatgctcgcatacgtcaggcgtataatcaggacactggcgcattcaccaatattgattattattggaatggtaatcgtatagcctatatgaagcatgacgaaacaggggcgcaccagtgcaaatatactggtatgcaggttaacaccaacgcagatacaagcattcctcctgttcctcctgcaatgtcttccacttatggggcattaccgagtgaattaagccgtgctgatatttcgtgcattccggcaactgttggtttcgcatatacaaatatcagtgatgctatgttacaggcatggaacgaaacccgtaatacgttcaagctacagtttaacatgttaacgggtgctgtacagaatggattcggtatcgcgacgatgtttgatggtttatccgtatcgatggaagaagtaatggcgggggcgctcgcattgtcacagcaagcatggcaaactgctatgaaagttttcagacaagtgattagcgctgcgtttaacattatcggtggtgcgtggggattgattaatcagttcttgcctcaagtaaccatcttaggtgttgcgatcaacatttacgatctggtgtttggtgataattctgttcagactttgaaagatgcatttaatgcaatcatcaaatccggacaacaaacatatgaaaccgtcataaacgcaatatacggggccataggaagcgcatacaattactctgtggaatatgtcaaagctggcgctcgcgaccttgtggatgcatgtagcgcgttatttgattggtgtttaacgatgttccaaaacggttgcgttgcattaatcgacttatacggtcggatcatgcaaacatgggctatccctccggaagttccaaacccgttatggtctgcggtgctggctatccgtaacatcatgatgcaaatcaaaccacttgatataattctgggcggtaacttccctggattcactgcaatggatttgtatcaacaagcacaggaaaaagtcaaggcttttgttgatgagtcatacgaacagatccgagggctttacgaacaagggcaggaactttataaaacgttaaaaaatcaaattttcgaacgtgatgcaattcagagaaaattcaaccagtacttaaactggatgtggggcgctgtaacagatgaagcaacagcggcttatcaatctgcattggatgctgcaaacgctgctgtagctgcaacacaggccgcgtatgacgctatacaagaacagattggatctctacaagatgcaatgaaagatacatacagcatggcgatggaagaattaaagaaattgcctttgatgagtacaataaacgagtttttaggcttctgtggtgtcgcatttgacgatcttctcaagtcatatgaaaatgcgattactggtgctcagtctctgtacaaaaatttcattgatagttcgcgctcgtttaaagatcactgcaaagtaatctataaccaaatttgtactttggcgttgagtaaagtcacacaatatgtgaataaattgctatctctcataggattagcaatcaattttggttcgattagtgtatgtgttccagtactgaaatactaaatagtcgaatgatcaagaggaatttataataatggctactgctaagactaagactgtcaaaaaacagattaaccaaatccccgatatttttatcgggggcactttcgaagaaattaaaacagatctgattgattggctgggtggacaagaagagtttaaggattacgatttttccggctcgcgaatgaacgtactgatcgaccttctgtcgtatgctactctgtacattcagcagatgggtaacacggctctatttgaatcgtttattcgcaccgctgcattgcgtagttctgtagtacaggctgctcaagatttaggttatatgcctgattcccgcacggctgcaagtacagcagtaatgattacggctgctaacccgctgaccccaacatcgatccgtatcccgcgcggtacaaaattcatcggtactgtaaagaatacagacagttattcttttgttgtatcagatgacgttgttatcgttcgtgatagtaataacaactatacatcaatgctgaacctggtgcaaggccgtttagttcgtactgaactaatttatgacggttcgagtatcctgatccgagatccaaacattgaccgtagtcaagtacgtttaactgtaaacggcgcacaatgggaagactggacaaacgaaagcattgtaaacgcaacaggcgcaagcacaatttactacatgcgtgaaactgttgatggacataccgaagtttatttcggtgaaggcgaagcaagccagcaagtagcgggtggtgcattaaccgctgaatatatagggggcttgaaacctgctaatggttctactatcgttattgaatacctgtcaaccgatggggaagcggctaacggtgcgaaagattttatctatgttgataccttaaccaatattagcatcacaaacatcgaagagaacccgactaaatcccctgattatgttggtgctgatggtggtggcgatccggaagatatcgaacgtattcgagaactggccccagttatgcgcgaaacacagcgccgttgtgtgactgcatcggattatgaatcttttctgtctcacaggtttggttctatcattcaggcggtacagtgctttaccgataacgagaaacctggttatgctttcatttctgttaaaccaaagtctggtttgcgcctaacatcggtacagaaagaagatatgcaaacatatctttcaaaatacaaccttgcgacgatcaccccgtcgattatggatcctaactatctgtatatcgtacaatcagtaaaagttacgtatgatatcagtaagttaactgaatcggaggaatggctacgcggtcaggttatttcgtcaatcgactcttattatactgataatgttgaaattttcaacaaatcgttcagcgtgtctaagatgttgacttatgtcgatcagtctgatacttctatcattggttcagaagcagatattaaacttcttcgtgaaatcgataactattatagtgctccgatgtcggggatccacttcttgaatcaggtagaatcaaaatcgattatttcaagtacattcaagtttacaaatgatgctgatgagagttatgatattcgttacgcttctaccgaaatggatgaagatggtaacgcaaaaatcgtaataggcccgtttaaagatggtgatatctctattgctccttattctggcaatgattttgaaaaattgactgatgctggtgtacgcagtaaatattatgaagttggttctgtatctcattacaccgactttattagtttcgatttgggggttctcaatgtcccggcggatagttttagcgctgcatacattgaactgatggcgaagccattagaagaaaccatttttactcgcgatggttcgttgatcgtgtttgaaaatgacctgcgtcctcaatataccacattgactatgaatcctatcagtcaataatctttaacccctgtcttcggataggggtttttctttttataaatacgtgatatacataaccgcaaatttggagaaatataatgattaaagcgccttcgattacgagtttgcgcgttgataagctggctgctaacttcgtttaccttaaatgggatgatgttggcatggatttctattatgtggttgaattggcccgtagccgtgatatggacggaattattatcccagatgaaaatttaatctggagtcagttgggctatagctacgaaaacgaatggtttagcgatcaggtcgccccaaatacacgttataaattccgtattcaaacaactcatgaaggttttgaaccttctgattgggtgattagcgatgaattatggacgtttgatgagaacgcctacgcatatacaaccatgcgtgaattcacccctgctgattcgtttatcaatgaaaaattcgccaaaaacaatcgtgattacgttgattttaatgatgatgttattatggcttctctgatggttgaggattttgtatactctcccctgtattctgatgtaagtcagatcagcgataaaatcctaaaacaagaaagttatcacgaaattcaagatcatatcgaacatgtttgtaatgatatagatcgcacttttctggtatactcaaacggattgctttacctgtttgaacgttttcagaatatggctaaagtgtcaaatgacaaaggccaaacatggtattattacaaagcattaaacgatcgtgtaggtaatccggtttcccgtactattgcctatcagagcaccaacactacgtatgtgttaggatacgatcgcatattttacgggcgcacgtcaacagatattcgttggtcttctgatgaagttcgtttctccgcagatgatgtaacatttgcgaagctggggaaccaatcagggttagattttgatgttgactcatacaacacgtatgcgcgtctaccgggcggagtgtcgaagtatgccgaagctatggcttgttctagtgactggctctacgtggctgctaagaacgttatgcgccgtattgcattacgtaacacaccaattgatactgatccaagttcaccgacctttggtgaacgtatttttgatgaagtctcttataccatcgtaccaggaaatgataaaattgttgttaaaaaaatggacgtgcttaatgatcgtttgtatgttctggtaactggtgaagttaaaacggcaatgatggatccaactgtcaaggctaacgtagttccttctgatgatgctggtgtttatctatgggatgaaaccgcaaaaacgtttacccgtgtttatggtaaaaccgaagaggaacgtttttatatcactcatgaatataccaatatgtcaacaaatggtgatgaagtttacatttctgttggtaactacaaatacccaggcactttaccggatccagatttggttcagaaatacccagaagatgtacattcggcagtgaaatacgatcttgttcctggttatacagcgagcatttctattaactttgctaccgttagggcaaatcagaacgaccctactgtgtggaattttgggccgcaagagtactacaacgaggcaaactttagctggcattttcgcgataaggttagcacatggatcaccaatgacaaccgtcctctggtagtttatccggaaaccctgtatactctggttactgatagcgcgtctcctgcgtcaacaattcgtgtaaaccatgaagtttgggacaaaggaacagttactatctacttgaataacatcaagtttactggttttacgaagtacacaaacggtgttctattgtatcgctcaggtggtagaatcattggattctatgaactgtcataccgtgcaagggatgaactcactattttctggaaacctgataacactttaatggtggcaagtctggttaatcaggaacgtgaaaacccatacacaccggatattgctcctggattaattgatcctgatcttagtcatatgatcactcgatttgccccacaaagctatctggacaatcaacagtttgaaaaatttggtgaatactatctgcaatatgtttcattgggtagcaatagttactataacaaattgctgaacttgatccggaacaagtatccgagagagaaaaacaacgttgaatatttgtggtctgaaatcaaccgccgtaacatttacctggataaatccaaacgtgatgcagtggttagattttttgaatcacgtgcaagcgatttctattcaacaaaagggatcgaagcaagttatacgttcctgtttaaattactgtataacgaagatgtgacagtagaaattgaaagttctaacactcttgaatatgatattttggttagttcaacaaatatcagtcaggatatcgtaggccggacgatctatacaccaactggtcgcgctaacgttacatacatcgaacgtgaatatgaaaatggtcaattgcgttggtcaatgactctgcataatgctcaaggtaactttatcgaaggacaggttgtcaagtcagaaaaaacgaattttaccggaatggttattcgcggtgttcgcggtaaacaaatggcgaacaactcgatcgactatatcaaccgtgggcgttcttactacgtgatgaaaattcgttcaaatctaccgacttcccgttataaggatgacgtgttgcgttttgttcaccctgtaggcttcggttttatgggtattacgatgttaacagtattcatcaactctggtttgtcaatgactcataacgagacaatcattgatattctgagaaactaccgtttcgatagtggttatcctaagttctggcctgatcgcattgcgagtatggacggtaacggaaaccaacaattcgacctggtgactggtgaacctctgtacaccgcacacccgcgagcgggggaaccgtttgatgtgcctccggaatatgacattgacgaaaaacctctgaatggtgtattgccttctgcacgacggtttgatcaaagtccgttgttcgattgttcaggcgttaaatattcacagttccgtaatttagtggataaacgactgaaagatgatgcaggaaacccacgtgatcctaatcctccatcacagattaaggtaggaaattaaatggcacaacaaaacttgtatcggtcggtaattaccgcaaaattccgaaccgaaaacttgatgaacttcaaagatatgatcggcgatgccgccgatctaaacacaatttatatgtctattgggcgaactgaatcatgggcggataacgaatccgatcctaactttgcgcctccatatccaaacgatagcacagatggtgttagtgatatgtggacacatatgatcggggctactaaagttcctggtgatatgatagatgcaattttaccacgtaaagactggggtgatactcgctatccaaacccaaaaatcttttactttaacgatattgttgttgtaaacaccgcgccttataaccgtactgatccgggtaaaggttggatggtttatcgtgtagttgatgttcctgatattggttcttgctctatttcgagtattaccggaaaacttgaatgtatcaggatcggcggtatctggagtccgtctcatgaatctagtgaacctccacgcggagaagctaacgggatcgacatgggcgacggctataaatgggaatacctctacacaatcccgccagatgtcgtgatcaaccgttgtacaaacgaacatatcgtagttcctttccctggcgaactggaagaggatccggtacgttggggttatgataacgtgattcaatggtatccaggacaatacgatctagtgtatcggttgaaggtgaattcaatgcgttttcgtgcatacatggattctcttttcttcccgcaatctacgctccctggtaacaaagggttccgtcagataagtattattgtaaacccgttgattaaaaaggcaagcccgaccgaacctgaaaagaaagcaactggtgattactataatgctaacgcgcttgaacctgattccggacgtatgatttacatggaaaacagacaacctattattcgctcccttgatcagactgaggaagtgagtattgtattcgaattctaaggaaaaacaatggcttaccaaacagcaaaaaaactaattgatgtcggtgaaatcggcaacccatcaacaggcgacccgctttatgatggtggtgttaaactgaacgaaatgatcaccaacgtttataatgcatttggtgatgtgcgtatgctgtctgcaaacgaaggtgtcggtaacatggtgatccatgctaccggatactatcagaaattaccacgcacttactattcaagtacaccgatcgaactgggttccttgcatgacatggatacttcgacaggttcgattaccgttgttcttccttctggtaaggttggcgaaggttgctacttcataaatagtacgggtagtgtctctgttgatcgtcctatcgcgtttcgtcctcaagttggcgatacaatcgcgggggttgcagaccagttgtacatcacgtcaccttacacctttgtaaaaatctggtgtactaaaaaagaaggcgcgatcacaacatgggattattctgtagaatcaatgtttggttctaaaacgatgccagttgacactacggcgcttgtactgaaagcaaaccctactgctattcctatgtttgggtatggtgaatttagcggggctaaggtgcttgtatacgcagaaaacgtagctggtacagttaccaaaatggcggaagttttaatgaccgtggatcgtgtaaacaaaacgatttattcaacggaatacgctattttgaaaaacagtgaagatgaaatgtttactctaaactttactgttggtgctggtgatgtcgtatacgctaacgtgcaagcgatcaaagaagatcgaattaaattcacgattaaagcaatcgatacgattaaatcagggatcgcgtcatgaaacaagaaattttaataggtcaggttgtagacgatggtacaggcgattacctgcgtcgaggtggtcagaagactaataacaacttcacagaactgtatagcatgttgggggatggtgaaatcccccatccagcaggtgcctggaaaacctttgcgggtacgactctatcaccaaaatttggtgaatcatgggcgttgaataccagcgcaaacaaaatcaccgtaaacctcccgaaaggcggcgtaggcgattataacaaagttattcgtctgcgtgatgtgtggtcgcgttgggccactaacaacgtcagattaatcccggcaacaggggatactatcaaaggttccccaactcctaaagatctgtttaaagattttatggatgtggaactggtgtattgttctccgggccgttgggaatatgtcgaaaacaaacagattgacaaaattacaacttcggatctggcaacagtagcgaaagaaacgtatattgcgactcagggacaaaccgacttccctaacgtattcggcgttggtaatgaatacaacttgcaatctttcgaagtttactatcgcggtaacttactgttcattgatgagaaagacggattcaatgcggctaactcagactatggttcgattggttctgcccctggtgaactggttgcacttgatggtaattcagtacgccttaaaaacccgtgtaacgctggtgacacgcttcaatttgttacctatctagacgggttagcaacatggcgatcgagctatgaagcgtatgtgatgcgcatgtatcagactggtgatacttctctggaaaccgttccgggtgaacagtgggtaggcgatctggcaaccaaaaaagagtttacccctgctgaatttggtgttaaccctcgcgtgttgattaaccctaactcgtttgaactgcttctcaacggtaaacaactggttaaaggcggtgacgctgactatccggcgttttcctgtgaaggtgcggaaggtgttgatgaaagtacgtgtgtgggtaactctggtgtatgggttccgtcaggacaggattatagtttggtattcactgattctgtagtgacttcaatcaagtttgctcaggaactggaatccggcgacgttgtaacgatccgttggtttaataacgatatcggtactctgatggattgggacggtacaggcggtattaaagagaaagcggataaagtttatctcaacaacgaagaagaagtatcgttgactaaccgcattgaatataccgattataacaatccttcccagaaaacaatgcgtaatactggggaaacctatcaggggcgtattctcgatattcaggctctgtttgatattattcatccaatcggaaccatttacgaaaacgcacataatccagcaaaccctgctgattatatgggttttggtggttggaaacgttatgcggaaggttatttcctggctggctggacatcaaacgcagcggatccggattttgcgttaaacaataacgatttagatagtggcggtcaaccgagtcatacagcaggtggcactggtggcgatcgtggtacagaaatcaaaatcatcaacgttccggaacttgtatcaaaagataaagttctgattgctgatgaaaatggtgctgtgatcattggtggttgtcagttggatcctgatgcttctggccctgggtacactaaataccgtgaggatacattgaaagtgaatcagggtaacacattacctgataaaatcaaaactattccaccgtatatgactgcacatcgctggataagggttgcataatggcttacaacaatatttcaaaaacaagggagggcgctcgcgtcctctctaaagaagcagattacttacagtatgatacttatggtaagttgcctctgatcggcggtaaacgttcgatcggcgaaccaaacattgaccaaacaaaacgcggcgttctgtatggaaacgtacaatccgcaattgatgacctgtatacgcttatcgagcaaatcccgattaacggcgttgttaccatgacagaagatgcccctccaatcgctgtacagcaggttgagagcgtttcttttgatggcattgtacagaacatcgattcagaacaaacaaaggctgtggttcacgtatacggcttcccgtttatctttgataacggaaccaacgccgcaactgtttgtgaaactgcgtataacaaatttacagaatttgttgctgcggaaaaatatttcgcagaagtgaaccgtaaaggggtagatggaacaattcttgaatgtcgttttattgatagtgttcctcatccggcaacaaatacctcagaaaacggtattcggcagatcggtacaattgacgtagccgcaaagagtggctatggttcatgggttaaattgggttctggcttcttacctgatgttactccgcaagtaaccgtgtattacttcaaacgaattgcataaggataacacatgagtaacaatacaatcaaccacgtaagtgataaatccatttacgtgacatttgacccaacaggtactgattggcctgataccataaccaacgtacaagatgcgttggaaaaaataggtagttgggcgcgtactgatactgggcttcctatcgcaacaacttctgttcgtggtattgctcagatcgcaaccgaagctgatattgacgctggcacggataacactaagattgttactccgaaactgttagcataccgtatgcagaaccctaaagcatcacaaaccgtatggggttatacgaagtattcgactgatgcggaatctacaaccgtaactaacgatacatcgtctattactccgcgatcgctgaactatgtgttcaataaccgcaaaggtacagaatcggtttggggttcttctaaaatcgctaccactgcacaggcggttgctggtacagataacactgtaactatgactccgcttaaagtcaagcaagcgatcgcgtctctggttccggttcagtcgagtgcgaccgaaagctcgcaaggtctggtacaactggcaacagttgcacaggttcagactggtacgatccgtgaagggtatgcaatttcaccttatacgtttattcgtttaactgcaactgaaagcaacctgggcgttattcgcatcgcatcacaggcagaagcaaacgcaggtactgatgacaccaaagcgattactgcgaaaaaattaatcaatacccgtgcaactggatctcagttcggtgttgttaaattagcaactactgtaggaaatgcagcaaacactgcactttcttctaatgctgctgtattgcctagtgatcgcaacgcaataattactggttctctttatgagaatagcgcaatatataacaacaaatatcagacgtggacagatcttgattggcatttcccagtaggtgctattgtcatgactggtttccagactgaccacggtagtttgtatatttgtgatgggcgttcactgaataaaaataactatccgttactgtttgagcgtataggatatacatttggtggtggcggtgattggtttaatattccagactgtcgaggcgttgcagtacgtggtcatgaccgtgggcgtggactaaaccctaatcgtgggtatggtacatatgaaggcgatatgttgggctggcacgaacacccattacagcttatctaccagaacggcggtaacattccgaaatggcaagcagtttacgaactaaaaagcgccgagaagaatgaccaaagcgctcgcgtatttgatgcttctataactaaagctactggtgtgggcggtgaagaaacccgcatgaaaaacatcgcattaaactacgtaattcgtactcaatagaggttattaaatgatcatcgacaaattaaatccgttgccgaagatcccgtttgttgatggcgtcccagatgacgccacgactcaaacgaagattctttggatcaaaaacggtgaaactctggacggttcgccagataaagtgtcaaacactggtagtcttaaccgaactggtgtaaacatccagcagaacgcggttcagttagaacaaaataccatcacccataatgataaaatcaatgaagttattgatcaagttaacctgatcactgaaaacattgatgcgattggtgatgaaagtgtaatcaaaaaagttaaccaattggatgaagatgttaaagcattaactttatccaatacccagacacaaaacaaggtagcacagctaacactttctgtaaatgctcagaatgatgaaatcggtgaatacgatccagaaaaagatccaaagcatcgtactattcgtgatgatatcatttacatcaaaaaagaagttggttcgtatcctgggtttaccgttgacggtgatgttgacccttcttcaacaggcacaggtcttaaatatcgtgtgttgagtaaccaacgcgctatttctatgcaggaaactcgcataacgaaacttgaggatgattgggcgctttcggaagtaggacaattaacagaagaagttaaagaacttcgtgctgaaatgggtgattctggactggcaactaccagatccatatatgcgcgaataaagattcttgaagatggatctattgtcacacaaaatgaattggatgccattaatagtttcattgggcgtaattctagttctaccagttcaatcaacgaccgtgtaaacagtttggaaaactcagtcagttctttggctacgcagattaacgacccaacaactggtattactgcacaaattgcaacaatccagggacagataggcgatgtttcaacttctggtagtatccgttttgatattgcgcaaaacaaacgcaagctgatggatatggaaatggtcttaggtgaatccggtgatgaaggattacagggacaggttgcaatcttaactggtaatatcggcgaagattctgatcctaccagcatcaaaggtcgtctaagtgttgttgaaggtgaactacgcaccaacactagcgcactttgggaactgcaaggcgttgtaggtaactcttctagtggattagtagcaacaagccagcaggttaacaaagaaatctatggtgatggggttagctctgatccggttactcgcgcggggttgaaaaccacaaccagaaaccttttcacacaggtaggcgataactcagaagggagtgaaacaggcatttatgcactgatcgcagaccttacaaaacgcattgaggatttagaagcgttgaacattgcacaggcacttgcagatcgcgtaactatcgaagatctgaatactaaactggctctatacatcaaagaagctgacgccgatctccgttatgagagcaagaacccgcctctggctttcggtactaatctaactggtgataccgattacagtactggcgatccattgtctctaagcgtaactatgacaggtggtgtttctccgctggcttaccagtggacgaaaaacggtgtaaacgttggcacaaactccaacacatttaccatcgattcgctacagccttctgattccggaacctataaagtaacggtaactgatgcaagccataaagtcatcgtttctgatgaactggcgatcactgtcgcttaacgattaacaaggggctacggccccttttgaggatctttatgattacgaacaacccagcacaattaaaagatgaaattctgcgccgtttaggtgctccgatcgtcaaaatcgaagtgacaaccgatcaggtttatgactgcattcaacgagcattagacctttatgcagaatatcattacaatggatctaacaaagggtatatcattcttaccctggggccggacaacccgaaaaacattttcgatctgagtaaagaacacattttcgcaattactaaagtgttgcgtactaacatgggttcccttgtatcgatggatggtactgcggtttatccgtggtttactgatttcctgatgggccttactggtggttctctgggcggtggtggttgtgcatcacgtacctacggaatgaacgcatacggcgcggatatgggctattttacccagatgatgagctatcagcggtcaatgcaagatctcctgtctccgcttccggattactggtataacgacgacacaggacagtttgcagtatatggaaccgttaaagatggtgatattgttgttatcgaagcaatgatcagatcctttgttgatgtacccagtatggtcggtaacgtcgctggatacgctacagcgggttctgatggtgaagataagccaactatagcagatatatacaataacccctacaaagccgtctcaggcggtgtgaaggctggtcaaggtacaagcgttcagggttcatcctctgcgtataacaaccgttgggtgaaagattatgcaactgctcttgttaaagaggtaaacggtcaggttctggctaagtttcagggtatgcaattgcctggtggtgttgctccggatggaacccgactgattcaggaagctatgcaagaaaaagaaaacctccgtcaagaacttctgttactgtctgatgcacttccagtgttgatgatgtaaggaggaaaaatgcaaaattgggatgaaagtctgtttgcacagttagaagatggttccggcgtcgatcggaacctaagacaagaagtaacaaacccgtatgttaactggtacaagtataatcctacacaacagttacatgattcactaacagccgaagcaattcaaatgaaatctccggatatgtattacgtccgtcgagaatttgttaatattgataaaattttgggcgaagaccgtgaatcgaagtttacaaaatcgtggaaaattgcagcatacatcgattcgtatgcaaactacgaaggacagagagacttttacagcaaattcggtatgatgtcaaacgatgaaatgacacttgtgatcaatcctcgtttatttgcacatcaaactgatggcgggatccctgttctgggagatttgatttatttcccgatggataacagcctgtttgaaattacatggattgagtttgacccgttcttccagttcggcgatcgtcctcaacgtaaaatcaacctcgttaaatttatctatactggtgaagaattggatcctaaactgcaacgaaatgaagggattaaccttgctcccgatgctgatctggatctcgaacctattcgaaatcttgatgggttggctgataccaatattgaacagtacgaagaagatcaagcctttgaagatgaaggcgatgaattcattgaatcgtttgatgttgttaacgggcgcggatcaccgtttgcacagttcccataaatataaccaggggaaaccctatacatgtaagggtataggagaaatcttatacccgctttaacccatacaggaaaaagaaaatgtttggctactggtataatagttcgctgcgaaattatattgtcttgatgggttgtcttttcaatcacgtgcaagttaaacgcattcgcggcgaacaagaaaaatttatcaaggttccgattacctacgcatcaaaagaaaaattcctggcatccatgaacaagttgaactatgcatacagtcaggaaaatgttgctaaaacggaaacaattttaccacgtatgaatctatccctcgttgatttgcagtataacgcaattcgtaaaaccgggatagcggtaaaccaaaaaatgacgcagttacgcgcacctggaaaaacagtaacccagtttaaccctgctccgtatcgtctcatgttcgaactgggagtgtatacccgttacgaagatgatgtgtttcagatcatagaacagatactgccatacttccagcctcatttcaactgtcgtattacagaattacataaaaacgacattaaaatagaccgagatattaaaatatctctgcaatctgtttcccctgatacatcgtttgaaggcgatgcaacgacacggcgacacattgaatggtctttaatgtttgaattacagggctacctgtatccgcctgttaacgagattaaaggcgagatcagaacagtatacacggatttcttttccaatatgaacccgttggacaaagacaattttgaatccgttgatgctcaggtggatccggttgatatgcctatacaggattacacgggagaagaatacgttcaaacgtatgctaataatatcccaattcctagcggagatcaacctcctaaaccgaggggccaataatggaagaatttagcgtaaaacaactacttgatcttgaaaatctccctggtgctgaaactggggaagaaatggttgtatatgaaaaactcgaactcgttgatgtcgagtcacacccagcagatcgaaaacctgatttagaggaagactatgcacttgcgcgtaaaactgcgcattacatgaatcagatgatcatggatatggcacaaattgccttgcataacgctaaaaactctgaatctccgagacatgttgaagtttttacaaccctgatgaatcagttaaacaattctaaccagggattgatgaaaattcataaagaaatgcgagaaattaccgaagaaacaacaaaaccaggatctgaaaaaggtaatggcggcggtaatgaaatgaacatagagaatgcaactgtatttgttggttcccctacggaattaatgcagaaatatggtagtgcatacgaacccaaagaaggcttcattaatggtgaagcagtagaggtaaaccctgatggaaatggaaccgacgatcgatccgagtaaggaatcagatcacccaatcggattaatgcatcccgattatctgaaaaagaaaattgatgaatttggggtggagtggacgcaaagcgaacacgataaaaaatggtatccgacaaagtttagcgattacctaaaaattaacggtatccagaaagttgatattcaagcaaaagacagttcaaactttgcgacatataaaaacaaaggtaacaagaaaactcgatataacggaaacccaaacctgaaacgcgcgtacatccaaaataaatggacacaacagatgttgatggaatgggttaaatgtcgtgacgatatcgtttattttgctgaaacatattgtgcgatcacccacatcgactatggcacaatcaaagtacagttgcgtgactatcagaaagaaatgctgatagaaatgcacaaaaaccgtatggttgcctgtaatctatcgcgtcagttgggtaaaacaaccgttgttgctatcttcctggcacactttgtgtgtttcaacgaagataaatatgttggcgttttggctcataaagcctctatgtctgcggaagttctggatcgtacaaaacaggcgattgaacttctccccgatttcttgcaacctggtatcgttgaatggaacaaaggttctattgaacttgataacaaatgtaaaattggtgcatttgcttcttctcctgatgcggtgcgtggtaactccttcgcaatgatctacattgacgaatgcgcgtttatcccgaactttgttgatgcgtggttagcgattcaaccagtaatatcttctggtcgtaaatcgaaaattcttatcacaacgacacctaacgggcttaaccacttctatgatatatggaacgctgctgtagaaggaaaatccggcttcgtgccttacacggcgatctggacatcggttaaagagcgtttgtatacagacggcgatgatggcgtatttgatgacggctattcatggtcttcgaaaatgatcgctagttcaagtaaagaagcatttttacaggaacattgtgctgaattcatgggaaccaatggaaccctgatcgctggctggaaattgtctaaactatcgtgggttgatactgatgaaacggaaactaatttctatcagtataaagctccagtagaaggtcataaatatattgcggtacttgatccagccgaagggcgcggtcaggactatcacgcgatgcatatcatagatattacatctatgccgtttgaacaggttgctgtataccactcaaacaaaacatcgcaccttattttgcctgatgtcctgttgcgttatcttatgatgtataacgaagcatgggtttatatcgagctaaatagcacaggccactcagtggctaaatctttgttttctgagttggattacgataacgttatttgtgatagctatagcgatttggggatgaaacaaagtaagcgatctaaagcgattggttgctcaaccctaaaagacttgatagagaaagataaactcatcataaataacaaaaagacaatacttgaatttcgtactttctcagaaaaaggtgtttcgtgggctgcggaagaaggtttccatgacgatctcgttatggcgctggtttgctttgcatggctaacaacacaaatgaaattcgcagaattttgcgagaaagacgatttgcgtttggcaaatgaggtattcgcacgtgagcgcgaactgctttatgaagatatgttatgtcctgttatcgtaacgagtggcgacgaaacaatatctgtcggccaacacggtatttcgtttatataaatttagaggaaacttaataatggctttaatctctccaggcattgaaactaaagaaacatcggtacaatctaccgttgttcgaaattcaactggtcgtgctgctattgttggtaaattttcatgggggccagcttaccagattcgccagatttctaacgaagtcgaactggtaaattattttggctccccagacaatgacaccgctgattatttcatgaactctgtaaactttttacagttcggtcaggatctgcgcgttgttcgtgtcgtcgataaagaagccgcaaaaaacgcaaccgcgatctataaccagatcaaatccacaatcaccgctgctggttctaactatgcagtagacgatcagatcaaggtaaaacacaataacgtcgttattgaagaaaacggcgtagtaactagcgttgacgatcagggtaaaatcctgtctgtgttcattcctagcaccaagatcatcgaacatgctaaacaggttggtgcatatccggatctgtctagtggctggactacagaaatcgtttccagttcttctggtgtttctgctacgattacaatcgacggcgtagaagttgatccgggtattactctgctcaaccttgacaccgcaaaagaaactattcaggcaactgctttccaggaactttgcaccaaatatcagctaccgtctgttattgcaatttatcctggcgaaatgggtagcaccgtaacggttgaaattctgtctaaagctgcatacgattcttctgctgttattaagtcttatccttctggtaagtctggtaaaaacagcggtcgcagttcgatgaactttggccctcagaatgataaccaatacgcgtttatcgttcgccgtggtggtattatccaagaaacgtttatcgtgtcaaccgctaagggtgataaagatatctacggttcaacgatctacatggatgatttctttgcaaacggtggttctcagtatctgtatggtacttccctaaactggcctgtcggattctccggcgttctggaattgggtggcggtacttcttcgaactctactgtaggcgcggatgaactcatggctggctgggatatgttcgcagatcgtgaatctctgcatgttcctctgctgattgcgggtgcttgtgctggcgaaactgccgaaatttcgtctactgtacagaaacacgctgtgtctatcggtgaaacccgttcagattgcgttgtgttcgtttctccgccgcgttctgctctggttaatatcccactggctcaggccgttgataacctcgtagaatggcgtacaggctacaaaatcggtaatactaccccagttgataacaacatgaacgtaagttctagttatgcgtttatcgatggtaactataagttccagtacgataaatacaacgatgttaaccgttggatcccgctcgcgggtgatatggctggcctctgtgtttataccgatcaggtagcgcaaccgtggatgtctccggctggctacaaccgtggtcaactgcgtaactgcatcaaactggctatcgaaccgactaacgcgcatcgcgattctatgtaccaggtacagattaacgcggttactggtttctctggtggtgctggatacattctgtacggtgataaaaccgcaacgactgttccaagcccgtttgaccgtatcaacgttcgtcgcttgttcaacatgatcaagaaagacatcggcgataacgcgaaatataaactgttcgagaataacgatgatttcactcgttcttccttccgtatggatgcaggacagtatatgtctaacgttcgcgctctgggcggtgtatacgattaccgtgtggtttgtgacactacgaacaacacgccggatgttattgatcgcaatgagtttattgcatcaatctacgtcaaaccagcacgttctatcaactacatcacactgaacttcgtagcaacctcaactggtgcggatttcgatgagttgattggctcaacgtcagtataacatgcaaggggctgaaaagcccctataaatacacatagaggttagaaaatgcttactgatattgtacgcgcctttgaatccggtgatttcgcacgtccgaacctgttcgaagtagagatcccgtatctgggcaaaaactttaaattaaaatgtaaagccgctactatgccagcgtctaccgttgaaaaagttccggtaggttacatgaaccgcaaaattaacgttgctggtgaccgtacctatgatgactggacaatcacggtatataacgacgatgcacacacaacccgtgatgcaatcgtagcatggtcaaacatgctgcatggtatgggtgaagacattacaggggatatccctgcaaactacaaaaaaaccgctacggttaaacagaaaaaccgtaacgacgaagtaaccgccgaacataccatttatggcctgttcccgaccaacgttggtgaggttactttagactgggatagcaacaacgaagtgagcactttcgagtgtactttcgcgctagactggtgggtttaaacgctataaatacaggggtagcaataccccttatcattatttttcggagttgtaaatgaacttttttggattagacaatgtgttagggtttttcaaaaatttcgccaaacaggatgaaatggaatttgaagcccaattaaaagatgatacaggttcgattgcgcctccgaaaaataacgatggggcgcacgaaatcgaaacggacttgtcaaatcagcgttattcttctgtgttccaacagttctattccggacaggatccgcgaattcagaacaaaacacagctaataaatacataccgtggtatcatgacatatccggaagtggaaaacgctgtttctgaaatcattaacgaagcgattgttaatgaacaaggaaaagatattgttacgatggatctttctaaaactacttttagtaagaatatccaagataagatcatggacgaacttgataccgtaatgaatattcacgatttcgataaccgaggctctcgtttattccgtgattggtatgttgattcgcgtatctatttccataaaatcatgcataaaaatgaatctgatggtatcaaagaattacgccagttagatcctcgttgcatggaactgatcagagaatcagttacagaaaccctacccggtggggttaaaattttccgtggctatcgggaatacttcgtatacaccgcaccaaaaaacggttatagctacaacggacagatttatagtcacaacgacaaggtaaaaattcctcgctctgcgattgtttacgctcatagcggccttgaagattgcgacaacaacattataggctacctgcaccgcgcggtcaagccagctaaccagttacgtttgctggaagatgctatggtgatttaccgtattacccgtgcgccggaacgtcgtgtgttctatatcgacgtaggtcagatgggtggccctaaagctacacagtatgtaaataacattgcacagggcttaaaaaaccgtgttgtatatgacgcgagcactggtaaagttaagaatcagcaaaataacctgtcaatgacagaggactattggctgatgcgtcgtgatggtaaagcagttaccgaagtttcaacgcttcctggtggcactgccttctctgatatcgacgatgttaaatggtttaaccgtaagctgtatgaagcgttacgtattccgttaagccgtatgcctcgcgatgatggcggtatccagttgggtaacgatggcggtattacccgcgacgaattgaactttagcaaatttattcgcgaattgcaaattcaattcaaccctgttcttgcggatccgttaaaaactaacttgatcgcgaagaaaatcattacagaagatgaatgggatgaaaacgtaagtaagattgcttttgtatatcagcaagattcttactattccgaaatcaaagatattgagattttggaacgccgtttaaatctgatgggccaacttgaaggggtggtcggcaaatatgtatcccataaatacgtaatgaaagaagttctccggatgtctgatgaggaaattcaaagcgaagccaaacagatagaagaagaatcaaaagaagaacgttttaaaaatccagaagcggaagaggaaaacttttgatgaaagaatttatcgaagcaatcaaaagcggtaatctggtggaagctaaaaaaactttttactccatcatggaagaccgcaaagaagcgcttcgtcacgaattgcgcgttgaacttgccgaagctgtacgcatcgaaggcgaagaagacaaagaaaaagacgacgaaggcgctgataaagatgacgaaaacggcgataaaaagccagccgaggatgataaatccgaaaaagatgatgagtgaggtgtgtaatgcaacttgacatcgaaatcaccgccgaagatctccaggaacatttagacgaagcgaaagcccgtgtagatattctgggtatcgatgaaggcacggttaaaatcatcgaaaatttggcggtcaccgaaccaaatttagcccttgctatgatggcggttgttgaaggtttaacacttgatgaggtaattgtcaagcatgttgattcccgtggcaacgtagaacgcctcaaagacaggaaaacccgtgagcgtaatgcgtatcagactaccggattaaccaaatcccaacgtcgtcagatcgcgcgtcgtgctctcaaaacaaaacgtgctaacccgtcaattgctactcgcgcacaacgtaagcgcaagaaagcattgcgtaaacgtgctgcactggggctataaatatgaatgaatcccaaatcaacgaaaacggcgacatgcttttaatcgaagaatggggtttaccttgcggtgacgtttcagaatctattttagaatctgttggggaatcaaaagacggtaaattgcggatcgaaggtattttccttcaagccgaaaaggttaaccgtaaccgtcgtttgtatcctaaaaacgtacttgaagaagcagttaacgattatattagaactcaagttaacacccgtcaagcattaggtgaaatgaatcaccctccgcgtccgaatgtggatccgcgaaatgcttgcatcctgattgaaaaattatggtggaagggtaacgatgtttggggccgcgctgttgttgttgaaggcgacggtggtgatggtgacaaactggcggcgttgattcgtgctggttgggttcctggtgtttcttcccgtggattaggtaagctctccgattccggcaaaggctacggcgttgtacaaaagggctttaaattagctgtaggcgttgatgtcgtctgggggccaagcgcacctgatgcatatgttaagcctatagtggaaaatcagcaaagcaaaccgcttgttgagaataatagtgctgatgacgcatttcgggcattgtccgagcgtttgaaaggtctataaatacattaaacaaaacaacaggaaaatcaaaaatgcttaaagaacaactgctggcggaagcccagaacctggatactccggtcgagttagacagcattttcgaatcagttgaactttctgatgacgtgaaagcgacattcaccactgtattcgaacaagctgtaaaagctggcgctgcaaaactcgcggaatcccacattacccagatcgctgaacgttccgacgaactggtcgaagctcaggtaactgaacgtgccgctgaaatcgaaactaagctgtacgaagatgctgataaatattttgcgcacatttccgaagaatggctgaaagaaaacaaagaagccgtttcccgtgacatcaaagccgatctgtttgaatccctgatcatgggcctcaaagaagttctggttgaacataacgttgtcattccggaagaacaggttgatgtagtcgccgaactggaagacgaactgactgaaaatcagcaggaagttaaaaccctgtttgaagcgaatcaggaactgaccaaagaaatttcagaaatgaaacgcaatgcagtagtttcagagaaaactaaaggtttgaccgaatctcaggtcgaaaaagtagaatctctgattgaagggctggaatattccgcaaccttcgaaaataaactcagcgcaattgttgaaatggtagcaaccaaagctgaaaaacccgttgacgagtctgtaaatactccgacaacgaaagatgactttgttccggtagtagaaagcgttccggcagagaaatccaagatcaataaatatgtacaagcggcaaaagccctttcttaatttcaaaaggtaagaaacaatgtctaagaaaaacgaattgatggaaaaatggaacgatcttctggagtctcaggaaggcttaccggatatcgctaccaaatccaaaaaacaactgattgctgccattatggaagcacaggaaaaagacgcagaagttgatccggtttaccgcgacgagaaaatcgttgaatccttcggtggtttcctggcagaagctgaaattgctggtgaccacggttacgacgcaaccaaaatcgcttctggtaactcaagcggtgctatcaccaacatcggccctgctgtaatcggtatggttcgccgtgcgattcctaaccttatcgcgttcgatatctgcggtgttcagcctatgactggccctactggtcaggtgttcgctctccgcgcagtgtacggcaaagatccgctggcttccggtgctaaagaagcattccatcctatgttctctccggatagcatgtactccggtcagggcgcggctccgagcaacggctttacagaactggcttccggtactgcaatcgctgatggtgctatcgtgttccacgattacgcagaaactggtcgtgtattcctccagaacgtttctggtgcttctgttaccgtaacaggtgctgataccgctgctctggataaagctgttgaagctgaacaggaaaaaggtactctggctgaaatttcttacggtatggctaccagtgtagcagaactgcaagaacaattcaacggttctactggcaacccgtggaatgaaatgggcttccgtatcgataagcaggttatcgaagcacgtagccgccaactgaaagcacagtactctgtagaactggctcaggatctccgtgctgttcacggtatggacgctgacgccgaactgtctgcaattctggcaaccgaaatcatgctggaaatcaaccgcgaaatcgttgatatgatcaactttaccgcacaggttggtaaaactggtttcactcagaccgttggctctaaagctggtgcgtttgacttccaggatccgattgatgttcgtggcgctcgttgggctggtgaaagctacaaagctctgctgattcagatcgacaaagaagcaaacgaaatcgcacgtcaaactggtcgtggtgctggtaacttcatcatcgcttcccgtaacgttgtttctgctctggctcgtatcgacagcggtatcactccggcaggtcaaggtctccagaagactctgaacgttgacaccactaaagcagtattcgctggtgttctgggtggcgtgtacaaagtatacatcgaccagtatgcacgtggtgattacttcaccgtgggttataaaggcgataacgaaatggatgctggtatctactacgctccgtatgttgcgctgaccccgctgcgtggttctgatccgaagaacttccagccagtaatgggcttcaaaactcgttacggtgtaggtatcaacccgtttgcgaactctcgctctcaggctccgtccgaccgtatcacttctggtatgattaccaaagaaatgttcggtaaaaacgcatacttccgcaaggtttatgtgaaagggctgtaatagccaacttttccaagagggaaccgcaaggttcccttttttattacataaataaagaaaagtttgtcaataacgcaggaacataaaatgagtgaaaaattttacacaattaacaagctggtgcgtcagtcacagctaccgcctggcctgtctaaaaaggttcttgatgaggcaaccggaacagaaacaattaacgtagctaatacccgtccggatctggtatctcttacccgtgcggtaaacaacctgatctacggtgaacttgtagcgattcaggaaactaatttacctaccgcaactctgttcggtgtgcgttatcgtaaccctaaaggcgatatgacgttttccagcgctgctacatattccggtaagtatgcaagccgcgataatatttcaaatggtgcggttggtactgcctacaccaaaggccaagttttcaaacacccgacaagtgatgttgtatacgaagtaactgatagcgtaactctcgcaggtgctgatattgatgaagcgattatggtcgcattattcagcaataaattacgcctggcaagcgaagccgcgccaacaagtcaatatgaaaccagcgaagatattagtacaacttctttcgaaatggatcgttggaatatcaacgttcgttcccgcaaattcaaaactgaaatgaccgtggaacttatgcaggatctggaagcaaaccaattcaacgcagaaaatgtgattgaagatgttttgggtactgttgccagtgaagaagtaaacaaagatatcattcagactctgatcaacgtatcaaatcgttacaacgttgatggtgtggtcacaaatggcattttcgatgctacaaccgcatacactgcaaaggatgctccggctttaggtcgtttcctgtatcaattagtgtgtgaaatggggcaggaaatgaatagaacgacttcatttgaagctacctatgtcctggcctcttctcgcgttgtaggcgttctggctgcgtctggttggatgcatgaaaccgatgaaacccacccgttagcgacagggcgacttaaaaacggttattatgtctatactgacaccaatacaccgtttgattacctgttgactggttgcaagtacgatctgggtgaaatggatcatgttggctctctgttctatacgccatacacagaagctgatcaggcaggttcgatcaagatttctgttgatcctcaatccttacagcctaaagttgctattctgatgcgctacggtttatcggttaacccatataccactgctgcaaacgaaagacttgtgaaaggtgatgactgggtaaacctctcaggtaaatctaagatgagtcagattgtgggtatcaaacttcctaaactgggttgatagtataacccaacggggataatattcaataggtggagtagggaaacttactccatcttttaataattattataattaatgttaaattagatcttgaatttataaatgatttatgataaaatttattaattataattattatagatcaaataatttttgaaatcaagtaaaaataaatttgattttatcaattagatcatgtataattattcttttaataatatattatattagatcaaataaaatttgactacaaattaatatagtatattatagatcaactgggtaaattggtgagtattttatgagtttgaaattagaagatctgcaaaatgaacttgaaaaggatatgctgatagatcccctcaagttgcaatcagaatcagcggatatccctaagatttgggctaaatggcttcgataccattcaaacgcgaagaaaaaattgatccaacttcatgcgaagaaagaagctgatgtgaaggatcgtatgttgtactacaccggaagacatgacaaagaaatgtgcgaagtggtgtatactgggactactgaaatcaaaatcgcgatcgctggggatccgaagattgtagaaaccaacaagctgatccagtattatgatatggtggttgatttcaccagcaaagcactggatatcgtcaaaaacaaaggatactctatcaaaaacatgttagagatccgtaaattagaaagtggtgcataatgtctactgaaaatgaaaaatgtgtagtgtgcaagtgtccggttccttctactggttatgtgactgaatccgggcgcgtgtgtagcactatctgtgctgactacatcgcagaaaaaacaaaaagcggcgagatcaacgaatccgatgatctgaatgaagttcaaatgttgctgtaggagaatcttatgattggatacggtgaaggaattacagatcgtgatgaacgtccggatctgttagaatctgacgaacatcctgatttttaggataggtaaaactatgccataggcatgacaaaccgattatgcgtaatgaatgaggcttgtacggggtggggttctttgcctggatctcatagttccccattacggaggcaaaacgggcgatggaggcaacaaaatcgcgtcctaaatacatgtgtacccgaaaggggcttgataaaagaatgctggatgataggcgtactcttttgcgccgtccgatggagtttaccttcggcggggtgattgataatataccttcgatcaagggcatgtgaatagaatagccagaatagtacagcactggcgttaagcaaatgtacaaaagccccttcctttcggttggggcttctttttagaacttttcttcttctccgctttcgagttcggcctttaattcttcggctcgacctttcagcgcatcgcgcatagaaatatcgtctgacggcgcaacatcaacttcttttacacgatttttgtaatatttttcaagctctttaagaccgtccatagtacggcaagaggcgaccttgctcatgaaatcatcaatagccgcctcataaagtcgaaaatcgttgaaactcttcattttaacctctaaatttcgatttgtttgatcacgtagtcaaacttttcttcattgtaaatgcgtactcgttcgattgcgtgtttcataccatagtttttgtatgaatatttatttttagcatttttggactttgccagcgttgctaagttatcaaccaaatcccaaacagtagcaagagatttagaatcatgtttacgcagtacgcgcccaattgactgtttgactataacagcagatttgcaaggatgtccgaagatgatgtgatgcaggttcttaacagaaatacctgtactcagtacaccaatagaaccgattacgatcagccccttcgttgattccgcgatccgtttcatttcgtttcgctcatcaatccccgtttccccagaaatgtatacaacgttgtcatatacctttttgagttgctcatacagccatttaccatgtttgatctgattgaacatcacaaacacgttttcatctttttcccttgccagtttcaacgccagcttacagatccatgcgttacgcctggtatgtgatgttatatacttgatttcgctttggtaatcggcccccttcattttcttaatctcatcctctttgtatctcatgaagatggtattaattcgaaggttggtaacttgaccttcctgcatcaaccgatttgtatcaactggcttgaagatttgaccaaaagcgccaatgtattgcatcatgtttgctttgccttctttcagagaaccagaaaggccaaacttgaaaatacactgatccattgtattaatgatcttctgtatgctttgtcctgttgatttgtggcattcatccaccatcaaacacatgaactgttgaaaccactcaggaggcattttgacagccgattgccacgtagacacgtagatcaatgcattactgtttttagcagttcctgaacgtattccaagcattgcctcgcgaggtaaaaggcgatagttgacaatatcaccgatcatctgatcaacaagggcggttgttgggacaatgattagtactttgcctgtgtaattttccagacaccaacgagatatcaacccctgaataagagatttacccgctgacgttgggaggttaagcacagcacggcggtttttaatcgcatggaacaccgattgtttttgataccaatacggatcaatctgcttgtttccgtcgtatactgggtgttcttctaaccacttgtcaaaatctggctgggtgatttcttctgtttcgtggatcttaggatccatccagatagaatacccgcgagactccgcgaattttgttacaagataggctaaaccgtagggcagtttcccgttatagtccatcaagtatatgtagccgttccatccaccatatttgtattttgcctggtactgataacctggcggctggaagctgaaatagtcgcgcaattcatagactatgttagcctctgcctgaatctgcacatgactagtgttaaggaatttgacttcgatatccactatgtgtatcctatatacggtttatatgaatatttataggctaaataatgataaacattggagaaatacaatgagtattgattacgaaaaggttgaaggtttcaaagccttagaacaaaaagaagccaaattacagcttgctacctacgcgcaagaaacgtttgatgttaaactgaaccgtcagaagtcattcgaaaatatgcttgctgatcttgaagctgccgtaccagcagaaaagccggaactgttgatcgactcccccgatccggaaattgttacatacgaaggtgaaccatccgttcctgatgttgttccggaaattgccgaccagattgaaattgttcccggcgctctacaagctcctgtaagcgattctgggacggtttctgatgaactggcatggatggaagggtttaccccgtctatcatcatgatgggccgctctgtttcgaatactggcttttatacgtgtccgtattggatttatgattggatgaagcaaaatccggattggtataaggatcctgatagttgtcctcattattccgcacgccaaaccctcaagtcgctggcatggtacatgcatcgtgatggtatggttactgtaagagaaaccagaaacagccagttcgacacgtttaaaaaaaataattttaaaaagtagttgaccttaccctgctattcgagtatatttgtattcgaaggcgggggaatggctctcgcagtgaagaaggaaatacaaaatgaacatgatgaaaaatgcttactacccagttctgtttgtttgggctaatggtgaagttaagaaaatcgtcaattctaaagctccttattacactgttggtgaagcacttcgccacgctgcggaagcaaattatcctgttcatgccgaacctggttatgctcgttggaacggttctaaatgggttgctgatacctgggacaactacgaagaagaaagaatggagtgtgatcctgattacgtatctcgtcaaatggaagctcatatgattgcagatcgtagactggataatgaagctcgcggattctattgattaacaaggggctacggccccttttcttttaggtgaaatatgaacttaaatcacgaatgtttaaaagatttgagcgatggtaacgagattggtaacgttatttttcttgatattgatggtgttctaaataatatgcggtgcatgaaatttggtgaacatatggacatcgaatgcgcacgacacttacgccggatagtgaatcacgctaattgtgatatcgtcatttcctctacgtggagaataggcaacagtacccataatctacgtgaaatattttatccgtggggattatatcgtataatcggaaaaacttgcactaaccttacaggtcgtcaatctgggcgtggtgatgaaatcaaagcatggatcgacaccttcggatgcaagaattatctgatacttgatgatgataccgatatgctaccagaacaaaaagagcatttcataaacactgatgggtatgttgggttaaccgaagaacaatccacgtttgcgatccgaaatatttttggtgttgcaaccccgttctgtcatgaatgtaacgggtacggtcgcataaaccagtatgacaaatgtccttcgtgtgatggaaagattttacgcctataaataccttaaaacataagagggttacaatatggctacaaatgcaactatttctgtcagcaccgaccgttatttcggtcatgatggagatacaataaatctttctcgcgttatcactggattagattcttctgaaactgttgattcccttcaatggactcataatgatactgatattcctggcgcgggcgaaggtctatataatatttcggttactggatctgctgatgctggtacgtatggagttaaggcggtaatcgatgatggttctggaaacaaaaccacgataacatcaccaaatgttactattttatacgtagaacatcctacagttagcgtgaacattgaaccaaatccatatcatgaatggcaaggtgtaaacgtcactgctggggatgatttgaatatgcctagcgagtatggatactacaaatacgaatggtggatcgatggtgttcacgacacggctaatgattctgctgaaaatggtgaacctaaatctattgttgtaaataatccagatccgaacaaaagttatgttctgaaagctgttgttgacacggcgaaatcaaacggtaaacctgttactttcgaaagtgctgcggttaaaccaacgtttaaatcggttgccgacatcacacattctggtatcaccgctgataaagaatcggcgtacaaaggcgatagcgttacgattaccgctgtgtttgaccaattccctagcggagttagtgaactttcccgtacatggcagaaagacggagtgacgatcccaggtgcaacaaatggcgcatatacgttcaccgttaacgatgcttcgagcgtcggtgattttaaagctgttgcgaaagtcggtattgacgctacaaaatccattgatgtagaatcacctgttcagactattgctttcatcaaaacgcctgtgatcgcgattactgctgatgacaatacccctgaaatcggtgatactgttcacttcacgtctaccgtaactggtgctgaaactggacacaccccgcaatcttatcagtggtataaagatggtgctgcactgtccggtaaaacgtccgcaacgctcgatgtcgtcgccgcaactgcaacgctgggtaaatacaccctgaaagttaaagtaggcgtagactctgctacagcgcgtgaatttacatcaaatgagatcactgtatctgaacaggttgatctggttgctaagtggacggttcacccgatcccgtggcgtgataccagtttcaccccgatcggttactgggtactggatgaaattctgtatcagaaagctctgggtaaagactggaaaacggattatgctgattacaaatattcagcagaagttcaaacactgctcaaagcgtttaatgaaaacggagaatgtgaagtacaagattcccgcaacggatacattcacaaaatgagcgaaatttaagaggcgtataatggcaaacgaaaaatggactacggttcacccgatcccgtggcgcgataccagctttacatatctaccttactggcttttcgatattatcgttgaagctaataaaaaaggagaagactggcgcgactattcggaagacaaatataaattggagtttgacactctgaaagatgcattcacccaatatcatgatgtgcatgttatcgaatcccgtaacggacgtctggttagtctgctttctctgactccggttacaatctcggctaaaactccgccaacgtttaaagttggtgatcctgatctggctccttcagctctgttcactttcgatccggctaaatctgctgaaaatgcagttcttactgttgatgattctggacatgcggaagttaccccatttgggtttattcatgcggtcagcgctggtgatgttgttgttactgcaacaattggtgatgtaaccgaagatgtaacattaacagtggcagcggcataaggaaaaatatgaacacacttttatttgatttcgacgacactttagcagaattttctcaggctttttatgataagttcggtgtacgtccggaaggaacgccaaaagaacgatatgacgaaatggcggcttctttggtgcgtactgatttttataaaaaccttcctcgtattcaggccgggatcgacctccttcaatggagtttccaacgccgaatcggtgatcctgctactttgctgcttcgcgcggaagcggtcagccctctttgggttatgaaagaaaaactgaactatacagataagatttgcgctgaactggggatctctcgtctcgattttagtcgcattgactatccggaacagttcgcagaacacgcctatcgtggtgttctgatttcccgcaaccagaaacatcttgaaatctggaacaattctcatctagctaataaagttcctggtattttccttgcggaaaccctggaagaaaacattcagctagtcacggaagcgcttgcaaaggctaatcaataacaagaaagggaaccgcaatggttccctttcttttacaatctttttaattcatcaagcgctgttttcttatcaccaacaaagaggattgctttacctcctgcttttctgaaaggcaacaccgcttttgcccgatcgtcaaacagaattcctttaccagcgaatgctgctttttcatggctacttttaacgtagtggaattctggaacgtaacccaatactttttgcaatgctttacgtttttgttcagcaacaccgtcagaattgaatttaccgacactggttagtattgctacatcgccaagtgttcttaaatgatggaataattcaaatccttctttgattggttccagattttcgtagaaatcagttttggcaatttttgctttgcactttttcaactcatcttctgtcatcatcgagggttcgccatacattggcacaaatgaaccttcccagtcgaacaatacaccatccatatcaaagaaaaacttattcatatcaattcctcagtttgtgtatgcatactataatgtttgatcattaatgtcaaccccaagtttcagttttcggtgcgtatgctgcaactttagccacaatttccttatccagttcagctaccgatttctgaggcttaccacgggctttaactttgatgtagtttgacttaacaacaaacatacctttattgcttgatttcttgatctcgctgtcaacaccaactttgttaaaactgatccaaatgtctccgtccatgtactgtttaagagaatcacccatgttcaggatcttcgccatagtaagggccgcgccttcgtgggtatccatgagaatttctttaggaactacacgatcgcgtttctggttctgctgcatagcaatatgcacatcgttcataacccatacgatatgtacgttttcttttttgtatcccagcgtttcgacatcacgtgcgatgcttgccagcttgctcatgccttttaacgttacgtcaaagatgaggttaggtttacgatcttctggtgctgccataataccggaataaacacggttttggtttttgttggaaatgttgaaaacgtcggcgatcacatgatggagggtagatacgttttctgggtttttgaggttcattgttttgacatcatgacccgtctgtttcttgatctctgctgcgagtttatcgctacccattacaagttttttcagggcgtcaacgtccagggtaataccttcgatgcctagcagtttttccagtgtgaaccctttaccggaaccagcaccgccagccagaataacaacctgaccgaacttaggataagcacggcctccgaaggtgatcagcgcttcggttaaggtgctttctgtgaattgtttaaatgacttcatgtaaaattctccagtttattttctattatttattgacatgttttctaacagtggtgtatggttatggtgttcgacggataggccggaagaactttaaaccataaggtatacgatatgaaaatcaatttacatcgcttcattgcagaattttcccgcgatcgcgatatggactctttcaactattactcccgtgagattgaagatcgttttgcggctcatgttggattccgtcgccaccatacccctaaaatgcgtcctgatcacgatccgaagtatagccctattatatggcaagctccgatcgatggttacgttgaagggatccggatcatgacgtttaacgcaatgtatggaaacgctttgatccatatcgcacgtgagaaaaaggcagaattccctaacggctggcgtattgatgaagtgattcaaaatcttatgcagttacgacgtgaatacaaagcgggtatgtgtctgcgtaatgaacagtatccgatgtataaaacgtatgcctatatctctaagcatctaattaattctatgttttacatcgttggtaatcatggttccgctatagatatcggttcttatgaaatagtggcttatgctcgcgaacaaggaaaggccgctgcactgaaaatcattgaatctggtgctatcattcttaaccaccgcattgatactattgcttactatggtgatcaggtcgaggttgaaggcgtacaccatgaacgattcaacaaagccgtatttactaaaaatggctatgcgtatggtaatgaaattataacttctgcggttcctctcgttcgtctaactgttgaagggtttggagaaaggatgtcttataaaccgtcagaagctcaaatgtgtgcggctgctgaaagaatcgccaaaaagcggaaaatgtataccgatgaatacctgacgtatgtcaataagacaaaagaagatgtagaccgagaaatttcttgcatggatttatccctttgatataatgtaagcatctttttaagggaggatacatgaaaacgatacattgcagaaacgaaaacgttgtttattatcacggttcttgtactgctgctggtattgaaagcatgttattacctccctgtgattctgatactctgtctgaaaaaggcagaaagaaaaatttagaccgtgttttctttaccgctgatatcgggttagctcgtatatatgctggaagggccgcgcgttctataggtggggatcctgttctgtacagggttgtgtgtccggttgatgttgtatgcatgaacgaaggcaaaggcgcgagcgtttaccatgcagcatgggcgttttgtgaggaattatgaatgataaagtgttggcgtatctcgttttcttgctgggatatcgcttagaagtgatgggcgcgtattcatcaatgtatggtgatttaacggctatctggatggtcgggttaggggttgcttttacattcctttcctttgcaattgttaatgaatcggaaaaggatattgtatgaaactatatcatgtgatctactctggtgttttaggcattgacaaacaaatgttagttgatgtaatgtgtaaaaaactcgatgaacgaattggaacccgatacaaaaatcatgtatcggaaagtattttcatcaacgttgaccatccaaacgacatggaagaaatggtcaatactcttgatgatcagcagatcccgtttgttgacaatttcaacatgagcgctggagtgtatacggtagtaacttttgttctaaaaaatgttgacagccgaaacgatagcgtgttgaatgtagttgcaaaaatcgattctaccaaaggaaaataatatgaaaattgtacaccgtagcatttccgaactgtctcaagccgaaaaagtgcaaattcatttcaaattcaatgatttgcgtaaaggttatgccgaaattgcccgtgaacatgggttagataacggcgatatttaccaggtagtacaggaaattgaacgtattcgcgcgttccgttctgcaaatctccctgttaaaaatgcaatgcgccgcgaagcgatcgaaattcatcgtaagcgtgtgtacaatttagaacgtgctaaacgtccgatgaagaaagaaaagaaacctcgcccgtttaaacgcgaacatcttaacacctctatggcgctggcgtttcaagatgcggggattatctaatgcgtaaatctgcgatggatcgttgggctagtattgctacttcaaacgtaaaaccaaatcaagccgcacctgatgtagaagaggttcgtaaagcaaaagaacctgagatcgtggcccttagccctgaactcatcgagcatcgccgccgtgcgtctgctattgaattggatctgcgtattgcgcgttcatacaatctcaagcatgaacacgccgcaaagaacaaccattcttttgaccttactctggaagattggaaagtattgatgacaactgaacgttgtcagtattccggcaagatgtttagcaataaaccaggtagcccgtatgcccgtacaatggaacgtattaatccacgtctgggatatacacaagaaaatacaatagcggttatcaacgccgctaatgccgaaaaatcacagcttgatgcattcgttaagggtgatgtcattctggatgaagtaaaagtgaagttgctgcgtaaagcactttatcaagtcgaaaaacgtgtgaaaatgaaaggttaaattatgtttacaaaatattcttctctgactaaccattatgaaggtaagttcatcaatggtgtaattatgaacgggcttactggcggtgtgtgggttgcgcgtgaaaagatccacggtgctaactttagctttatcactgatgacggtgttaccgttacccctgcaaagcgtactgatgttgttaagccagccgaagatttttatggatgttcagcagtagttgcaaagtattcccctgggatccgtaagatgtgggaaaccctcaaaaagaccggaacttatgatgatttggttattcaagtctacggtgaatttgcggggcgcggtgtacagaaagatgttgattacggcgaaaaagatttctacgtattcgatatccgtgtaaatggtgaattccttccggataatctgtgctctctgatctctcgatctcatggccttaaaatggccccgttgttgggatatgggacttttgaagagatcaaagaactgcctctcacgtttgaatcggttgtgaataaagcaaatagcggtattggtagcgatgacacggtctacggtgaattcatttatcctatctcggaagttgaagaggggaacattgcagaggggttcgtaatgaaacctgttctaccttctttcatgccaaacggtgaacgtgttgcaatcaaatgcaaaacaaccaaattcactgagaagaaagctaagaaagcaacccgctttaatgctccggtttcactgtcagaaaaagacaaaaaccaactcgatgagtttgtttgttaccttacagagaaccgtgtgaaaaacgttctttcgaaactggatctggcttcgatcactgcgaaagatttcggtcgcattatgggcttaacggttcaggatgctatcgaagaaatcagccgtaatcatgggcctttcctcgaacagttcgaagacccagcaatggctaaaaagctgtttgtaaccgaagcccaaaacatgattcgccctgtatggggcaaaatcctgaaccatgaattttaaactatgaacagtcacggaaactatagaactatttctgatgaaatagaaggaataaaagaactccttcaatacgtttccgttgatgttgtctctgggagtatttcgtggacttctccgcgtaaaggtagaagtattggtgatcctgtcggtactatgaaagacggttattgtgttattaaattccagaagaaatattatcgcagacatagaattgtcttctatgttgcaaatggatatcttccttctgttgttgatcacaagaacggtatagaatttggtgatggtatcgacaacttgcaagaggcaactcaacaggacaatgtaagaaaacagacaaagaaacgaaatagtgcttctggaaaacgaggtgttatttttgacaaaagaagaaacaattatcaagctagaatcgttgtcgatggtaaacagatttttctaggttcgtatgataccccagaaaaggctagtgaggtttacaacgaaaaagcaaaggaattgtttggtgaattttatgtcgaatgatttctgtaatgtaataaagactgccacaactgcaacgttaattggcagtcgtaaacctcctgaacgtatcgcaaacattgctgttaaaatcggacgtgctttgaacgaacgcgggattagggcttattctggcggcgctcctggtatggatagtcactttctgtttgactatagtccggataacaggtgtataatccttcctgagaacggttttaacggccttttctcaaacggaaaggatatcatcgactttcgagatttaaacacacagaaagccgctgatgaagccagaaaggtagcaggtaacttcgatacacagaatgaatacgttcaaagaaggtatgcgcgaaacacgattcaagttcttcgtgaaaatcttgacaatccaactgattttgttttattttgggcggaagaacgtgaaggatgtgttaaaggtggaaccgcgattgctgtaagattggctaggttgtacagggttccatgtttcaatctcttcaaagaaagtgtattgaacgatgtgtgtgatacgttagggatcaatataaaacccccaacgttggattttttatggtaattgaaaatgcgcccttacttcgcgaaacatacgaaagatgggctgttaataacgtaataggtgaaaatatggttcatgtacgtagtatcggtactgacggcgaaactccggtagaaggccgatctcccactctcgcagaacgagcaagagaaattatcaacgatcagaatgctaagatgatcgaacatgcgcgggatacaatcacaaaaggtgttctgaaacacgcgacacaacaaagccttatctatgatatgaagcacgatatcggctcttgtctgggtattgaatgtactcgctatgcattccaacgggtttctgaatggttggaagaagaagggctaacattcgatacagaagaaaaacgcaacgccgcgaagatcactaattctctggctagtaagtacaatcaaacgtatcgaaaccaggaagaacgtgaagtgttcggtttcaaaattcctgaaaggaaaacagatcgccgtgtaagtgaattcactttttacattagttggtaaaaagatgttgacgggggttggttatagtagtattctaactcccgtagacaagacactaactcagaaggataaacatcatggaaatcgtaatgaaagcaacttatgctggatattgcctggaagcaaaaggtgttgctaacaatggcaaaggcttacgggccaatgttgaagcaatgctggatgaattacatgcaatgtacgaatatgacaacgtagctggtagcgttcttatccaggcgttggaagttgatggtgttgattgtgctggttggtgggatgcttacattgactacaacgataaccgggtttacctgttgagcaacaaagattatttctaaggaaccactatgagcgatgaagctgaggctttagaagattgggctgattttgatgacgaagaagacggggaatatttctgcgttaaccgtggtgcttataaagaccgtttagaactccgtaaacttttatccggttcctctcaaatatcaggatccaaacgaaaaagtagtaaacaaaaagttcagtatagtgatggttctgtacgtgatgaaactgttgttgctgaattccgtggtcgggttatcacaaaagaacgacaaattgatgtaaagaacttgtatgaagtggctaaggctgctaaaataggttctgtgattgtttgtcctgtgtgcaaagaaaaacacacaaagacaacgtatcacaaagttttctgttcgaatggcagaaaaaccagtaaggattgtaagtctaaatatcacaatacaatccatcccgaacgactggatcgggtaatttaaaataaacttaaaacgtggagtacgtttatgaacaacaaaactttcgaagaactgaacagcattatcacttccgtagattcctataaggtttctcactggtcgcaatatccaactggctccgaagaggcgctgttttatattgaatctcgtggtggtaaatttgatcaagtagttacggctggctgtaaccgccttgcgcaaatcctatcacgtccggtgactatggaaaacgtagattttgctaatcggttgtacaaaatgcactttgggcgcgaaatcttcaactacaaaggttggaaagaaattgcagaactgggttacatccctcttgaattcagagcgattccggaaggaaccccagtagcggttaaaaatccggttgcaactttccatgctgggaaaaatgcgctgtggttagcaggacacgtagaaaccctggcgatcaggggagtatggttcccttcaaccgtagcaactctatcccgcgaatgtaaaaaagtgttgaagaaatatctcaagaaaacctccgatctcgaaggtgaagcatttgatatggtattacgtacccgtttgcatgacttcggcgcacgtggaacctcttctgctgaatctgctggtattggtggcctcgctcacctgtataacttcctcggtactgataccgtagaagcgctgattatggctatctctctgtttgaagattgtcagaaagcgtttgatgatggtgaaatggcggctggtatttcaattcctgctcgcgaacattccactaccgtttcttacggcaaagaaaacgaagaccttgcatacaaaaacagtattgagatcttcggtgaagggatgtatgcatgtgtgtatgattcctgggattttaaagcggcggttcgccgtatcgcagaatataaagattctattctttctaagggcggtactctggtagttcgtccggattctggtgatatggtagacaatatcatgtacgctcttgaagaactgggccgtatctttggctatacagtgaactcaaaagggtataaagtactacacccagcagtaaggatcattcaaggcgatgaaattcatggccctgaaacaatcaatcgggtgttgaactggatggagtctaaccgttgggcgtctgaaaacatcgcgtttggtatgggcggcggattgcttcaagaagttacccgcgacactcaaaaatatgcgatgaaaatgtgcgcaatcaaaattaacggtgtgtggactggtgtgtataaatgtccaaaaggcgctgaatggaaaaagagtaaaaaagggttgttgatgactatcactgatggtgttaactttaaaaccattgatactctggaacagaaagtgccggaaggctggaaagatgctatgatcacatactatgtcaacggaaagattactgcccgtgacactttagaggaaattaggaaccgtgccgggatttagtatccgcaaaaacgacaaaggaaccgtgattttctatgacaacatgccccttgtagctcgcaaggggctttttgctaaaatcgctgggtattcctttaaactggaagaagtcaacgacgaaacactaaaagagatcgtaagaattgccttacagttaagaggtaagaaagacgaacaaagagctattgacatgatcaataaattgggtgaaactcaatgcttcatagtgaatcgtggttacaagtacgataccattgcaaaatttgaaaaagggctttgtgaattatgagttattatggtgtgatcccatacacaggaaacaagcaaaagctacttcctgaactattcaaattatttccagacagaaacagctatatgcgattcattgactgtttttgtggtggtttgagtgtgtcactaaacgtccctaaacccgttctaagcaacgattacgatcggacgttgattgatatgtataagcgccttcaaatgcttcctgacctctctccggtgcgagaattgattaaacaacatgggttgggtaagaacgagaaagaagcgtatctcacatttcgtgatgcatataataagaacaaggatcctctatggctctacgttctgatcctgcattcgtttagtaatgttaatcgaaccaacgataaaggcgattttaacgccaattttggttgtagaacgttgaatgattctaccgttaaacggtttgaacacttcaaaaacaatgttcggggaattgaattctctagcgcatcatttaaggatcttgatatctgcttgaatgattttgtgtactgcgatccgccgtacctgatcactgatgcagtttataacaaattctggaacgaagaacgcgagcatgaattatatgattttctcgataatttaaactctaatggtatcaagtttggtttatcaaacgtgacacatcatgcaggaaagcaaaatgatatcctgatcgagtggatgcaaaaatataatgtgcataacctcgataaaaagtatctgttaggccagcatactgattcttacgaacaaaataaaacgcaagaagtctacgtgtgcaactaccagaaacgcgacgtaaatacataccctgaaacactggatgacttaatgtaaggtaacatatgtttaagatttttggttatatcccttctgtttacaattgcgctccatgcctgaattctaaacgtctcctggacgcaaaacgaaaagaatatgagtttgtttctgtagccgatgaaaaagacgcagacggcaaaccgatcctgaatgaaacggtcatttctgaactcgaaagcctgttgggtactcgtagactgaccatgcctcaaattttccacgatggtaagcacatcggcggctttgaccaactgcgtgagtacgttcgcacgttgggataaatattaacacctttatttgattggtgttattatgctcactaaacgtattactaagaaagattatccatccattaaacaagctctttttgaacagcaaaacggcttgtgcgcgttatgtggtcgccctttagagggtgaccttgaaaaacatcaccttgaccatgatcatgctctatctggctctaatgccggacgtgtgcgcggcctcctatgtaacctatgcaacggtacagagggtattgtaaagcacaaattcaatcgttctggtctggtttcccgtgatgttgattacatcgaatggctagaaagcctggtagcatacctcaaacgcgactattcacaaaaccgtatgcacgacaaatttatacccgataaggttaaatggtttacacgcctgactaaatcggatatgatagccgaaatgatttctatgggctttgagtactcagaaactgaggatcgcaaggctttagcaaagagctatagaagacaattaatgaaggcaaccaaatgaaagtagaaaaacgcgacggaacaatcgtcgatttcgataaagaaaaaattcgtaatgctgtgtataaagctggcggtacgatgacggatgctgactccgcgatcatgcaggtacagtacagccaaatccgcgatttttgtccaatgaagatttcgcaaattcaagaacttgttgaagaatctttgatgaagacaaatccgactgttgcccgtgcatatatcgaatatcgtcatgatcgtgatatcgcccgtgaacaaaacggaaaattattccgtgatatcaagggtttgatgactcttagtaacaaagaattaaccaacgaaaacgcaaacaaagattctcgcgtattcccgactaaacgcgatcttctggctggtatcgtttctaaacatatggcgcgtaaccatattctaccgaaacatattgttgcggcgcacgattccggtgatattcattatcacgatctggattacagcccgttcaccccatacactaactgctgtcttgttgacctgaaaggcatgttagaaaacgggttccggatgggtaacgctgatatcgaaccgcccaaatcaatcggtgttgctactgctcttatggctcagatcaccgcacagattgcttctcaccagtacggcgggacaacctttgcaaatgtcgatcaggtgctggccccttatgtagaaaagacctttgctaaacatgttaaagatgcacgcaaatatcaagtagctttagtaaaagattatgctatctctaaaacagaaaaagatgtatttgatgctttccaatcatacgaatatgaagtaaacaccttacatactgctaacggacaaaccccattcgttacgattacttttggtatgggtacgagtgattttgaacgcatgatccagaaagcaattctaaaaaaccgtattcgcggcctgggtaaagagggcattactcctgtattcccaaaactggttatgtttatggaaaaagggattaaccttaatccggaagacagaaactatgatattaagaaattggccctggaatgtgcttcaaagcgtatgtatccggatattattagcgcggctaataaccgtcgtattactggctctagcattcctgtatctcctatgggttgtcgtagtttccttagcgtgtggaatgatgagcacggtaatgaaattcttgatggacgtaataacctgggcgttgtgacaatcaatcttcctcgtattgcgattgaagccgaagcacaggaagatgaagacgcgcatgatgcattttggcgtatccttgatgaacgtctggaactgtgttttgaagccctgatgacccgtattgatagtctcagaggtgttaaagccagtgtagccccgatcctttatacagaaggtgcgtttggtgtacggttgaaacctgatgatgaaattctggaactgttcaaaaatggacgcagttctatcagtctgggatacatcggattgcatgaaactctgatgcttttcggatctggacagcacccattcgaccggatcggttctcagaacatgggtagactgattctggaatatctacgcgctgcgaccgaagcatggaaaaagaaaaccggatttgggtttagtctgtactcaacccctgctgaatctctatgtcatcgtttctgcaaactggactatgagaaattcggaagtatcaaagggatcacagataaaggctggtacactaacagttttcatttggacgttgaccgcaaggtaacaccgttcgagaaaatcgactatgaagccgattatcattacattgcaactgctggacatatcagctatgtagaattccctgatatgaaaaacaacctggaagcccttgaaaaagtctgggattatgcaatggataaactggactacttcggaactaaccttccggttgataaatgctttgaatgtggatcggatgatgaatttaagccaacggaagaaggttttcattgtacccattgtgggaaccatgatccggaaaaaatgagcgtcacgcgccgtacatgcggctatttgggtgctcctgctgtccgtgggttcaacgaaggtaagaacaaagaaatgatgcatcgcattaagcatcaaaattaatcaaaaagcccttgacttcggttgagggcttttgttatattgggcctatcgaaaaaggagacatactatgaaactgactaagaaaatgaccgatgtagtggcatgtgcgtttgcattaggctacaaagttgaaaatcatccaactcgcgttgaagtcatcaacccgatcaagggccgtcctgggttggtgctatgcgaagatggtacagcatatcgtaatgatgtctctttagaactggcaactactatccgcaccgcaaaacaaatgaaagatgttctcattagcggcgcaaaattgagggctttatgatgtattggacaaaagataaatttgtttttcgtgataatacgtgctttgggactgcataccgaaacttagctattcgtggcggatcgttatcagctaatgatttatctaaagtagtatttcctattaaagttacggagtgtgacttattaggtgttaaaggatttactgattactttggtacaaagtgggaatcagaatcttacatttttactaataccgatcgtgaattattcaaaaagcacgttgttgttaaagagaaaccgttattaccaaaagaagatgaagcaaaggaaatctatgatctcctgaacatgcttgataatctcggtacttgtcatctgttcggtaaacgcgcccgtaaagcgaaagatgttctcaacctgttacgctctcgccggaattatctgatccgggaagcggaacgcaatctgaaaaattcagaaaaacaggctgaaattcataaaactacccttgctaaactaaaggctttgtgatgtttccgttatacgctaaagtgcgtcgaaatgtcggtgattcatatcaggaatggagtgaatggctacgcgaaacgaagtcattctacatttcaaaagcaactgatatgaaaggccgtaacattcgctatcgtaaacccagtggtaaacgagtgaacgggatagattacattgttcttgattcgattcgggatgatataaaatgatgagcaagatccttgataagttatttccttcccgtgttgttgaacgcgcgaagagacaaaatcgttttcagaacgctattgactatctcgaagaaattcgatttcagaaattccttgaagataaaaagatgcgtgaagatgagaagcacccaaattctaaaatggctgatggcgtaacaaaatgcgcggttggtcggacgtggaaacgaaaagactacaaggatcttgtttctgctataccacgcggaagcctggaagattactcaaaagcaacgggcagatcttataccggatgccttaacagactctgtatgattggtgttgttaagagaatgactcctacgtataatcatgtttatatggctatcgtaaagaaaagaaggttgcaattctatgcagcatctggggaatctatcaatctgattgatgatttaattgaagttgggtatgtagacgacgggaaaattttaaaagctcctgattatctacgcggtaaactattgaaataggtataaattatgatttttaacaaaacaaattcacgtaatttgaactatctacgctgtgaactggaagctaacgaaattgaactgtttttctgtggggctacagatccggaacacaaattgcattgggtatcaggtgagattgtaagcctaaccgatcagattgtcgaagaggctacccgccgcgatgcaatcgttaaaattggtgctgttgatgtgaactacgaaggacatccttcatttttcattcaatattatccataaaagtattgacctgtatgtctgaatgtagtaacatccttcttgtcaactaaggaggatgttatgaaaatcaaaaacactgctactgaaactctttgcaacgaaattgcagaaatgtactggagtaaaggtcacttagaggctatgaaagagtttcaaaagtggtgtgatgcccaaaagttagctaaatgggaatacatcgttattgttgaacggatcaaagaactgatccttgtgaagaaaggtaacatgaaatgattcaactgaaattagacacaaatgcggtgttaagcctgtttccggaaggttcaaccgctcgcgtagatctccaatctgctatcatcaaaaacgtggtgaatagcgtagttggtaagcgtgttagcgaagaaatcaacaaacggatccaggaacagttagctgttctaatgccgaactcatccgaaattacacagacaatcaaatctgaattctcggattacgtcgaaaaacgttatgggtatgctaatgttttcgatgtcaactatggcaatgttcgcgaactgtctggtaaaatcaaagaatcggtaaaacagcaatgtcaaaccattcttaaagatatcgagaaagaggcgattgctcatgcaacagaaaacattattgcagacgaagccgcgtttatcgctcgcgtctcgaataaccttgaagttactgtacgcaaagcaataatgcaacgggttaacactcagttcccagacattattgacgatgcgatcagagaacgtctgtttggtgaaaaagcatgaattacgaccgcatctataacatggatgtggtcaacggaaaagggatccgtgttgttttgtttgtgactggatgcaatcataaatgcgaaggttgttataacaaatcgacgtggaacccttgcaacggaacaccgtacacggaagagacagaaaaccatctgatttctctgttgagtaatccgcatgttgatggacttacattaactggcggcgatccgctttaccgtgacaactatcctactatcctaaaactgcttgagcgcgtttctaaggaacttccaacgaaaaacgtatggttgtggacaggatataccctggaggctttacaggccgacccagaacgttctaagctacttccttacattgatgttctgattgatggtaagtatgaaaaagatttaccaactaaaaagccttttcgcggctcagataatcaacgtatgatcgaattcgctaaaaattcgatagaaattaaaaatattgcttgacctaatgtgtaactatggtaatcttaccacatcgtaaatgacgattaactttaattgagagataatatcatgatcctgaatttcaaaacccgtaaagaagcgcgtagctactgctggaagtggaacattcccctgaaaaccatccgtaatacagggcgcggttcttgcccgtggacagttcaagcaaacgaactgaaaacgttcgtggttggtaaaacttacaaactggttgaccgtgaagggtttactaccaattcacatggcggatctaacaccgcaaacactatccaggcgacacagatcgaaaaattcctgaataacgaggtaaaaattatctcgaaaaccaattcagatactttcaaaattgagcatactccggaaatgacttttagctctctgcgttcgtgggaagctcgttattttgtcgaagttggcgctgctccggttaagaaaacgaaagctaaaccgaaaaaatccaacgttacggctccggtcgcacctgttgcgcctgtaaccgcagatcttgatcaaatgcttgacggtggttcggcgatgtcggttgaactggatccgactaaatttgttgaaggccgttcgtatgttctggtgaaaccgcagcaatttaaaaatcgttgtggtgctaaccacgggatcaaatcatatactgatgaacatagtaatggcgtatacaccgtttaccatacgacttcgctcggtcatcatcaattgagcaaaacggtagataccattgattccccgaccggaaacgttggttactatctggttgattctgaacgttcgttcttccgtgaactggcgaccgggactgttgatgaacctgttagcgtttccgctaatggcgctatctcgatcaacgtagacgaagcggctaagaaagaagaaatcgcaaaagcaatggcacagcttgaagaagcggttaaagcccatgatgacgcgcttcaaaatctgcgtactgcttccgacctggttcgcaaagctgctcgaaaagtagcagaagtaagcaagtaaattaaactgggtgctccggcacccttttttatgaggtgacacatggaattattagcaggtaaatcttacacactgaacatcgacgctaaagaatttgcagaaaaaacctggagaaatgctttagctgaattgatcaaaaataacggctatatcacaatcgatcgtactgcgattggggaaactgaggacattgcttatgttctgcaagatgattttgaatacgagatccctagtcatctatggaaatatttcaaaccatattatttgccagaagaagaaccacggatcgcgacgaaagaagaagccgccgcgcctgttttaaattttatatattccgatcctaaaatgtggatgactgctaaacctgttcaacaagatatcaatgatctgcgatttgattatccttttgtcaagcggattacttcaatttctgtactaccagcgccgactgattcacaggcacttgaatttgcattacagcatgttttcggtgataataagctgtacgcgattgacaaggaagctgctattgatgaacagaaaaaggaaatcatcaaccttctttctctgcatcaacaacttgaagcggtggaattgattgagcgtatgctttctgatacaaagaaagaaatcattagcaaaatcaccccggcacgaaggaaagcaattgatgaaaatcgagatttacggtattcccgaatcgcttcataaatgttacggttgtattgaagctcggaaattacttgatgagcatggattagagtacgaattttattctgttctaaagccagcaaataacagcgtggggtttgattacgatcggccccgcattgaagagttagcgaaacgtgttcgtagtcgaaacatggcatttacttaccctcggatctttgtagatggtaattttattggcggttatatgcaattgaaagagtatttgggtgaagcatgaataaagaatacattcgcaaagtagcaaacgctatccacgcaacaacgattgattttctggaagggtttgatcatattatccatcccgaaacgttggatagttgggaagccaaactgtttaaaagcatcaatgaacagtttccggaaaaagttaaacgctggtttgtcagacaggaaatcgtagcaacgatccttaatgagcgtggtgttgaggcgttcggtgtaacccctctatataaacgaaaccagattacagacgaaacaatcaagaaatataaaaagatggttcggaagtaataaataatcagttaaatggccttcgggccattttttgtatataaatattggtattgaatacaatataggaaaaaagataatggtagctaaatcattccgcgcacgaagtggccttgatgctgctggtgaaaaagttatcaacgttgggaaggctgatcgtaatacgctgagtgacggcgttaacgttgactttttcaatgaatttaacggaatccagcagtatgacccgacccgtggttattctcaagacatggcgatcatttatgcgcgtcgtatctggtacgcaaaacagaatattgcttcccctgctggggctttcgacgaatccaaatggatcgcaactcgtaatgacccgaaatgggtttatagtaacgtaaccactccggacggtagtattatcgattctggtagttacattatggctgatgggcgttttaccgaacttctgtacctgctgccggacaacccgacagaaggcgacgtgatcacgtttaaagattgcggtggtttggttggtgtaaacagtatcctcgttaagtctaacactcgtcagatccgtttacgtgcggtacaatcagcgcaatatagattaactcatccttacatgatcgcaacgtttatctataacggtaacgtgtggcgtgtttctgaggcgctggataaccgtgattctgaaatagtaaatgcaaccggaacaggttcattccagttacaatctggcatgacagttttccgtaatagcgctacaggtaaaatcactctccagttaccaaaatatgcaaacgacggtgatgtgatcacaacctacgacgctgataaaatgaactctatcaacgtagccgttttgcagatatatccgggtagcggacacactatttctgatggtgcaagtactggtgttacttcggtaactagccagaaatccggctttggcatgttcatctttgatgcacagaatagccaatggaaagtatacgatgcggataaccgtgttcgtctacgtcgtatctatagtgatttaaacgcagttccaaatgattatgtttttgttactgcaaacccttctggggctgtaccaaacgttactgttactctcccaactgatgttgctgatggtgaccgtgtttacgtatccctgtatatgatgggtaaaaaccagaactgtacaatcaaagttaaagatggtactacggataagatccgaaccaataaaaacatgatgcagttcccgcagcgcaaagattatccgcccgatgattggtttagcgtaacgtctcttgcttttaacgcaggtagcgattacctcccttatatcgagttttcttacctgaaagctacgaaagaatgggttgttgctaactatcgtccgattgttgaacgcgttgatgcaacaaaccgtactcgtactggtgttattgctctggctgctcaggcagaagttaacaaaaacctggaagataacccgaacgacgaaacggctattactccgatgacgttagcaaataaaacagctactgaaacgcgtcgtggtattgcgagactggcaactactgccgaagttaacaaactatctacagatacctatctggatgatgtgattgttactcctaagaagctgaacgaaagaacagctactgaaacgcgtcgtggtttggctgagattgcaacccagtcagaaacaaacggaagtaccgatgacattacgatcgtgactcctaaaaagctgcataatcgtatcgcatcaccaacattaacggggatccttgctcttgttgcaactggtggtactgcaaacaccaacacagaccgtgctcaggctggtactggaatttacgatcactcagattatcaaaaggcggtaacgcctaaaacactgcgtgaatataaagcaactgaattacaatccggtgctgtatggctggcaaacctgaatgaagttattaacggtactgttgcaagttctaacattccgaccgtcgttactccggaaatgttacacaagaaaacttctactgatgcgcgtattggtttgatcgagatcgcgactcaggcagaaaccaacgcagggactgattacacgcgagcggtaacgcctaaaacgcttaatgatcgtactgctaccgaaggtctaaccgggattattgctattgcaaccactgccgaagtatcagcaggtactgtaacgaataaagcgatcgtaccgtctaaattgaaaggttatctggacgatacaagtcatattactgttgctactgctgacgggttaactcaatctggtactatctggactacggttaacatcggtattcaatcagcaactgaaactcaacgtggtactttacgcgttgctacgcagtctgagacgaacgcagggacattagatacagtatttgtcacccctaagaagttacacgctaagaaagcgactgagagcgcagaaggtatcattcaggtggctacggctgctgaaactaccgctggcaccgttgcaaacaaagctgtttctcctaagaacttgaaaaatacgattcaggttgatacttcatggcaagctaccgatctggtacgtggtacggtgaaactgtctaaaggtgctggtacttggtctggtaatgatgtggctggttctactcttcctgatgatggttacgccgctgtaggtgttgctgtttctccgtatgaattgaacttaacgctgaaacattatctgcctatcggtgctaaagctgttgatgctgataaacttgataatctggattcttctcagtttattcgtcgtgatgttgcacaaactgttaatggtgcgttgaccctgacacaaacaaccactgtacaagctaacatcaactcaactgctgatgcatcttttcgtgtgatgaatgtcaacggtgatttaaacgttggcgacggttcgtcgatgggtaaacttcgtctgaatggtggttcggctaacgactggtctattcaagccagtgctgcttctgggcgtattgcgatgatttcgacgggtaatactagcacagttcatctttctgtgtataatgatactcgcggcgttgtagctaacgttaaatttcaggctcctgaaattcaggcaactagcaaagtgtctttaggtagtgatagcgttatttctgcaagcggttctaaccttttactgggggtgaacagtaagacaacgcagatcaatacatccgatgcaggtaacattgtagcggctgaatctgggaactcttacaaagtctttactgagaagaacgcgcaaaccttgctgaatcctacgtatgtacgtaaagcaggtgatacgatgtctggacggttgacaatcaacaacagttctcttatcatcgcaggtcaagcggcttggtcaactcaggatgcagtaaacgaagcatcacggggatactggacagcagaaattacctctgctgcacaatacaacttgcttcctggttatgcggttccggttctcgaaccagatccgattaatccagatattatgattgtaacccgttatacctacgttaaagcacctggtacgttaactcagtttggtaacggaaccgcatacacttatcagatttgggcacctcgtccgacctctggtactggtgttaacgcgttggcgcaatccttctggatccgtcaaatgaatccaattacaggtaaatttgatgaatggggccgcatgtatacgagcaacaacccgcctactgctggtgaaattggggcaacgtctgctgttggtactacggttaaaaacatgactgttactgattggatcaaggttggtaacgttaggatttatccggatccggttactcagacagttaaattcgagtggatagcataatgtcaaacttaatggcggggttcggccccgattttgtagaaacgcaaattctatcagaatcaaacagcgtaacttacagaataaccgcaaaggcaacacatcctaatgcggttcctaatcagtatgagtttacactaaatcaaaaggcggtagggacaccgcctagccctgggatcaacgtatggcgaatcaataacgctaatgttgaatcaataaaaacctttgcattatccaatgacaatacagcaactgcaaataaagcatttgttgattatatgaactctcaaggttctgggttgtatttgataatgactaacggacaatataaaacaagccagatcgttgatgattggtttgcaaaaaacaaatccgttatgtggcagggtgctgattttgctcagagattcccaaattccgcatatgttgcattgtatggggccgcaaaatctcgtatactgattgaatcattttacgctaatgatggagttttaaaagaagattcacgcgcatcaatcgatcttgtctatgacaacgttggtgatgttgggcgaacaggcgtacctttccgatccgttgaagatgttgatgagtataattcaactaatggatctgaatataaagtatatccggttgcaaacccagttatctctaaattggctgattatgggatggctcctggattagttatgatggttactggtgatttttacgccagtaaagcattattggatgctggttcaacaacaagggttactgttagatggtttactggtactgctcaaacatcatcttcggtgattgaagttccggcaaataaaccggatgaatggttgcgttttgaacaattttacacaatccctagtggttgcgatggatttaacgttgctgtatcgcgttatcctaaaccagctactgatagtttatcagcaattcgaaattttgtgatggttcaagtgtctgcttccgaagcaaatcaaaccgttgctgctcagtttggtgttaacggtattaaactgaataatgctatcgaaggcggcactccttatatctttgaattgcctaacgttaacgtttatcctagtggtgattattctgcttccgaattccgtgaagttgatgcataaacaaaggcccggatcatcgggccttataaatatgtaaaaaggggttattatggcagatttaaaagctggttctacagtcgggggtttacctatttggcactccggcacatttccgctggttccggttggtaatactctaacctatcgcggatataaggtttatactgaaaacgataaaccacaagcatcaaataacgacttcgtttctaaagcaagcggcggtcaatatttgggcgtagttgccttcaaacaggggctacaaattaacgctactttcacgggtggaagtgaccagaacgggttatattctggagatggtgatggcgctacatacgataaagccaacatggatcttgtatcatggtatggcatcggtattcgatcatcttctggaacaaacggtcgcgtattagttatcaatgctcgcacaggtgatgttaatactaagggtaacgtgacggttgaaaaacaaatcagtattacaaccgctaaccctactgacgcaagtcatgcaacacgaaaaagttatgttgatggtcagataaatactgtcacatcaaatgctaatagcagggtattacgcgctggcgatacaatgacagggctattaactgccccgcaattcgcgagcacaggcgcggcttcccgtcccgaacacgtaccacggcttgaccaggtaattactaaagggactatcatagattttggatcttattaaggtgaaacatggctgatttagcaaaaattcaattcctacgtagcacagttgcggggaaaacacctactacaagtcagcttgcagatggtgaactggcgatcaacatggctgattatgccatttacacgaaaaatggttcttcgatcgttcagttggcgggtaaaggtatcccagaaacaaataccaaaaaattaacagtagatgggcctagtgctcttaatgataccgttaccgtagcggaaggtaaaacaatcacttttactaatgccgacctaagtggtaatatggttcgccatattacaggtaaaaatgcccttaacgatggttggtatattggttctggtggtgtgagtaatgaaggtttcttagaaatcggtactattgacgatggtaatgaagagatccgttttgttactcgcggttctgccgatactattcgccgtactctgaaacttattgatactggtgggaacactcgcgtacctggcaacatctatattgatgaagctatgggtggcggcggttctgcttttatctctaaaaacaaagcatttttcggggctggcggtgctgatatctatatgcgtaacaccgctggaggttctactaatcagttaacgatcactgatgctggtgaattgctgtttcaagcaaaacctgtatactgggacggtcgtaaaccgactttaaccgaattggggatcgggcggattgaaaacgcgcgtcaaatgcagcaagacaattggcctataactacaggtaatgaaacccgatgggttaaagttgctcttttaaaagatccggcatccggtcagagtcgcttgcaactgatggtgactaacggcggtaactatggttctacacgcggctcgttcgattttatcgattgttctgctcgtagtatgccttcaacattaacggctgcaaatattcgttcttatctgcaaattcgtcgattgggcgatccgtcaatggatgacactaaccagatgcgttatagtttggttcgcacatccgaaggtttggaattgtggtttactcaaagatcgttcatcggtagtacaaaaattgctctgttatctacggctggcgtgactgaatattatattcctagtggatatacatcacaaacaaccgctccggatggtttgatcgagagtaagcctattcgtatctatgacgaaatgaacaaacctagccttgacgatggtactgatggtattctgtctgtcgctaaaggtggtacaggtgcaagtacagcggctgctgctcgcacaaacttaggtttaggtacggctgcaactcgcgatgttggtacgggatctggacaagtaatgctcgttggggcttacggtttaggtggtaaaggtacatcgtacaatatatcaaccgcacgtgattatttgaaacagttacgtactgatggctctcagttcatgagaaaccaggttggcacggacgttaactatggcatgggtgcaagtttttatagctctgtatctgatgtacatgctattatttcggttgattgggctactggacgtgttaaagttggcgcaactaacgatactaaccttaactcagatactgggaaaatttctttccaggaactgtatggtactgcgaataaaccaactccggatgatgtaggtgcggtttctcgtactggtgatacaatgtctggtgatctcctgatcactaaagcatctccgtctttgcatcttaatgctgcgggtagcggtaactcggtgatctggtttaagtacaatggcaatgaatctggtgttgtttgggctactccaaacactgcaacttctggtgaagtaaggatccgtgctcgtacatcaacaggggtaaacagcggggaatttgtatttaagcatgatggtacgatggtatctcctggtaacatcactattaccagtggtgcgtttaatggtaaatccgtcaatacgcaatatggtaactttaataacacaagttcaacaacaactgaacaaacagtaactattagcggttcgcagcacaccccgttattactgaatagaccaactaactcaaacttatctattgggttcaaacttagcggaatgaacatgaaacgtttgggtgttgatgttaacggtgatattcgttacggggaagcagaaaaccaaaccacaaacgcatggttactaacttctgatacggtaaaccgatggtctgttaactttggtcgagatatagcggttgctggtttggttaactcaactggtggatttaatggcccgatttctgcatatgatttgactggcgttactcaggatctggatgcactaacaatcaactataccgatccgggacatttaaaaatgtattcgtgtcgtagtatgggcggtggtgataatatcacaaacaaaccttctggtgttggtggtaacttcatcatgtatgtcgagtgtattcgtaaagtaaacaatactgattatactaaccgtcaaacatttattgcgtcagataataaacgcacatgggaacgttggcttactgttagcggttctactaatacatggacaccgtggagagtggttgttgtatcagggaatgatgacgatgtgtcatttaaatctgtgacaactactaccggaaacttgaacagcggtaatgatctgattgttgctaacaacgctcgtataggtggcaacttaggattagctggtgcgtcttctgtcatgtatagtgataagggtattgcgatcggtgctggtactgctctgttagaatcttctgatgggcgtgctattgtcggtagttctggcggtggtcgtgctgttgaattgcgtccaggtggcccaactcaaagcaataacgccgtgaagattacagcaacttctggaagtggtggtgataccgcgatcgaatacggtcaaggggtaaaaatccgttctaatgctgctggtgctcttattatttctgcgaaggcaggacaggctctatatctgagaccgcaaggggatacttcaagtaccaacgaaacccgcattgatgctagtggcaacatgactattaacggttctgttactgctaacgggaatctgtctgtttctggtactactacaataaacaacacgctaactgttaataacgtaggggcaatcgagaaacgaggcattaggacgtatacagaaggctctgttactgtcaacgaaactgacggtatcaagatgtttggtaatggcacaattcatggcacaatgcgattagttgagagagtgaataatactactttcatcggtctgcaaacttccattaatgacactacaaacggttggtttgaattccaccacacaggaaaattcaaatcaaacaatatcgaagcctctggtaatattgttagtttgactggttccattggtgctgttggtgcattgactgtaacggctccttcttctgataacggtactgaccatatttggttccgtaactctgatggatctgaacgtggtgttatctatatgccaggcaatgctaatattggcggtttccgcgttcgtggtgtggaatggcaatttgatggcggtgctagtcagtttatcggccctggtgctcgttggcgtattcaccctgatggtaatattcaggctgatgtttttagcggttatctgaataactacatcaatgatcggtttaacgcgtgtgctcagtgggttcgtactggtgctcaacaggactttggtcagatcggtcgtcctgctcctggtttaacagttcctgctggttgggttttagttggtcttaacgccaacggtaacgaagctaaccagaacatgcagttaatcggtggtcgtttgcaggtatggaagaataacgttcaatgggttgattctgcaacttgataaaataggggcttcggccccttcattcttaaaggtaaaataatgattgttaaacaaatgaaaggtattcgctggcatcataattttgaaggtggtgcttactatcgtgattgtaatgacaagtgctggtatgaatttcgtaattctttggataaaaattcccatatcattatagttgatgctaaaaccaataaaatcattaactattataacggtgatgatcctacgatgattggattgtttgctgataaagaaatgattcttaatgtgtatcagctatcagaatttcctgttaatgactggggagaattctctaagcgagaatttaagttcgaagatgataaggtagtcatgacgaaagatgttgaacttccgaaatctcgaacaaaagaagatatcatggcagatttgataaaacttcaaaaagagctagaggtaatgtaatttctaaggctacctatatggtagcctttttgttgtatgctaaatatacctatagcaacctaagaagagtcttataaaatggctgagagaaatcccgtagataaactagccttatttgatcgggtaatctcgtttgtgatgggtgtgaaaacatggaaacaattgctgataaaaataattctaataatggttatgtttcttatggtattaacttggtacaaatggactgatatattcccgatgataaaaggtgcccttgtagtcgatacaagggctatcgaaatggaacaaacagaaaagtttaataaatccgcgttggaacagttgagcatagttcatcttacgtccaacgcggatttttcagcggttcttgctttcaggccgaagaacataaactattttgttgacattgtagaatatcaggggaaattaccttcccagatcgatcctaaaaacctcggcggttatccgatcgataaaacatccgacgaatacacgaatcatataaatggcttgtattattcatcaactaaagcaagttcctacctaccgacacgtgattttgtgccagtagcttatacttttagttgcccttatttcaatcttgataactactattctggatcggtattgatggaatggtatgcaaagcggcctgatataccagatatgaagctaaacatcatatgtggacaggccgcgcgcattttaggtcgagcgaggtgattaacgtaatgctggtgttaaattgtgtgatcttccaatagcccgtttgattgctttaaagaagttcatcaccgggctatttttctcgtaaatatcccaaactttcaatttgtcccacggatccggaacataatcttcattccttgccgaaacccccaacgtaacccgcctgtatccagcgctgtcgtgataatacacgaagaatggcctacctattggcgcaaccttacaacctctcttagcggctctcatagcctcatcgaacgtcatggattcccccaaaaatttctatatgtgaatggtcgaattccgatagtttcactcaaaatgtatatcggatgatctagctcatcgtggttttcttcgtcaatgacgatatcccaatcagtagccttttgttcttctaccgtggcaatgaatacctggtttacttcacacttgcggtgtgtacgtctgatgattgtatccccttcacgaaacacaatcatatcagggttggtagtacggtacgcggttttacccgcgcacacttcattaagcatatcttcgtatgtcattataaaacctttacacgttgaacgatggtttgtttaacgtctttgtattctccgtgctctttaacggttgctttgaaagtgatttcatcaccttcgtttgcaatgttattaccgaagtaaacaacaacattaccatcaacattaattttggtcatgaatctttctacagaagtgtagtaagaaacttgagtataacccagtgagatcactttctcaacggttccggtcatttccagacgctgtttgatttcaccgatgtggttagctttagaaatgcgttcctggcgctcttgttcccactgttcgcggatttcttcgcgtttggcgatataatccttatccagtgcaacacccatgcagtaagcgcatacagcgtcgaatacagggctgtttttgttgtcttctttagactggtcagcccaccaaagaacagtaaacattggcatttctgcaatcacttcacctttacgcttgccaattggcatgatcccttgttccagcagttccagtttttcagtatcaaacactgacagtttaccgcgacgttcgaacagatcgaaatcggcgaagccctggaataccattttgaaagtatcagtttcagttaaacgggtcgaaacacggtcgaaatactcacgcgctttcgcttccgctttctccggatcggtagataaattgcaaatatagttatcagaagtataaccgccgcctctacgttcaacacgcaaggtgtacattgcatttttacgaccagaagaaatgaagtaagtgttggtaactacggttgcgttagtcatggtatttctccttaaaaggtatctcgtttcgatatggctaatatagcaaaagcccccgaccgaagtcaagggcttttttcatttcttacgaaattataagaagaacccagtacgaacaatcagatcgattttcttttcaggttcaaacggtgatttgctatcgatgttacactgatagaacataccaacatacttttcaggaatgttagattcacgcgcccatttcaggttgtcatcggtgatcggccccagcataagattaacaacatcaacagcataatcctgttctttggtgttaccggaaccgtttacataatgcccgtgagcggttttgaggatctcaattacttcgctatcgtcagtttctactttgtaaagtgttgtattttcaggaatttcttcaagaatgattaaagcggttttcatcacacttacctttgtgtttctgtttacgttttgcttctttaaatgctcgcttgcgatcgcggtgagtagaagcgcggttgaaatcatgttttgctaccaaattattcatataagccccttaaagaaaaatatttaggggctttcgcccctgtatcaatccagcagtttgcggatcttatctgcgatacgtccagcgcgggttgcgcttgcattgtggtcgctttctttagaagccagttccgccagtttacgctgatgttcttcttccgctgcttggcgatctgctgcaacctgtgcaacctgctcgttatcgtgagcaatacgcgcttccagttcattcagggttttgtcgaaagttgctacgatttcatctacagaacgaattttattaaacagtttcataatttatctcaattggttagttttaatcagtatacatcaatatggttgaaattcaaaatcataaatgtcattcagtgcgcgattccactcggtgtagttttcaccagcaccataacgcatttgaatggcactttcgaacgttgatccgttgaggttcgggaaaccgaacaggtttttgattttgtcatgtgctacataatacagagaagcactttccagcatcgcaaccatcgcagacggctcatgttcgcggcgcttgatacgtaacagagtacgactagcgccagttttacggcgttgatttggtgctacgtagaaacggaatactacgcgccctgttttgtcatcaactaccaggtaaaacccgttttctttcagatccacaccttcgaatttcttgaaggttccgcgtttcatgtcaccaattttaattgcatatttgtgaatgtcaagtcttgtcagaattcttttcatcttttttagataccagtttgcctaattttgtaatttcgcctgtttttacgttaacaaacaaggcgatgctcagaaatgggatgctaatcactacgctgatcaatgtaaacagaaaacgtatcacaaaaagaacagcacgttcaagatatcgttgcatccacgcgattcctaaacaagtataccccactataaaggctgttgcaacataaaatgcaccaaatcctttacgaaatacgtaaccttttccagattcaatctggtcatcggcccacatttcacgggcagttttcagaatagattcaccactcgcgcgggtttcgttagccgaaggcatgtttttaaatttcatgatagtctcctatgcgcccagaactctccaggcgcggttgtttagttagtaatggctaaaaccataggtaacatcaatcatgactttataacggcatacacgcatttttgcgttattgtaatccactgggatcgctactacgtcagcaggatccaccttcacctgaatgactctaccaataccgcccccgtaatgtggaaggtatgatttagccgcaacgtgtaggccagtagaacaggtgcgcgttttatcttcgtctaccatgtttcgaggcatggagacagtcacaccaggactattatcaaatttgccagttgcgagatctttatagttatcgcgtacacgtttccaggcaagaaaacaaccatcatcggtcagttcaatgtcattatgtacaaggaacccgtaaagctggtataccgcatcgcgtgaagggtttcgcatcaaccgttcaaagaagtttaccagatgttcatacggacgatcgttatacatttcgcgaatgattcgttgagtgatatcagaatcaaacactacatctttatatagaagctgatgaccaatgattttaatgttgcctttgctataggttcggatcgcttcctgggtatccaaacaacgcaccgcgcctttaacatcaccagctttcagcatttcatgcgctttcttaaagttcggatgtgtttcacccgccatgaaaacgcgaccttcgtatacaaccgtaatgaacgattcagaaccgatcatacgcggtacagtgtctgatactttaggcttttgttttacgtcccttttcttcgggaactctgctaacttgcggttgataacgcgcccaatggttcgggcgcttacgttgaactgttgggccagtgctgttttacttgcccccgtcaaccatccattatagatagctttctgttgtacttcgtcaagaattttgaccattatttccaccgtattaatttcttaaactcactgagattcttttcgttgttgtaaaccggacgaatcgaataagaatcgctatgttcaacaagtgaagccagtaacgggtttagtgatttaaagatttcccatgcctgatcaacacgttttttcatattgctgcgtttaacgcacattgatgctacggattcacgcagaatcggacaacgcgccctggaaagatttttaccatctttctcatacccttccagacacactatacgttcgagcgtatcaacaaccttatacagtttttcattgtatcggtttttcacaatccgatcaagcgatacaccaaaacggctatgcaatgcgtctgtttctgttgagtgttctttaccaatccatccaggcaagcaattatctttcaatgccttttcggatttaacatactgcttgcacagcatatcatcaaagcataccagatttgaatctgggatccacttccataggctgttacggatagcaaacacaacagggatcccagtatggcgcatgatacgcgataaagtagattctttcattgctgaatccatagacaatctggagttttcaccatctaagcggctatattcatcaataccatacaaccgaacacctggggctttatccagtgataaaaactctgattttgtcataaacagagaagtttttgccagattgccgttactatccaactcataacgatatacggtcggggtttttgggcgcggttctgaatttttcggtgcatatagtgcttttgatttttcgcgatctgcatcatagatctctttttcttttgtcatttcactggtacggagatatacaatttccgattcatcaaaatgaccttttcgaacgatatcattaacaatctcgcgttttgaatcactatcgtaatacgcaacaaagctaacacggcttaggttatgcattttagcatacccgacgatatacggtttaaccgtgttggtatccacttttaacaaaatgagtttcttctgtttccacggataataaatgcgtgtgatgtcctggcgtttggttgtttctggcttatacttgctccagcggcctccgctaccagttacctgataccatgcatctttaccgtcgtattcgttagcccaatacccagcaacataatcatcattatatttgtttggtttgactagttcgctatggatccagccaatagaatcaccattgatacgaaaattagcatctttaccaacaaagttttgtaccattgaaggcagagaatggaaccacgtcagtttatcgcgaacggtttgtaacttatcgaattctgatttaactcgattgaaatatacccggctgatttgtttcagacgttctttaacaatccctactgtcattttatccatactcaactcttcgcgagaaggcatgaaatcaagttcaccgatcgggaagtcaataatatacgtatactggctttcggtatagcaatagaacatcgatgtatcatacaaatctttatccaggggataaatgatgttacccatgcgagcatatacaccgctagtgtatgctgatttgtgacggatcaccccgctatcattggttgcttctttcggctgatagttgattttgagaatagaagcaccaacaaagttaggacgaatatcagtaaatgattcgtatacccttgctgcttcgttttcccattctttgatatcttcaaccttgaccggaacggttatagtaaccccgttgggttcatcgctttcaatctcatacagaggatcgcagaacggttccccatcatccatatagattgtatagccgcatttgatgccgtcttttacagattcaactgtaaacgcatcggaatagcaaagtggagatttgcaacccagtcccatagaaccgatcaggtcgtttgaatcatttttagttgattcgaagtaaacggtaaacgcatcactaacaaaatccggagacataccgatcccgtagtcacgaataacaaaacgaggatcaacagcagttggcaactggacatcaaacgggttctgatttcccgcttctttgtgtccatcgatcgcattacaagacagttcgcgaatgattgcacggatcttgtatttgtatacggttgaagaaaggatcttatacgctttcttgtttgcacgtagagatagtttgtttcgtcccttgctggtatctgtaccaacacggtagatgatttgcggtgtatcttcgcgtaatttcattgtttatttctcacttaatattaaaaatgacttgatcacaagagtacttcgttggctttttgttcagaccatattctaccacttcgcaataagtgtcaaggaattttaccaatttttcttcttcaacttgctgtttcttcatatcaaggatacccatcacaatagcaatgataatagaacagaagaataaacagaccccaaatatggtcagatattttcccaaattaggcgcattataacgtgtcataccttacccctctttgcgaatgtatgcaagttcttcatgggttactggacggatatacagacggccttttgtgtatgccttgcgcccactgatccaaatgtttttcatatccttaacaccgttcatcacatcgttgtaaaacttcttatcagctttagcctgatagacttcgcggccttgataatctttcatgaacaaacaataaaggatctcattcttatcaactagattagcatcctttgtagttgttttacttggtgaaggtttcgcacccaggcgcaaggccatagcttgccacactttaccatgttcataaccgcgcccgacaagagcatgagcgatttcgtgtaaaagagtgtctaaaatatcctcgtagatatcttccgcaacatgacgaccagatagttcgatcagttttttggcataactgcaacggcccagagtttttgtaatgcgtccattgatccggaatgtccaaccattgctgatcaaaccgtgcttttccatcatggtacgcgcccagtgggttacttccattgcactacgagttttcaacattttagaatctcctttgcttggtacaaaatcaatatagcaaaaagccccctgcattgcaagaggctttgtaattatttcaacttcttcgaaagttcttttaaatcattgagatactcgattttcggggttgtttcttcccagtatttcaactgtttacgcaattcatcggcttcgtcttccagctttttgctttcatccgtggttagatggtagatgttcatagccactaacatttcggcatgattctcgcaaccttgccacgtagacacaaatttaaccgcttcgctgcgactaagaccacgcagagaatcaggagattctaccatttgagcaataaacgcaacctttgccagtgctttatctaatgcttccttagtctcctggatacgcttattgatgcgctgttgatatacattcatacgaatatcaacgaaatcctttagaagcgtttcagggcgttcatatgagtatagtttaccctcaaagataacgttaatgtttgggtttgagttttcaatcaacccgaaatctttcaggatcttttcacgggttaacccgttggcatactctcgtttgagagttatttcataacgaaaatcttctttcgatagatccttgtagctaacgataacgcctttttcttccagcttatcaaggattgcaatgtatttcacacggtcatatttcactgggatctcagtgatcaccaatttggttttaccttgcaattcataggtgccgtaaattgtaccgtctgtgatttcacctttaaagtaaggatatttcagatccagtgtgaaatctttatcattcagatatgcaatacacccgttaacaactgatttaggatcatgaggcgggatgtttgttgcatatgcttttgcaatcccgctaaacccgttaaccagtaccattgggatgatcgggagatagtacgctggcggtacatgttccggatcttcatgaactggagttaaatcaccatccatataaattgctttgaatattggcgatagtttacacttgatgtaacgaggtgcgccaggtttcttaaccaaacgggaaccaaagaacccatcacgatcgaataacggaatgttattgcaccagtgcgccgccataagggataacgcttcttctacagaggtttccccgtggtgatatccatacatagcaacaccgccagcgatagaagctactttctgaaatcccgttccgccctgcatagcagagtgaataaagaagcggtgaacgggtttaaacccgtctaccaggtgcgggatcgcacgtgaataaatcgtgtaaagggcaaacgttagcccttccacctgtacaacatctttaatacttctttccattagtcaaccttagaaaatttgtgttttccattaacccaatctttacgcggatcggattcgtcaccgaagcatagttctaacacttctttgtattcgtcgtcaagtacgataacatcatacttcaactgatcacccagaacacgatcgtaatcttctttgcgtaaagaacccagtcccttgatataccgtacatcttttgctttatctcgaaacggtgcaaactcatcaagagagtagaaccatttttcctcgcgcccaactttagcgataacgatcggggttcgaatatatcggatccgtttttctgcaaacagagaaggccaacggctaaagaatgcaagcaacagggttaaaatatcacctccgtcaacgtcagcatcgaccatgataccaatattatcataagtcattccggaagtatcaccaggatgaatattgaggatagccattaattcaaacagttctttgtttttgataatgtctgtgaaactcataccccatgtattcagaggtttaccacgtagcgggaaagcgccttgcgtttcttcgttacggcattcgatgaactgaccaacagcagaatcgccttctgtcagaaacaatgttgtttctatccctggagtatcaataccggaagccggaacgtgtttagcaatctttgcctttttcgctttctttttcgctttggtgatcgcggcggcttctgctgcttgtttacgaatcaacgcagattcaatgatcggagtaattatttctgaggtatccataatcatttttgcgatctttttgtaattcaaattcgcatgattgttaaactcacctgctgtatttgccaatcgctcttttgtttggctatcgaatgcaggtgcattaaagttatgcaggaataccacaagagttaagcattcttttacacgtgctttcgggatctcgatactatgctttttcttgatcataggttcaagttcagaatagataccatcgatcatacattcaacgtgtacaccgccgtttttcgtatccagaccgttaacaaaggatttctgtttaaacccgtcctcagtgctcgccagaatgaagctgaggcgattatttgtctggacaatggttttatccccatacatggaagcgtacagagggaagcgattagagagcgtttcgccgttatatgtgaatttcacagacgggaaagcaacggcaagggccattaagcgatccttaatcacttctttagtttcttcatcaataccagttacgccaaacatagagaagtctggagtaaacttaacagtagtaccctgttctttactggggctggttcggtaatcgatgttctgtgcgccgtctgtacagttaatggttactttgcgtttaccgtttgcagtctcaccaataaagatcgagctataacagtttgtcaggaaagaaccaacaccattcatccccatcgttacgcggtttttatcatcgaagttagaacccgatttcgccatagtccacgctgcaacaggtttaggaactattttcccgtctggagtttttacgtcatcctggggaataccgcgcccgttatcagagattttaaccaaattgtgatcaatggttacgtcaatcttattagcgtgtttgaactcggttctgatcgcctcatcaatcgagttatcaaggatttcgttgatgattttaaccaacccttccacgtactcaactttgcgatattggcccattatgaaacgttcatgcgcttctttgttaactgatccgacgtacatatttggacgcaaccgaatatggtcgcgatcgctcatacaaaatgattcgtcaacctttgcgccctttttggctggttgtggtttctgttctggttcatcatctgccagaagaaaatctaaactcatattcacctctttgtttaatcactgacattatatagggttctatgaaaaagaaaacccctttcggggtttacttgttgtaagggaaaccatcacgaaccatttgaggtttatcaaccgttctttttgcttcgcctccgcaatcacaatctttcggtgcatcacgggtagcaatgcttgccatttttggaaattctttattacacttggtgcatttataagtataggtaggcattaataaatctcttttaaacttaacatcttaactaaacgggctttgtctatgtcaaaaacacattgacgtgcgcccggatacaacttttcaacttcgtataccatgcagacgaaaccaacattgtgcatgtactcgcgttcatatgcattgaaccaacgagaaaggcgctgtattgactgaaaaccaaagtataacccagcctcttcaaagtctatattatctttttcaaggttgcgcatcaatcgattatcgtcatccggtgctggatgtcggttatcatccatatcaatatagatatcaggattcatacagaattgatccagccattcagcggtatccattgtcaaataacgattgacatatgggccgctttttgtttgccatttttctgtacaatcattccagaaagaacaagaaaactccacacgatatacgaacatgatataatcctcacaagtaaactcaaggtttacaagtacgataccacttatctaatttttctacaagcatttcgttgataatttttgcaatttcgtaccgtccgtgagtagtacctagttccaggtaaatcacatcaagtgcgcacacaatcgcatcaatactttcttcaacgatattaccgccgcgttgaggctgaatgagacattcgctgatctcaccgacttctgctgataggtgatgaaccacatcacttttcgtgcgtttcttcactttatgcgcggtttcgaaaaacttatcaagtacgatcgtcgtttcttctcgcgttgcggtattctcggatgttgaagccgtgtgttgaacaacatatttcgtaaaatagttttcaaacacgttgaaagggatcacatgaggaacaccattcaaaaacaccccttctttacaaacataatggatttggcgaggaatagacaaaccgccgctgcgttccaaatgccgtttaacgcttgctacaaaatcgaactcttttccatacccatctaatctactgttataagtgagtagaccaaatccaggaacatagagatcattttctttatacagattcatttacaatacctttatggtagccaaaaatataacaatcaattgaaggacgttcaccagggaagtgaatgcattgcatgactcgttcagccattagatcttctcccatgtataccgaagtagtttcttcgttgtaatgggtatcatacgacgttttaagcgtcatgcccggaagccctgcaatgtgcatgaatttagaattggtgcaaggttttcctacttcaccattaatcatcaacactgcattagttttacgtgcttttctcatttgaatttcaccccaatttgcgatacgttccattcttttacttcatcaacaatatcataatggttgatgtatggtaaagcaatttttaaattactcgcgtcttgaatgttgcgtaagaaacgagtaggagaaagaagacacaaccgctcggatccgttgtttcctttagcggcaaatgatagggtttctcccccgtcaatcttcatatcaacagaaatagttttgaattctggtgcatatgacgtgatttttccgttgtctctcggtgtactatagaaacatacactttgaggaacattatagcgatctgtttcaatgtacatataatcaccgtcagccactccccacacggtgtagagggatccggtatagtcaccaaaggaatttttaaaatcatcctttgtcgtatatcccagagagcgcaattgcataagttggttatgctgttcgatcgcgtcggctttttgttgttcttgtacttgcgcatcaatcgtttcttgccaggaattatacgcatagtaacccataacagcgattacagccataacccctacagctttccagattttagcgtcttcgtttttgttactcatgctgtattccttttaagaaaaagggccgaagcccctttattaacgaagataaaccacataaccgctttggtcgatagcacggtctgcgtcattgaagatattaccacgaattccttttgctggtgctttccagcttgcaggtttcaggatattaccatcattatcgatgaaggcggcaacagaacgctgattgaacatttcgcctgtttctttgttgcgagtatcctgaacaacgcgatgatatttgcggcctttctccagaacgaaaacagtttcgaaaggagaatcctggaaacgagcgttacgcgctttgtacattgcttccaggaaaggggctgctttttctgcgaggatttcgaaagtgttcatggtatatctcctaaagtgtgtttcgtttcgatgtaagtactatatcaaagatagttattctatgcaaggcttttttcgttatcaagcaaatattttaagtgttcttttaatgcaggaagttcgttaagatgaccttgtttaactttctcatactctttgcgttcccagttttcaagattgctcgccagcgcttcatcacaataagcgatcccgcgttctgcatcccgaactttctgtttccactgtgcaactgcttgttgataaagagaaccgttaaccatcataatcatttcctccctcgtttcgattgggtaactatatcaaagctaccccagaatgttttaacaaaaagtgctattagtaagtatccagtttatacattttgcaccagttcatgaattcttcgaaagtctgagtattaacacgtttttccttcttcactttcttagtgattaccggacggttagtaaaacgtttttgcattttcacagtgattgctactttatctcccagatcttcaaccttttcaaccagcgcccactgagaaccaatttcagcaccgaaagacaaaccaacaatctcacctgctttaacatttgctgcatattttactttaaccattttcgtattcctttctctgtttcgtttcgatgaatacaagataccaaaaagccccctgcattgcaagaggcttctttaacaaaaagtgctattttgttttatttagttctttgagtactttacggatcccgccgccctgtgtcttatcaaagattttctttgcttcaataacagacgtttctacatgataatcaattcctttagcagaaaattcaaattctatcttgtagtcactacgaaacttcacaaaaacgaattcacctgcaaagtgcttacgaaaccgtttttcgttgatgtctaaccattcctgagtatcagccaactgatacatacgaccgaacattattgaccccatgatcgcaatcactactaatattcctaacgcgaattctgacatcatttacccctgtttaccgattgacggtgcaacgatttagacacaaccggatttcggtatggtttgactttatggatcgttggttcttccccaaccaaattaggaaattggttgttccattccatagaaaatggataaggttgtgacttgaactcttcgatcatacagtttactaaacggtcgccaattacaccaaaagccgccccaataatcgctatacgcataaatcaccccttaattgtgtcaagtacagtaaaccagtcatgaagccatatcgttgttcttacagcgatatacgttaacaaactaatcaatgataccgctccgcaaatagccagcgtaatcaacatccgaatttcaaatttagtaaaattcatatcaatctcctttcttagaacccaatataacaaaagccctcaaccgaagtcaagggcttttgattaaatttttacaagttttggcaatcgcagaactataccaggatggatcagacgtgcatccggaatagtatcacggttgattttggcgatgtcgggccaacgttcaccaacaccatacagtttctttgatatggaatacaggctatcaccgggttgcacaacatagcgatcagattcaatcttaaccaaatcctgattaatgatatcatcaaaggcttttgcttttgcttctttaatcgtgttcccgtagtaaggacgatccatgacagttaatgtgatcatcgtttctttcctatgctgttttcgtctgtctcttctaaggatggaggttcttccagccccagagcataacgtttagcatagattagcatcaacgcatctttagcgcaatcatgaattgaatcatgctgaatgaatccatctaacatgcctttacgcagtggacacgtggttactccgcgagtcagtaaacggttttcaatggctgtacgcacatcacggctattccagaacacggtaggcatatcttcaaacgtgtcaagttttcctgtcatagttcgtacaacatcggttagcatagaacgatcgaattcagggccgcgcgtataatcgtatgactgccaacgactcacaccgtcagccgctaaatcagcaaagaattgtcgatgaccttcgtacaaatccatgtcaatatcggaagggaacaaaacccgttgcgcttctttagattgctgtttccaccattcgatcgttttttcatctttgatgcgttctggttgtttccggatgtcgaatttatactttcttcctttagcaatcagttcttgaaaggtaggcggatcataaggatcatcaacaaacggaacatagctaagttcggctagttttcctttcggaaacgggccaatactttcataatcaaatacgaaatctacgggtaaatgactcatccacggcccctcttatatgattccatgaagtaggctaatgatagcgcaacttccggagtaacatcaacggattcgatcatgcctggagttaccgccatcatcccgaactgacgaagcccacaacgagcaatcgatttttccagtcggatcatgttttctacagcctctgcaaaattgtccagatgttcccaatcgtggtaatcttccattgtagaacgatcacttttcaaaatcagatcggcaactaattcagcataaaggcgcggaaggtgaatattcatttaaaatccctcaagcatatttttgttttcacgaatgttacgacccattttcaaagtatcaatgatcactgcatactcttcaaaagtgaattcgatatcttgtgaaatgtttccccatgtgtaggtcggcccgttaggacagtataacccaacttctttgtttgcgttgacaacgcagcgcaattttgcaaacaacaaattgatatcgatagaattaaacccttcgagataatcaagcccctctctaccaatacggtcaacttctcgcaaaatcttttctacatctttgactttaacaataattttcataagaacctcaaagggccgaagcccttatacataatcaacagtgaatcgtgcgcgggtagttcctacataaagcaactgcttacacaattcataatcggcgtatgcgtatgcatcgcgcgtgtacatgtatgaatgatcatacgtgcttccctgacctttgtgatacgtacaaactggaagcgccttaaccgtctggaacttgtttttgatttgccagaacgaataccagggggctttgtatccggtttcctgtttcatcttcttatactgaaacgcgacgtagttcaaataatcgcctaaacgttcctgcataaccggatccgcgataacctgaatatccgctttcgtatcctcgaacatcgattctgttttcatcaagaaataatcgatttgcaccggatcgcatcggtcagctttgatagtatcagaacgcggtatgatttcaaggattttgatttgctcgttgttgttatagataacttcaacaaacgaaaccccattcacacggccttctgtcactaacggttcttgcatcacaaccacttcaccaacaatgaacggctgatcagttttgtacaagtgtttgcggatcactgcgtttaacttgtctacgtttgcgttagtgtaagcaaacatacggttattgttcaggtcatccggagtcttaacacggctaaaataacgtctcaggaagtcgccagcgttttcgtgcttcattacccctaattcaccattcatgaggggcattaacggcttaccgtcgcgtatagcgcgtgatacctggatgattgggtttccttctgcctgacgcataatcttatccatgcgaatgacatcaaaaatttcctcatcaaagaacggtgaaagctcggtgatcccttcggtattaaccggacggatctgatccttatcacctaatcccaggatcaccgcacaactcggaatagtacgcttgatgatccggaacagttctttgtcaaccatcgagacttcttcaaccacaaacacacgacattcagacaaatcagcggcttttttgcctttttgctgttcaaatactcgtaactcttcattggttacagggctgattttcagtgctgagtgaatggtcgttgcatccatacctaccgcctcagagagaacgtttttagcttggtgcgtcggcgctgtcaaccagatcccactaatacccagttttttcaatgtttcaaacacaaattttaccagagtagttttaccaacaccaggcccacctgtgatagtagtatggattttgtttctgatatttttaatcactcgatcatgtgcgtttttctggtcttcgctcagatcgtcaaaagttaattcgctcatactttaatcaataccccttgaatacttgcgtgttcaataaaccaacgcatatctttctttttcttttcggttacagtttcaacttcttcctttcgaaagaatcggctaagaccactttgtttaactggattcatcttatcattatattctttgataatcgaatttttatactcgttagcatcgcccggagatagaaacaacaaaggtgttaactctccttccttaatgaagggaattttaaacccgtctttatccttactaacgacgatataatattttgcaatcattttctcccctcataacaaacgtagaatatcccaacaaaccaaaacactgatagtataatcagtaaaagttttctttcaacaccgtttacgtgaaacacacaccaaccgaaaagatatgtgatcatcgcgcaaacaccataagaaagaatcccaacagctactagcgcgatgatcggatccattagtagttgttagcccaacggcggaggttttcggcttgtttcagtgcatacagtttgtagatggtttccgcatccatacccagcgccaggaatttgcacataaagaaatgccactgatcgataagttcaaacagaacttctaaacgatcctcttcactcagatccgtaaatttagtattgcgcaattcctggtgatttgctttccacggtttccaaacaccggatgcaggtttaacaccgcgagacattccgcccagagcggtatacaattcgcgggtttcgtcggcgatcgcatcgtcttgcagtttcagccaatcaaggatttctccgcaagtttccagattatccggacgtggaacccaatgcagggtatcagacaggctttgttgtgcatggttttgtaagtccagcatggattgtaaaggatcgccattacgggccagaaccttttgatattcggaatctacaaattccagatcttccggattaaccaggtgcgcacatgaattaaatacaggagttttatcagtagtcatatcaatctcattttttcggtgatttgtcccacgacttaaatctaagttttgccgtgagtccagaaacagtattatctttcaaatactgcataatttcaagtttagttgcgccgtccgtttttatcatttcgttgatatctttggaaggccacgggcatttatcccacattacaaccttttctccagcctcaatcaatttaaagaggcggtgagtagtatccggatgacgtgcttcattgtcaagaacccagacacgcatatttttatacggaacctcagaaagtgcaagctgtccaccagtgatagcgccagcattatcaacaaacaggctatctaatggcccctcaagaagataaaccgtttttagcggatctatcgtatcctgtccgtaaatcttggttgattcttcacaggctttgattgtgatatatttcgactttgccccgtcgcgtaaagcacggccctggaaagattcaattttccctttcttatcgaagatagggatcactaatctcggttctggttttgcgatcggataggtatccggattcaccgtattaaccagttgttgccattcgcgagtaaaccacaaccgatcccacttgtcacggggaatacaacgattctgcacatattttatgatcggatgttcatccggcaaggtatctaacctttcgcagaattgaagagtaggaataaatttcttctcttccttcggttgttctgtatgcgttggctttaacgaattgcgatccttaaacgattccatgagataatcacggtaatcgtctggataatattctttcaggaatacgctaaacggcacaccataaccacagttaaaacaaccacaattcatatgatcaccctttttagaagggtagatccaaaatcgttttttgtacttgtctttcattgagtcgccgcaaatagggcaacgcgcattgatgcttaatgcccctgatttacgaacgatttcgctttgaggcaatgatcccatgattcgggttgcaaattctatatcaagatacatttcttacctcagttgactatctttagatcctcgtcgattatacccggcgctgatcatttcgtcatgttctttttggcattcaatacaataacggcaacccttcacgatagccctacgtttttcaggtatcggatccccacaatcaaaacaatgcgttaatgattctccgtttctgatttgagaacgtgcaaaatctatcgcattgtctattgttgcctgaatggtatcttgaacaccgtcagcagggccaaatccaaccgccattgtaaatcctcctaatcaaatgattagaatatcatagactaagaggatttttctgtcaactgcttacttgcttttctgttccatcaagcattaacttccaaccacgaaatgcttgtttaaacgaataatttattgcaatatcacttctatcagaaccttttcgacgattctgataaacgatcgcgttgtcactcatatacatgatacaaattggaaaccatgtataatcgttagcagtagcccagatagtgatattcagcggaggaattatcatttctttttccttttccctgcacgggtaacgcctaatactttcggcccgatgttggttactgctccagtagtcacaccagaagcaatcttttctgtatcgccgccagaatcacccgcgaccatatcctctaacatgcgccccttatcataatattctttgaggcgtggaacgttcaacatgatttcttcatgctcttgttctgtcagattgtagcgattgcgtagggtatcatatgaactggttaagttcataaacccactcatatacggaacagcattcattctacgcttgatatggcgtactgaacgatgaaaaggagaatacgcttctaactcttcttttgttttggggttgcgaattacttcgccttgtccatcaaggatccccagcttgtaagcagaccactctgtgaatggttttttcagtaaacgaatcattcgcacactgtatgttaaatccatattacgaatcatttgatcactcatgatgatctcctttctaaattagtattacgttttatttgttctgttacaactgcttggtgtgcttcttcgggagtaggaaataatcccaaatttatctttttcccttcaactgtgattctgcctctccataacacaccttttgttttcgtttcatgtttggatacaccgatgtaaccgctagagttagtagatggtgcttttctgtttatcgcattcagagattgtgttagttctcttaaattactgataccgtcaccaaattcaaccccacgcacatgatctactatttcaggtagatatccatgaacatagtaaaatattagtctatgtcttctgtactgttcattgttaaattttataacgtgatacccctttgcattggggctaccagcaacatcaccaggctttatctttcgttggttagagttaggagttttccatagcacaattcccttttccgtattaatagacagattagggattaacagatctaatcctttcttttcttcgtcaagggttcgttttccactaccgtaacttttttgcatgattattactctattgtgaaagtgaataaatcagatttggtttcaggttcaaactccatacaaacaacctcgcatagtggtttaacccctttccaatcctccaggtaatacccagtatctataccgcatccaggattcataacaaggccagtttcatcaagaaactttttgcatttacttgatgtggtgctgtcatcttgtcggaaacaatgtgttttcgaataccggaaatttgcagacatttgagggattatgaaagttccctgacgcgctatctgtgatgcacgttcgattactttatactcaaattctgcccctgtatacttacccttaaaatcagaggttttgattttaccaaaaggcgggttactgatcgccatatcaaacacctgattaaattcagttgttaaggcgtctccatgcacccaggaggcttctggtacgatacgcttacccaactcatagtatgtgtgatttaactcaacacagacgatttcacgcggcgtattgtacatcatgtaatgaaccatagcgaaagataaaccaccgatacccgcacacaggtcaataacatttccccctgtgcaagcatcgattgtgaaatcgcgagcaagtccaataggggtaaagaacgcccctaattcagaattgtttgtaaacgcgccttcatgaaagttttcaataatgaacaacttctcttcgtaagttagcgccttgtcagagtgaaccagatccattatctgattgtgtttcttggtttccgctttcgttaactttgccattgtcccagctatacaataatgttgatttgtttggatagaattcccatccgtccacgtatccggtttcccaatcagtagtttgttcaaaaccacagatccattcatatacacccggaggcagttcgacggaatcaggaagcccgatatcttccgcgctgcgtccacattcaaagaatgaatcatggatgaatggtcgagataatactgtaacatagccttcatcgtcaacagctacgatccagcgcgaactatgaggactatcgaacttaggttcttcttcgtccggaatagactgcatttcaatgttactaaaatcaatgttcatttcaaaccctctttaacaccctctttcatcgctttccaggtagaacctgcttcaccattcagggcggcgaatacaaatagtaagatagcaaggacaagattcacgccagcaatcaccatgattttgctatacacaaaaatgtaaggcattgccaccacccaccaactaaaagaattaccagttacgatgttgagtgctgcaagtaagaaagtgataacgaatgcgattttcataatgtcctcctttgttatgattaaggtatcatcttttttgaaagaatgcaatacctatagatataaaaaagcccctttcggggcttaatttttatgcgttattgatgagataccgaagaacgtttttcgcttgttcctcattacaaccaactttgaaaccaggttcgatagggaggaagttccagaggaaatcaacacttccttcaacgtcatctttgcctttttccagcatcgctaacagcaaacctttgtttttgatactgtttacgattgcgtcaaaataaccatcactgaaatcaacattcgggttcagcatttcgttataagggttgttgaatacgttcattttgaatctcctttgtttaactcagtatcttgtctacgtgagttatattaccacaatggagattcaggtcaacacctttttacgatttttttgaaaagtttttcgtatttagcttttacccagcgatacatatcttcggccttgttactggcaagcagtgagaacagcagatagatcgcagcacccaccaacgcaacgcctacaacaaagtagacaggtagcagaactgggaagagaacccagaaccatgacatttgcgagaagccgaacactttagccgccgcaaaaatcagagtcagtccagttagcagtttgatagccggaatcggaatcgttatagtcttagtcatttcattaccttacattctttatggggctattcaccccagtcaattaaaattgaatgtcagattttgcaatctgtgccattttatcacgtcgggtagattcagcctgtttaatcatcgggccttgtgtctgttctactgttttaggcatagtgttgccgtggtagtcagatttaaacccgtattcgctgttgtctgtatccatccagcgctgattacccttgcgaacttccaacttgaacttgttgaaagtgttcttatcgccataacgggatttgatttgcttgaacagttgcataccctgatcagctaactcttccgtctcaatcacagccaacataaaatcagccgtagcaggtaaaccagcggattccgcaacatcacccatactcacatccgaactatcccatgcagaacgcccaacctgtgcgcctgtccacattacggtattagtttcaacagcaagaccgcgtagttcttcggcaattgctttaaccagaatataggtattttcagcacctttaacacgggttgaagtacagatccccaggtaatcgacaatgatcacatccggcacaaactgtttcttcaatttaagctctttcacaagcgctctaaagtggtttgcacctgcacccgatgtagggtactgcttgaccaccaaacgcccaaccttacccgctttaaggcgctccattttgttcttatagtctgcgtatgtaatgttcccttcgtcgatgtcatccatagtcacatcaagaaggttagcatcgatacgcttagagcaaacatgctctgccatttccatagaaatgtaaagaacgtttttaccctgttgcagataatcagccgcaagagaacataagcccagtgatttaccaacgttaacaccagccatgatgatattcagtgtaccacgttccgcgccgcctttggtgattgcgttcaggatcgggataccaaacggaattttcatcgccttcgattggtaaagcatccaccgtttttcataatcttcgaaatagtcatgacctactgaactatcgaatgaaattgctaatgcttcctccatgatttcagggatagccccaacaccaggaagtttcttgttctgttctgccagtggtttttctgcgttcgcctggatttcgattgcacgagaaagagcacgatacattgctttatctttgcaatatgtttccgtttccttcattaaccaatctaaatcttctggcgcatttttcagcgactgaatcgcctttttcgtgtcttcgtagactacatcacttagatttcgtttgtcaagcgcaacctctaaagcagtttttgacggaatgccgttgaattcctgtacatgtttatcaatgaggtcaaacaaaacttgtgcattgccttcgaaatattcctttttcagatggggccatgcttggacaaaatatgtcccgttataaatcaggttagaaaatattgtatcaacgatcattgtattgccttataccaggttgctgaacatcatgaaaaagttgtaaaccttttgtttgaatacatcccataatgtcagtttaggctttgggacaactgaacccttttcaagctctttaatctgtgcataaattgcatcatgcaccagcgggatcaacgcttctttgtcttcgtctggggtactgaattctactttcagcccatgatcccaaaacaccttatgaatataaaccagatgcgcaacacctttttcatcgttaatcagaagttcctgaataacatctttcatcgcttcatcaatataattctttgctttgctctcgatatccatacattgcctcggttatggggccgaagccccatagtttttataaaatttcgtcgttttcttcgatatcatcaaatgattctgggatatcgtcatcatccagatcaggatctgggatgctatcagtgctgtataaatcttccagcgcggaaccatcactgatttcacgatcagggatcttatacttttcttcgatagctttcaagaatggttgatgagtaaacagaggacgccagaattcaacgctatttgtttctgactcacgccatttcttttcttcaacttcgagttcgccagtctcggtattcaggaaagcgcggttgcgccagcctttggttacggtctgtacaaagttcatttccattgccagatccaaaaggccagaatacatactaataccgccttcataggtaacatgcagcgggaattttgatttctctttcacgaatcgagatttttcgatattcatgatgaaatcataacccaccacctcagtaccttctttcacctgttgtttacccaggatgatcgcagtatcagcggaatacattaaaccagtaccaccggaaataactttcttgctgtacatttcttgtgtgtcgtaggtatgacagatacaaaccatcgggatatccagatcagccagataaggcgtaaccatacggaacataccttttaatgcttttgctctcgtcatatcctgtttatcgttatcagaaagcgcatcagcgagttcttttttacttgccgtgttgcctactgagtcaacgaatacaatcaccttatcaccgcgttcaagcgcgttaagctggcttacaacgtcattacgcaactgctcgaccgtcgtgatacgagtatacacaacacgatccggatcaacacccattgatttcagataggatttagtaacacctttttctgaatcgtagaacaggcacacagcatcttcatacgtttttagatacgccgctacagtaagcaaacctaagttggatttgaagtgtttggacgggccagcgaaaagggtaagaccagaagttaggccaccgttaaacgcaccggacaacgccagattcagaatcggcacacgggttcgcgtgatggtaatattgttgaatacgtcgctttcagaaagtacagatgcagtttggctattcgagtttttgatcagtttttttagtagtgctttgtttgacatttaatttttccgatttattcattgtcattctatatatctcactagttaatgaaaggggccgaagcccctagagtttaccagtcaccgaacaggtcgtttaaactggcacgtttttcataatcaattttacatacttctgtgatgttagtcaatggactaacaacatgtttttcaaacatacccggataatctacccatgccaaaatatcactttcgatctctgctggtagtctatttccggattgccacgcgatgcaatcagcttgccacgggtttttatcccttagtggtagaaccattaccttttcaccttccatgattggtgtaacaccatcaataccagcagtgaaacggttaaagaacagcacccctttaatatggtttggtgttcccttgattggatatccagccccatcccgatatttcgaaatgttgttagcagatgatacaccagcaatttccctgtagtcaagtgccttatattcttcttcgaactttttataatgttcgtgcaaagataattcaccttcttgcaggatacggcggatcgcttctttcaggaatactttcacagaggtcggagtactagatcgctgtgtttccatacccatgattttcaatttcggtttttcatagcgggttccttcggagtcccacacgttagccgcatatcgttttttagcagtccagaaacttcccaacccttcggaacccaacggaggcccagaaatgatttcacgatccataaacatcaggtgttccacattgttcatgtattcgcaaagttcacgataccctttatcgatcattggttccattctttctttagcaaagcgatccaggaagtcaacccaatggttattatccttaaatttagcctcaccaccaacttttgcaatcacgttatccatgcaaacataaatggagtcagtatcacagtatcgaacatatgcatgatccgtagtaccacacaggtcattaagatattcgtttaccttacgttcaatccactggatagccaactgcccgaacatggtgatcgcgctggcgtttcgtagatcgaagtatcggaagtgttcattacccaacgcaccataaagggagttgatagaaatcttacggttaagctgtgccgtgttcgcttgtgcgatcttcttctcacacacgcgcttaactgctttaagcatttgttttgtaagagttttcagaactactttcgattcatcactgaaatctgtatagaaatcaaagtcaggatcaaccatttggttatgcgcgtctgttaaatgttcgagttcatgcttgatgagttcaagatttcgctcgcccgccatcattcgttttttccacatcttacgctgatcaaatactttcttgatctctactgggatcacgcctttgatatcacggcggaacatccacccgttaggagaacagctaaattcatcgctagggcgcggcgcggtcttattaatatactcttcaagagcacgtaccgcaaaacttcccataatcgtttcagggcttatattcacctgtcggatgatggaagggtacaggcttgttaagtcgaacgataccatgtatttgtaaggcccaggaacaggatccttcacaaatgccccagggtaaggggttttagtatggcgtctgttttccggaataacaaccttatcttcacgcagagagttataaatgatcgcgtcccacgttttcagcggagacataaccccagggaagtttatttttgcatagtacgctacagacagaaccagttcaataaagtttcgtttaccatcgatatcaagtacacggataacgtcaacaatgttgtacgtgatgtacagttggtgatctcgctgtcgtagttcagacagggaaccttcatactcaactttatttttaccagtttcgtattccgcgatcgcgtccaggcggtaagatggttgcggggtaaaactgaatttcttatacagcgccataccatccatttgagcaacgccggaaatgtcatatcctaattgttcgttgttgtaagcgtcggtagtggttctggctgttactttaccaaatgggctaaaatgccttaccacgttttgaccgaaaatgttcaggtatcgcgtgatgatatatgcaatatcgaatttgtcagagttccatccggttacaataacaggggttcgctctttccaatctttgatatatgcagacaataacgacttctcggtctggaaagaccgataaacaattttgtttaaatcttcttcgctaatatcttttcggtcaacgtttgccgcgcaccattcagcaaggccaccctcaaccagatcgtatacatagaatttatcttcgatgctatcgtaatgggtgatcgcatcgattggatattttgcttcacgtggatccggaaattctggggcggtcacctcgatatcgatagaagcaatgcgaatgtgttcgcggttgtattcaatttcatttcggtacatgtcagaaatgtaagccagtcggtaatcatccatacctagagcttccatcccaacatcgcgcatacgctgcatccagtttttagcttctttgatgctgtcaaactgttttttgaggcaaggcttgccgtaaatgtctttgtatggggtttctacgccattcatagcgtgttgatacattacgggcgcatatttcgtcttacgtacctgttcggtgccgttagagtcaacgaagcgctcataaatggtatctcccatttgttcaactgataggtaaaattcattcattggatcttgtcttctccattaatataatgttccattgtaacaccacctacagcaaattcaagtttactcgatgttctaaaaccaacaaaccttctgctaacaagtcacggatctttctcagttgaacaagctggcgttcaagtttaaacccgtcgaataacatgctgaaaatactggaattgatactatgatattttgcttctgcaataccctgattagctaacatgatagctttgttaaccagtagtttcctttccgctactgtatgttcatccagttgacaggttgcaagggaaaccaaatcatcataggcgcgttggtcgataacgttatccatacgggccgcgaaaatcttattcatataagtacggatcattgtgcgtcctccattcttttcataaagacttcttttgcttgttggatcaagtccagagattttttaatacgctcatagaaatgagtggtttctacttgattgcataacaatgtgtactctgaaatgttacgatcgtaaaatccaggaaagtagtgctgtgcatagctgtaagtgcgggtatctgacagattgcaagttaacgataacaagatgtcatcttttacaatcgggatgattaaagtttcgttggatttgattgaatccatgatttcgttaatagtcataatatatccctctcaatggtgtacacccaatataacaaagcccctgcacgaatgcaagggctttttgattagtgaccgatccggtacttgtacttgaggatccaatctgctttttgcgagtgagtcagtacgcggaagttgttttcttctgcaaacttcaacccaggggttacgatcttaaccatgccccactcttcgagaagtcgcgcaatgttgttccggcgtagttcgtcttcttccgtcatatcgacttgacgaccatcgagtttcaacagttctttaaaatgcacgataaaatacttaccttgctttttcagaatgtggcacgattgccagagcattttctttttgttgtttgcaataccaatacgggttagcgtttcacggatctttaaaaaagaatcgtcgctgattagttgaatttctaacatacatcaccattgtttaatcaatttttccaatttcttttgttcagctttgtttttcacaatacccaacaaagacagagcgacctttgcgtgttttcttttccaatcctcgaacattccgaggtctttaagttcctgcaaatattccatcgctgtacgtgtatttacactgtatttttcgcgaaggatttcgataataattttctcttcaaaatcttccgatagtttagcccatgcaccgaagcgtttagccttcctaacagagttgagataatagttatagtgcatttggtcagagatactaccgcctaccagattcatcacatacgcgttatatatcgtgtctatgtgctggctcattgcgttgtctacaaagtacttatcatacacttcatcgataaccaacggagttttaccgttgttgatttcgtctatgatgttaaacaaggtgttttctttatccttgccgtactctttgaccagttcttcaaccttatcccaatctttagaaagccaagcggattcatgcggggataactcttcttcatccagaaattccgccaggctcatgattacgcctcccagaccatagaaagcatcaggttcatcaacagatattgcagatgaatttctttattcatcgccagtccgtattgcgcgttgttttcgcctacaatctggatcagtgcgattttcgaatcctgattcacgatagggtaaatcgtatcagtcaattttccgataaaagtatcgtattctgacgcatatttaataacctcagagcgcaaccctttatagttcttttctttcagcagggtaatgatatgagacacatcagaaccaacgatctcattaagaatccccgcatcaatttcgccacgtttcgagtagaacccgatcgctttgataatagaacgcgcatccggataatgttctttaacaaacgctgcaatgactttaggatcatacttgatattctcgatttcaaggataccgaaacaacgcttgattaactgtttcatcagttcgatacgttcagcatcagacggaacaccgaatttaacaggaggacaacgagaaagcagagcactatgcacaccgttaatgttgttcgctgttacaatgacagaaacgtttttactgtatgcttcgataaagctacgtaagtgtttctgtgcttccgccataccagaacgatcgaattcatcaatgatgataatctttccgcctggtttctgcgtcattgatgaagcaaaacgatccagttcattacgaatgaagtttacaccacagttcgaaccgttgacaaagaacacctcagcatcaacctcacgggccaacacaagcgcgagggtcgttttaccagtgccaggggaatcagatacaagggtcatgttctcaacgcgcccagatttgattatgccccgcatagcggctttgtcaccagaaggtaaaatacactcttcaatcgttgttgggcgatagcgctgatcccatgcaaattcatcaggagatcgagagattttaccgtatttggtttcgatgatttcaatattttcactaagttccataatataccttcaaaataaatggtgtaaaagaaaggggccgtagccccttaaaactatcttacttgaatgtgctacttgcttcaagtactacgacgtaagcaacgccgttatcagaagagaattttgcggcccctttggaggaaatctcgactttgtaatcgctgttgatgaactgcatgttgtcaatcttcatatcaaaattgaaaacattgtcgccttcatactcaccgacttcaacagagaaagttgattgactttctttgcttttcgcggtgatgaccagtttaccatcaatcggttcgacggacaggtcggtcagtttcatcatgcgagacgctttgatcagtttttcgaaatcgttagccgtaatctggaaaatcagatctgctactggcatcaccagacgttttttcggtttcgggatcgtggttgcgtctgctgaacgttcgatgatcttcatcttgtcaccgcgaatcacgatttcaccagtggaaatatcatgagtgatttccgcgtcagtgccgacgatgtttagcatgttcaggaatgagttgagatcgtagataccaacatcttcatcaatcacatcagcaatttcagcttctgcgtatacaacgctgttgattgatttcgtcatgatgaatgaacctttggtcagcatgatcgaagagttgatttgagaaaagtttttcaggatatcaatagtttgtttagagaatttcatattcagcctttagttttcaataagtgttacttaataagtgattttacaacggtttccgctgctgtgtcaagcatatcagccatttctttaacggttgtacgcttcggatcttcgcggcgttcgctggttagtttacgatgttccgcaaccactttttcatcaatgtcacgatagtgtttaaaacgttcctcttgaggcatagctttaaacagttcttttgtttcgtccgagagtttagcaacccaggatttacggacgcggttcatgtagtcaacaaaaacattactttcattcatatatttcttctctaacttagaattctttgagtggggggccgaagcccccgcttgtattacatgtctaacagtttatccaggtcatcatcaccggagctatcagaatcatccagatcgaacggtacgccgtcatcttcacctaccggaaccgatgcaacgccaccagatgatttcacatcagatgtctgattgtcaaacttagccatttcgttatcgaagttgctcagttcgctatcaaggtcagcggaagcgctggaaccagcagaaccgatcgaactacccataactttattgaagcgagtagtaaggtcagccagcggtttgaattcgctttcggcagtaatcgggcggagatcgctcataccttcgaaaattgctttctgaacttcttcatcgtcgatgtttttgatcttagccggaacaccaaacgaactatcgtcatagttaggccaatcaccaacttttttcgctttcagagtgaagttagcaccatcaaacggacaggttacagcaatacccggttcatcaagttctggattaccgttaattgcggcggtgatcttgtccatgattttcttaccgaagcggtatttgaacaccttaccttcgttttccggagcgcctgggtctttaacgatcaggacgttagcccagaaactttgtttacgaccgatctggctcagtagtttatcttctggcccgtttttgttggctttagccttctcatacagatcgttttcggaaatgtacttacatgcaggacagccgtcataatcgccgtgggtagaggaacagttctcaatgtaccactggttgtttttcttgaaagagtggctcacgatacggacgaacgccagttcatcatcggaacgtgctgggagaaatcgaataacggcggaaccgtttttctgtgcgtccagggtcagtttccattctttctcatctttctggaagccggaaccacctttcagatttgctacctgtgcctggagtttagcgggatcttgacgtttaaaaatgctgctcatattctgttttctcgtttagtttagtttgattaacgtttgtttcattaagtttcgatattttatgatatctttttcagtaaggtcaaatatttttctgtatgcctttaacttaatgctaaagtcagaccaaataatatcatcagctacttgatcgtgtttatttatgatacctaaaaatgagtcaaaaatcaaaaacgattcgtaagatatcacatttgacaggacaagtttgcttatgtaggacgttgatgatttttcgctgtacttgaacaccagagacacggggatctctttcattttggcgaattcgtacacgtttttaacgtcatccacaaacacgttatctagtctttgtaactttcctatgtactgtctgtaaaagacaatactatcttcatcaacatcgcctacccagaaatccggattggctacgaagttggagaggaatataaaatagatttctttgaatgtaaagcgttgagctaattttacaaagaaatatctatcctttcgcttgttaaaggcgttttcactaactttgatctgccagttgtattgaaggacatcaaaacgcccctggaaatgagttttcatcgccagatataacttgtatacagacaaaggcacaagccgtgaattcgcctcgctatcagcaaacggagctttaaatctcacatgaagccgtccagagtggttgatgaactatgttcaagcgcaaccgatgggcgaagcatgtttcctttgatcgcttcgtcgctaatcttatcaaggatcgcgcgaggaaccgttttattcagcatcgcataatcaatggaattttcatccatccattgtagcgttgcttccatgtaggttgccccctcagaggcaaccaaattttcgatatacaaaccgacttcggtcttatttccgatcatgctttacgccttatcgatcatatcatacagttcgatcagttcgttgttttcttcttcgaaagcggtacgggcctgttcgtgatacagtttgaacagtttcccgaaggtttttccgtcgataccgaaatcagtttttgctttggatttgatatccttgaacgtaccgttgaagatctcaacttgagttttcacgttggatgcttctttgatcagttcttttacctgttttgctacatcagggtttgtttgtaaaaattctacactcattttgttacctcaaaaatcactcagtttttcgaacatacgggaaagtttgttatccatgaagtaacgttccattttggctttacttccggattttggagtattatacgctttgataatcgaattttcaatatcttttggtataaattcgaaatcgcgtagttcctcgttttctttgtaacgtgcggtccattcaggggtcatcaacgttgtcgggtcgtctgcctccagccatgcctctaactcagaggatttgaccgctggggcgcgttctccttcaaccttcgtcacaatataatcatttctaattttaatgcaagcgatactatcttttttatcgcctttgatatttttgtatcgcaaatcgttacgtggcgaaccgtacttaggcgttacccattttttctggggaggcgaccattgacgaacaccgttatatttctgtagttgtgtaaagtcgctatcagcggaaaccactaatactcgtctaccttcaccaacagcttttttcgtaacaacagcaattatatcatcagcttccgcaaattcaacctttaatccaagataaggcatattctgacggatttcttcgaacaccggattcaggaagttgttcagacgatcccaatcccattctgattcttcgtgttcgatctgacgacgttttttgtagtaccaggctttttgccgacgccagtaatttctgtcatcgaaggcaatcacgatttctggatactcacctttaaattttacaacgttaaaccgtaaagtgtcaagcaccagatgacgaatcatttcgatcgtgatggatgcttgttcctttggtttgaagttgttcatcagtgtagcgatggaaatgttagagatatcgatgaccatagtatcatcgggttccccttcatcttgcatcagcttgttcaagttaaacatgcttgcaaaactgctcatacatacctcaatttttcaaagaacggggttattgtagtaacttacgaaatgaagtcaatacaaaagaccataaaatttttgatcaataatacttgatctgatcaaatttatgatctataatttattaattaataattattttactacaatgatcattgtaggtcaagtactaaaatcaataaattttatataatttagatctgatctatagatcattagatctactttaaccttaaataatatagaatgaaatttgattttgtctacagttattatataatattcttaacttcaaagaggaaatatgaatactatgactaaagaaacaaccaatatctacgcagacaatgaaaaattataccctatcctctgtgcatggaaaaagcaaatcgccgaaacaggtgatcgcaaaatgcctaatgagttaggtgctgctattatggatattgcaaacgggctatcacgtcgttacaacttcaaccgttattccgaagattggaaaatggatatgattgatgacggaatttccgctgcaatctcaggactgcataacttcgatgaaactcgttataccaacgtttacggttacattaacaaagcatgttggcaagcattcgtaacacgtattctgtacgagaaaaaagagaacgcgaagaaatataaattcttccttgagcacgtttacgactgcgaagattcagatatggttagtattgcagacgaaggtttcattcaagatctacatgacaaactatctcagtacgaggcttccgccaccaaaaccaaagacaaggaagcggaagtattcccaacattggaagattttctatgaaagcaataattgacttaaacaaaatattaactgatatcgattacgaaattgacttgctaccctacttcgtaaaattagagttgcaaaacgtgggaatcccggttatcatcgatccaactgacgtaagaaaccccgatttcgaagtagaagaaggggttttgtcttatatgataaacgccgaaactatgatcatggagatcacttatgattgatgaagagaaagaagtactaaccagtgtggaagaagtggatccagaagaggaaattcgacaaaagatccaggcacgtgtagaagccgacgcattgaagcgagcacaaaaattcattaagaagaaccggactgagatcaaacgcctccgtagacacgcagaagaagccctattcaggggtaataaggttcagtatgtgtatgcggttaagaaactccgtgatatgctcaaacagccgtatacagaggatttcattgatacgatgtggaacacttcactagcatcaattcgaaatattgtagcttcacaacagaagcactaacaaacaagtagccccgaaaggggctatgagggtcttatgagaaagtacttaatgatcggggatactcacgctggcttgcgtcaggacaacccctggaatgaagaaaacctatacaatgtattcgtgcaaatcgtagaacactgcaaagcaaacggcattaccgaggctttccatgcgggtgatttctttgatgtgcgcaaggccaccacacaaaccacgatgaaattcattcgtgaacgtattgtgccactactggaagaagccggattgcatatctatgttctagttgggaaccacgattgccagtttaaagacaagatccgccctaactcgccgcgagagattcttgatcagtatgattgctttactgttgttgatgaaccgatgacagtaaatcttgatacttctccactacaatcaatcgatttgatcccgtggatttgtcaagaaaacacacagcagatttttgatttcatcaaaaagtcaaaatctcaatactgcttaggacactttgaactgtccggatattatttctataagaacagtaaagcggatcatgggcttgaacctgatttcttaaagaaatatgacatcgtgtattcaggccactatcatcacgctaacgaaggcgctaacgttttctatatcggcacaccgcttaccatgagcgcgaacgatgaggacgaaaccaggggcttctatgagctatcttatagcgatggtaaacgtgaactaactttcattgctaacccagtgtgccaccatcgccggatcacctatccggatcaaaaagatgttgatgtttctgattacaaaaattgctctgttcgtttgattgtacgcgaagttgataacgatttgcctaagtttcaaacaaaactggaagaaatagtttatgagttgaacattgtcgatcgcgtgatcacagattcagaagttgatactgactttgaaatcaaaagcgtatctggattgattagtgagtacatcaacaacatgcagatcactccagaagaaaagaccgaagtgtctgcaataatgagtgcattgtatgcagaggttacgagcaatggaaatagttgattacgttaatattttaaacgaaaaagggcgatataaagccctttataaaatgtttggatttgatgtgattgttgcagtacagcaggattcctataatgagtatgtgtcattggggtttactctggttaaagacaactatcacgaaacaaaggtttggacatttactgtcctgaatagcatggatgaagattccgtgatatactgctttgatagcacgattacaaacatgattagtgatatatcccaaaggataattgatgaaactcaaatttaaaacattgacttatcaaaatatcttgtcggttggtaacgtaccgatcgtcattgattttgattcagcaaagaaaaccctcattacgggtaaaaacggtggtggtaaatccaccatgatcgaagcgcttacatatgctctctttggtaagtcatttcgcgatctgaaagtcgggcaactggtgaacagtatcaacaagaaaaaatgtctggttgaactgttgatcgaatacggcaatgatgaatataaaatcatccgtggacaaaagccgaaagtatttgagatctggaagaatggcgaaaaactgccggaagattcagccgctggtgattatcaatcacagcttgaatcaatgctgaatattaacctggttgggtttaaacaggttatcgttctgggtactgctggttacgttcctttcatggaactgaaaacaccagatcgccgtaaattggttgaagatttgctgtctctgtctattatcagtgaaatggacaaactgaacaaatcatacatccgtggtgttaaccgtgaactggatacgctttcaatgcagattggacacgtacaacagcagatcgcaacacatcaaaagttcattgacgaacaacgggcaaaagcaaatcagaataccgcgcgttaccaggatatctatgattcccacgtagaaacagcaaaacaaatcaaagcacaattggtcgaactgcaaagccagatcgcagaatgtgtgatcaatggcgaagaccaaacagcaaatattcaaaaattgcgtgatggttatacgcggctctcaatgaacgtagaacagttgcaacgtcttgaggtgatgtatcgcaagggtggcgaatgtccggcctgtaaacagccaattagccccactcctgaacgcatggaagagattgcagagaacattaaaaatggtactcagaaacttacgctgattaagaacaagcaagatcagctacagaaaatcatggatgatttactaacacaacaacgtacactaaatgggctgaaatccaaatacgaatcactacgcggtacacttcaaaacgaagttgcagcggctaaacgtgttcgggctgtcatggataaagcacaggaagacgtggtgatcgacgaatccccagttgaaaaactccgtgaagatgaaaaggaacttgattctaaacgttctggatttgtcaaggaaaaatatttcagaggtattgttacggatctgctgaaagattccggcgttaaagcgagtatcgttaaacgttatattccttacttcaataaacagattgcgtactatctggatctgttgggtgctgattatcagttcactctggatgatgaatttaacgaatcgattaaatcgctgggtcgtaatgattttagctatgcgtcattcagtcaaggggaaagagcacgtatcaaccttgctttactgttcacctggcgcgatgtaaccagtaaaatttctggtgttgatttatcccttctgatcctggatgaagtgtacgatggtgcaattgatcgtgatggtagttttgccgtaaaagcgctattggatgggataaatggtaacgtaattgttatcagtcatcaggatttagatccggaagatttcgaccgacatattgttatgtcaaaagtcggtcgattctctaaaatggaagttaagaagtcttaaacttgcagttatcaaaatgccagcgattcatattgctggcatcaccagatttattgcaatatggacaaatcaactgtttcctttttgcctgggtctttctatctgggttatttctgcaatacggtatatgtgaacgcagataatgtaatgaagattctgttccgcaatatggacaattccccctttctttaggtacgtttccgttcttatgggaacacgggataccctcaaacttatgtttcaatccttcattacctggtttcagtttgcagttgtcgaagtgccaacgagtcatatttccaattatacctgattttccgcaatgaggacatacaaccctttcttgttgctttttggctttactcattcgctgtctggtttcttcggtgaactctctgttcctatgtgcttctgacgcctttttctttaaccattcatagcggcggttagctgttctttcctttgatctattggaaccaactgttaacatatgtgctgcaaaaacaagtttgttgtttcctgggtacatcttgactaataacagatgcgcaatataatgttgacgcgctgtaagattaaccaaattatcatcagaatctgttccacctatgcacttaggtatgatatggtgtgattctgtatatccatcatactgcgtttgtttagcatgttctatgatagagttataaattttgttatagttcataaacatatctcttgtttgatgggccgttagatacccctatttaagaggatgaaattatgttattagaaaaatcttttgaattagaaaccgctctggaaatagagcggttttatctccataacaattttcttgaagaaaaacatatagttacaatgaaagatgttgaagaagcattcaaaaacaatcctatagaattgacaagaatcaagaacaacaaaagttctgtttggttcctcgaaaaaatctattgactgaaatccataaatacagtaaagtagcccatgtaacgaaacgtgggctttgtttttatttgaggaaaaataaatgatcaccgaatccaaaatgacttatcaggaagcattgaaagttttgggcgcaactggtagcgaaaccagcgctgaaatgtccagacttttcaaacgtgcctccttacgcaatcacccagaccgtggtggtagcaatgaattaatgcagaaaattaaccaggcttacgatgtcgttacaaaaactgggcctagtggcgcacgttctgagactgctggtgatgttcgcgcacgttatgcccgtcaaaagaaagaatgggaagaaaaagttgatgcttactttgtagtggcgaaaaactatttcagcaccaaatttaacgcacaggaatttgcggaatacttcaccaaatacactgggttgcctactactttcaaacaggaagtaacaaaaggtagtcacggtgtttatgcttcgttccgtttcacttctggtgatgcttactttgatttcggtttcaactgcacccctccgaatggacaagggttagccgctccggattcatctgcactgggtagcgtttctgttagtacctttgtactggttggaaccaaaaaacacaaaatggcaagccgtgattatcaatggggcaaaaacccagataagatcactccggaaagcctgttcccgtctaaaaaactggaaagtattttcagccctgtacagaaaaatatcaaatacaaacgtgctgattacctggcgtcattccgtaagctgttaggcgctgacgttagcggaaacgatatctttgttgaagttggtacactgaaagttcgtttctatcgtcacgtattcatgcgcaaaggtgcttatgtgtttagcgcggtgtatgatcctgctgtagctaagtatcgtccggctgcacaacttcgcggaaccatgtttgaagacgaagacggcgcttgcctggatatgatcgttgatacattcaaagaattacagaaactgaaaccgagtgttcaaggcgttgtgaacgcgatcgataagatgaacgcagagtttgcggcggggcatcgttcagcatcttttgttaaacgtgtagctgctcaggaagccgcaccaaaaccagaagagaagccgaaacgtacagttaaccgtgttggtaaagaggaatactacgcagcctttaaacaaattggtgctcgcgtaatgcctacaagcggttatgttgagtttgataacggcgctggcgttaccatcaacttcaaacgtgttatcgtaaaccgtaaagcgtcttatgtgttcaacagctttaactttatgcattccggtatgaaacatgttgagtggttgaaggatatcgacattgcagaagataccaaaggcgcaagtattagcttgatcaccgatactctgaaatctttacgcggtatctctgactggaacaccgttaagagtgctttagagcaaatgaattccaacttcaaagcgggtaaattctccgcgcctcatgtgaagaaggaagcagagcaaaaagcaccgaaacagaaagacgaaatcggcgcacagcctaccaaaccacaggcggctaagaaagatacaccggaagtggaaaaatcacaggctgttcatgcagcacgtgagaaagcgaatatgaacaacactattcgtaaaatgatgactatgttagtcaaagcacagcgtaaagacactccggaagatatcaagaaggaagttgatgcagcaattcaattgtggcgcttgacttactaatcaaatgaactataatgggaactgttaacgcagttccctttttatttgaggaaaatattatgagttgtccaacatggttacgtttggaaaatccgaaagaaggtacacaaaaacgaatttatattaatcttggttgggttccacctacagattttcaaatggctgagattttaatcaacgctattaaagaagtaagcgacacttacgaatgggaaaggctctattttcctttaattggtttgtatatgacgcgaaataaatttgaagaaatgaaacttgctgttattcgcgctacggctattaattaccaacaaagatttactttgaaaaatgcatggagttctgaatgattattcaagtatctgtacagggtgacactctgactgtcacacaatccatcaataccgctcttgctgtatgtcgtgaccatatctcgcaaaatcctccagtgactgagatcctggaaattgatgtttgggatcagattgggatgatcgacgcatcatatggatttaccccgcgagaagaagaattatctcgtatcgaatcatggttgaatgaacaggaaacggaatgaaactccctaagaacacaacactactaacccgcgaaaaacttcactctgttgattggtgtcctctggatatcatgatttttgatattgaatctcgcgtgatcaatgcaaaatatcaggggtgtagtattttctctgttgaattcgagaagattcgcggatatgatgagaagtacaaagaaaaactgaaagttatgattgaagcattaggctatattgtaactgttgaagacaacaaaatgtggatcgcaatatgagcatagtaaaagcggtgtttgcattgggaattgatatctatcacgatgatttcgcttttggatatcagcaagggttgccgtggggccactgtaaagaagatttgcagaacttcaaagaagaaaccgcagatagcgttttgatcatgggtgcaaatacgtttacctctcttccgggtaaacttcctggtaggatccattgtgttctgtctggttcaggtagttttttgaaaaccaaaaaaggcgacgttgctgattacgtgatccacggtggcgggttgtctgctgctattggtacaatgcaagcaacacacccagataaaaatgtatgtgtcatcggtggtaaggggttgcttttagattcaatcaataataaaatggttgatgaagtaattttgacaaacatttacggacatcatgtgtataacgcaccagcgtttaaacgtgatgttgcgtttactctttctgaactgggtggcgcattattaaaatatgaattttctgatttaaaaactcagtacataaaagaacatgaacgcattgaaaaaatcgtagttgaacgatataaaaaggtataaaatgaaacaatatctggatattattaaacttgtacttgataacggtgttgaatcaactgatcgcactggtgtaggtactattcgtattttcggcgcacaagcccgatgggatctaaacagaggtttccccgcaactacctgtaaaaaactgttcttcaagccttgcaagcatgaattgcaatggttcctgtctggttctaccaacgtggaagaactgcgtgagatgacgtggggcgaaggaagcaacaaacgcaccatctgggacgataactatgagaatcaggctaaagcgctaggctattctcatggctacttaggcccgatctatggtcatcaatggcgttcgtttggcggtgatttgtacggaaatcacagcgttgaccagattgctcgaatcgtcaaagaactgaaagaaaaaccggacgatcgcgggatcatcgtttctgcatggaaccctgttgatctggataaaatggctttgcgtccgtgtcactgtttcttccagttcgttgtaatcaacggtaaactgtctctacagtggtatcagcgttcagttgatgtcttcttagggttgccgttcaatatcgcctcctatgctctcctgacgcatattatcgctgatatttgcggttatgaagtgggcgatctggtttggactggtggtgatgtccatatctataaaaatgcggtcgaacaggcaaaagaacttttacagcctaaccgttcaccaatgccattaccgattctaaaaatgccgaaggtaaatagcttacttgatttagatcaagaattctttgactcgataaccttagaagggtatcataatcacggctctctaaaagctgaaatggcagtatgaaaaatggggcttcggcccctttcttaacaaggtaagagaatgaatgacattaaagtagtagtaaaatcctctggtgtacgccagccgtttgacaaagaaaaaatatacaaagtgctcaagtgggcttgtgatggtcataatatcgatgttcgtgcattccttgaaaatgtattagaactgatccgcgatggtatgactaccaaacaaattcaacgtatcgctatcaagtatgcagcagatcatatttctgttaaagaaccggattggcaatacgtagcatcgaatcttgaaatgtttgcattgcgtaaagacgtttatggtcagttcgatcctatcccgttctacgatcacatcgttaaaatggttgaagcggggaaatacgacaaagaaatcctggaaaaatacagcaagcaagatattcaagttttcgaacgtgcaattgatcatgataaagattttgaattttcgtatgctggttcccaacagttaatcgggaaatatctggttcaggatcgcgatactggcgaaatctttgaaacccctcagtatgcgtttatgcttattgcgatgtgtctgcatcaggaagaaactgggttagcacaggttacgcatatcattgatttttataacgcaatttccgatcgcaaactgtctctaccaactccaattatggcgggtgtacgtactcctacgcgccagttctccagttgtgtagtaattgaatcaggggattctcttggttctcttaacgctgtaacctctgcgatcgtgaagtatatttcacaacgtgctggtattggggttaacgcggggcatattcgcgcaatgggttctaaaatccgtggtggtgaagctgttcatactggtgtgattcctttctggaaacatatccaaaccgctgttaaatcctgttcacagggtggcgttcgtggtggtgctgcaacattgtattatcctttctggcatctggaagttgaaaaccttctggtattgaagaacaacaaaggcgtagaagaaaaccgcgttcgtcatcttgattacggtgtacagcttaaccagttgatgtataaacgcttaatgaatcgtgattacattacgctgtttagtccggatgttgctaacgatcgtctgtatgatctgttctatgaagctgatcaaactgcatttgaagaactgtatgaaagcctggaaaaagatccaactgttcgtaagaaacgcatcaaagcggttgacctgttccaacttttagcacaggaacgcgcacagacaggccgcaaatacattttcaacactcatcacgtcaaccaacagggtagttttacggttcctatccgtatgtctaacctctgctgtgagattgcgatcccaacgtctccgctggatgacgatgataaaatggctggtgaaattggattgtgtacgctaatggctatcgttctggataacgctgatatcagtgaattcccgaaactcacacgtattgcagtacgtgcgcttgataacctgctggattaccagaactaccccgtaaaagccgctctgaaagctaaacagcgtcgttctctgggtgttggtatcaccaactatgcatcatggttagcaagcaactattgcgactactcagaagcgtatacagacaaagttcatgagttaatggaagcgtttcagtttaaccttctcgttgcttctatggaactggcgaaagaacgtggtgcgtgtggattgtacaacgataccaaatacgctcgcggattactgcctatcgattggtattgcaaaactgttgatgaactggtagcacctgtttataattgcgattgggaatggttacgcagccagattaaaaaatacggcttgcgcaactctactctttctgctttaatgccttgtgaaagtagttcacaggttagtaactctaccaacgggatcgaacctccgcgcggtttagtgagtatcaaatcttcgaaagaaggacactataaccaggttgtgccaaaccaaaataaccagattgatttctatgatctgctctgggatatggctaaacgcggtaacaaagggtatctgtctcacgtagcagttatgcagaagtttgtagatcagtctatttctgcaaacaccaactatgacccggcaaactatgaagacgggaaagttaaaacagaagacatcattgatgatctgctgtatgctaactactacggtgttaaaaccttgtactatcataatacgcgtgatggtgctggtgatgaagatgaagccgccgacgattgcgcgggttgcaagatttgattaatgccccttcgggggctttttaaaggtaaagacatgttaacagtaatgaatacaaacccagatcataaccacttagaccaacctatgttttttggtgaagatactggtgttgcacgttatgaatcgcagaaacacaaagttttcgaaagcctgacacaaaaacaactttctttcttctggcgtccggaagaagtcgacctgtctactgaccgtatgcagtacgcaaaacttcctgaacatgaaaaaatcattttcgattctaacctacagtatcaaaccctgttagataccattcagggacgtgggcctaacctcgcatttttgccaattgcatccgatgtgagtatggaaacatggatcgaaacgtgggcgtttagtgaaaccattcacagccgtagttacacgcatattcaacgtaacttgcacattgatccttctgtacagttcgaccagatccttcgtaatgaagcgattatgaaacgttccgcatcgatgacacggtattatgatactctgattgatgaatgtcataagctgaaaaccatcatgatgctacaggaacaggttagcggctataaaccaaatgatccggctgtcgtgtattataacgagcaatacactaaacaggccactaagtgcaaagaagcgctgtacctgtgtatgcacgctgtgaacgctctcgaagcgatccgcttctatgtgtcgtttagtttcacctttaactttgctgaacaaggcaagatggaaggcaacgcgaaaattatgcgcctgattgcgcgtgatgaagcattgcatcagaaaggtactcagagtaaaatccgtttgtggcaaatgggtaaagatgatccagaaatggttgaaatctcccgtaggctgaaaaaagaagcaacggctatcttcctggaagtatatgaacaggaaaaagaatgggctgaacatttattctctgttggtgatgtagaaggtgtatcgctgaaaagcactatcgcttatattgaacacctgacagatcagcgtatgcgagcggtcgggcttgattcaccattcaccccgatccctaacccgtatccgtggatgaataaatggctcaaaagtgataacgtacaggttgccccgcaagaggttgaagtaagttcttacctcgtcggaaacctgaatactgaaatcagcgatgaagcgtatgcaaaatgggccagcaaatacgcgtgattgtcgggtagtaaacaagtacaaaactgattgggatgtcgatattcaaagaggtacgaagttcggcaacccttatcacacaggaaccaggggagaaaacattttagcgtttatcccctggttccagaatcaggttcgtactggggcgatcacgattgaagaattgaaagaacttgatggtaagaggcttggttgtacctgtgcgcctcttccctgtcacggtgattacatcgcgcatgtggttaatgttttgtgtggtaagaaaagatcacttgactttttggatatataatgtatgaaatctgaattcaacttaacccttgataaatgtggtcgcatcgatcgaagttttgttaagtgtggtgaacttaggcattgtgtttattttattgcaattaacgatgaaatagtatatgttggtaaatgtcgggatatgtggaagcgtttagacacgtatcgcaatgcaaagtattggagagaagccaaccccagcaacatcttaaaaacgtgtcgattggaaatggctatcaaaaaacgaaaaactgtgaaacttatcgtgactactcacgatgaaaatacatatcatgattatgaaatcaacatgatacgaaaatacaaccctgaatggaataaacagcactatgacaaaggcacaaactaaaattatcaataccctttacaaacaactcatgcagttgtgcggtgaatctgaaacatttttcttcgttgatcaagtaaccgtgatgggtacacctgttcgaatctttaactatcgcatggcctcatatacagactggctaaagcctggtgctctggaatgtcgcggtatcatgtttgaaatgaatggagatacccccgtatcaatcatcagccgccctatggagaagttttttaactatgccgaggtaaaggcatgggaagcgcttaacgagtctcctattgaattaggcgacgttttagacgtgatgattaaagaagatggttccttgatctcaactttccttgatggtggatttctgtctgttaagtctaaaggttcggttaaatcagaacaagctatggatgcacaaagcgtgttaatggcaaaccgtgaattgctgacccgtttaactgagatcgcaaaagaaaactatacggtgaatatggaatatgtttccccgaaaaaccgtattgtcgttggttatgattctcctgatctgcgtatcctgaacgttcgtcacaacatcacgggtgaatacatcccttatgatgatctgtttgctgacgcgctgttacgtgcgtatctggttaagcgtgagaatatcgaagtactggatctggatgcattcgcaaaagaagcatatcagaatgaaggattcgaaggctatgttgttctgacaacgaaaggatttgtaaaaatcaaaacaaactggtatgtcaacctgcatcgcacaaaagatagcattaccaacaataaggatcttttcctaaatattgttgagaatacggtcgatgacctgaaacagctattcagttcggatctggtctccctgaaaaagattgacgatttcgaaaaacttttccttgatagtctcaatcgtttgagtgcaaaagcattcaaagccattgaagataacaaagggaaatcacgtaaagattttgctatcagtctaagcgcggatttgtcaaacgacggtcggatcatattcgggcctcttatgaagtatttcgaagaaaccgatccacaaaaactggttgaccgcatcattgacatgatggttaaaaattacgaccagttcattcctgaacaatataaatgaggttcataatgcctaagatatcatcttgggtatggcctgtaatcgtggggctatctttgatagcccttttttacattgcagtcgataccaaaatcgaaaacgcatcgttacgcaaggatatcaaatctttgcaagatgatgtgaagaaagtaaaagagacaaatacaagcaatactgttatctacgtggaacaaaaatccaaagatcagcagttagtcaaggatgcagggcgcaaacaccttttgtttgagaaacctggattgattgaaatcaaaatcaacaaatccttcgacgaatacatgcaggaatttgaaaaatgaaattagcaatgatagtattacttggtgtttttctcgttggttgtgcggaacagccacctgttaaggtacttcctacgctacccgcaaaggttaacccagtgaaggtaaaatggaaagtaattgcagacgttagagaaatcgacgggaaacaataccttgtaatgccatatgatggtaatccttatgttgcattgacatatccagattcattgattttacgtagctggatgaatgacgttaaaagacaaaaggatcaaaccgataatgttctgtgtacgttaggataccctgagaaatgcaaatcaaaataaccaaaaccttttttcgtgacataacagaaggaaaagtgtatactgcgaaaaaggataaagaaggtctatggatagaaaatgactggaaccgtgatatgtggctcaatcttacgaatgagcataacaaagaactaattgaatatgagatagtgaaatgaatctgtttatgactattggcgttccgggtagtggaaaaactacctgggcgcatgagaaagcccgtgaattgggtaatactgttacgatctctcgcgatgatctgcgtagctctttgtataatgctggtaaaggtgctggcggatacaaatacaccaaagcgaaagaagaaatgattgcagaaatgcaagatcacgttgttatctctactctgaaagatggtaaaaacgtgatcatacacaacacgcatctgaaagaaagtgataaaaatcactggcgtgaaattgcattggaacacaaggcagattttcatattgaatattttgatgtgtccattgttgaattgcttcgccgtaaccacaaacgcggtcgtgatgcattacccgtttcgcgtgtttgggaaatgtttaaccagtatcgtaagatccgtgggttcgtaccagcaatggaaattgttaatccacacaatcagaagtgtgtgatctttgatgttgacggtacgctaacaaaagtagggcaacgtagcccgtatgactttaccaaagtgatcaatgatccgccaaacatcccgatacaacaactgtttcacctgtacaaaaatgcagggtataaatgtgttgttgtgtctgggcgtgaaggtaatccgcaatgcgcacatgatacatgggttagcctgttgagttatggcgttgaaccggatgaaatttttatgcgtcaagaaggtgataccaggacagattttgaagtaaaagaagaaattttgtttgacaagattttagataagtattatcctgttattgcagtggacgatagagacactccggtcggaatgtggcgagcaaacgggattccgtgcttacaagtcgattatggtgatttctgattgacatataatgtgggtatgttaaagtacccacacaaaagaggattatattatgaacgttattcgtgaagataaacacatcatggttgaacttggcgatcgcattcgcgtagaaaatctgggcgattttaaccaaaaagttcgtttgttgtgccaaaaaattgctaacaaaattcaggaacagggtaaagctccgggcgggtttgaagttagcgccactccggtttctcagtactcctatattgtgtatattcatgacgtggatactaacagcacccaatctttcgggctggtgttaaatcctattactggctacgttacatgggcggctgtattatgaacgtaaaaattattgatagagcggtaatcacggacgaatctgtatacccggatcctcgttattatggcggtgttttcggatacatcaaaggaactgatattgatgtagtaacaagtccgattgcagaatatgatatcaacaaaaatcagacagaagttcgcgttactacaatcaacggttcagaatatatcgttgaagcgactcctgattttatcaaacagctactaaaggtgatgaaagatgcttgatcatcctggctctatgagtatggtgctcctggaagcattaaaagcatatgatattccttgtcatttcggtgaagtaactgttaatactatcattgacgaaatcgacaacccaaatactttcattgcttgtcttgttcgaaaattcacaagttgttttcgaccgagtccagaaaaagtagtaatcagttctgtttctgcacatcatcgagtgttagatgatggaaagattcaactttactggaaagttctttatcacgtggtgtatcatgaagattgatgatattatgtttatgcttagagcaataagcgcttctaagttctctcaatgtgtctctgttaatgtcggtgctgcattgagaaatggtaacgggcgtgtgtttgtaggcgcaaataatacggttgatcctagtcatcgttgtacagatcagtgcaatcacttattagatgataatgggaaactgagtgaagaaaagcgccctgaacattcacaatggtcagatcgcaacgaagtacacgcagaaatgcgcgttattatgctggcggcgtctcatgaacaaatcaaagacgcaactttgtatacaactcattccccttgctcacaatgtgcgaaaaatatcgaattttgtgttgcaacaggtatgattaagcgtgtagtatatctacataaatacgatcgtggtggcatcgagtggatatggcgtctacagcaatacggtgccgaagtagtacaacttgaccccgaagaaatgaataaacatttccggatcaaataacaaatgagtaaatgtatgtctgaactgagtgtaaaagcatcctttgaatatgttttgattgaaaccaacgctaaagcggctggaactgaaattgtatcaccttctggtattgtgactggtgttcgtcaacacggcgaggaaccgatctacggcacagtgttatcatgtgggccggatgtaccggaagaatataaaaccctgcttatgggtaagcgcgtaccgcttcctcatgcacaaatggcaaacgtgccggatcctgaactgattgcaggaaaggcaacaaaagaagaagctcgcaagtatccggttaaatatgtaaccgcacactataaagcgattcaagcaatttacgaataagagatccaacatggctaaacaaattcaagcaatcatcgccgataccgtcgcaaaatccaaaaaacttttcgacaaaggcgacatcctcgaagcaccgacccgcatcgatgtaatgacttcaatgatcattgatgctcaccagggaaaactgaattcccgtgcttcggaagtaatggaatacatcgtacagttcgaggatgtatgcaaatacgccaaagctgttgatccggctgttcgcgaaatctaccgcaaacagttctaaaaatatcggccccttagctcaataggtagagctaatcactcataatggttaggttcccggttcaagtcacgggaggggccaccaaacaaggcaaggcacttagagaagcgggaggaacagaatctgattctgttggttgtaggtgcaaatcctacccttgccaccaaatttgggtgcgagcgcaatgccgttaaatggttcggaatatgcaaccttatccacgggaaaggctctgttggtatccggtaataggttccccggaatgcggggtgaagtaaagaaactcccagcccactaattttaatgaggtttatatgaaatttcgtgaaactgtgaaataccataacgcggtcgaatatacacagatttttgttgatatgtctcctgcaaaattcaaagaacgctatggtatgacatttaatgaatggaaagctggattatccgatggggattatcgaaaaaacttcaaattcagtgaatgttatgtagatgatgatccttacgatcaggagattttcggtaaaacaacacctctcattgagaattcaccagaacagctttacgaatcttgtattgattccgcatacgaaatttaaagagatatcatgaaaaatttacaaaaactgtttgaaatgtctccggcaattagaaaaatcatcggagaaaatagcaatccaacgaatcgcaataaaaagttgatggaactttttgtaaaagagttcgatgattttgattctgaacttcataaagcgtttgaggcatattccaaacaagggttctttgcatcaccgcaagtgaatagtaagaaagagtatagcgaacgattctttgattgggagattgtcaatctcgttcgtagaacagatatatctccgagcaatcaccaattgatttctcttgatacttcggtattctttatccagtatcttatcagtggtggtttcaaaaatcctgaaattccgtttacaaatgaagcggttagcagtgaatttgatgaatcatttgtatacatcagcacaaacaaataatcaaatggctatcttcggatagacttatttttggggtgtctatgcgctttttaaagtatgcaagttggatcgtactcgtccctcttgacattattactggagtattagcaattctgtttgccccgtttgttgtgccgttctacaacgagaaaacagggcatcttcctaaaggattccggtggatggaaaccttcgataaccctattgatggtgatggtggacatatccgccgttgggcgtctatacgctatcatctgggggcttttggggtatacatgcagcgtgttggctggttgtggagaaacaaggcttataacttcgcatatcacgttttaggacgtgaagcgacaagcaaattcaactggaaaggcaacccaaaaacagaaggtgggccaaaccccgtaaatcatggatatctgctcatgtggaatgaatcagcatgggggttgtatgtctataaaccgtggctacggatccacaaggtgcaattctgtttgcgtgtttatgctggatggaagctgaaacaagaagttagcgaccctgttaacctggatcgtgcaatgctggcgtttcatttcaatccattcaggtattatgtaatcaagtaaaggtaatacaatgaaagcatttcaaattttagaaggtttgcatactggtacaatctatctggaagaaggtaacgacgttcggatcgtagtatcaaaaacattaactatggattctgtgatcggtaaagctcgcgttactccgtttgcaaagcgagagatcgagatcgaatatcagccaactgttaaagtggaaggtggacaacatctaaacgttaacgtgttgcgccgcgaaactctcctggatgcggttgaacatcctgaaaaatatccgcagttgacgatccgtgtatctggttatgcagtgcgttttaactcactgactcctgaacagcaacgcgacgttattgcccgtacttttacagagagtctataatggcaatttctgatatcacgggttataaaccccatactgataaaaaagtagaaacagtaaaccgtatcaaagatgctgaaaatgcattaggtgcaatcctggaagatatcgaacagcgactatcaaattcagatattgattcgctgatagaggaagaattagatgaggtgcttgaacgtatccatcaaattcaactggcgaaagaccgactgaaagaagcctctatgtgggcgtgtcgtgcggtgttccagcctgacgaaaaatattaaaaatcaagccgttgccgaaaggtagcggcttttttcgtttttacataaaaagttgttgactctcttctcacattaccttatagttaatcccgtagacaagaaaacacttttatgaggatgacattatgaaacgctcttacaacatgaatgaactggttttcttcaaaactcgtcgtgaagcccgtgcttacgttctggcggctggtaaaaatacttctgctgctatcgatatgggtactgataaagctgttggtgctcgttgggccgctgttatcgttatcgctgctcctgttactccggttaaaactctggtacttggtgcgcgtcacgctgaaactctgaaaaccagcacttatgggacgggtggtgttcataatgttacagtcatcaaaaaacgtagctttggtgcgagggtttaataatgagtacaaaagaattagaacaaaaagtaatggggttcatgagtaacagcgaagatcgctatgcgaaacacctcattgtcgaactgattgccgagctacgccgtcgtgatcgggagatcgaagacctgaaagcagaaaagcgtgtcgttcgtgaagtatatgtagaacgtccagaagaatataactttggccctggtggtgcataatgagttcaatcaacactgaaaaagattttgtgatgtttgtcggagttcagaccgtaaagaaagacatcttcggtaatctgtacctgtcaaacgatgatcgttaccctgcatcattcgataccgaagaggatgcatatatcgcgaagaacaacagcgataacgaagacattcgtaagtatgcgcggctttatagccgtgaagtaacaacgcgcctggagagagcataatgaaacaatattttattgaagcggcagatcgtatcgttctggctctattgaactggaaccgtcgccaggatgtttctatcgtggcatcaaccaacgggacaacatacgaccgttatgatccggcgcgtggactccataaggtgaaagaatgagagaacatgttctgattcttaatgacgcttattttagccgtgatatggtgtatagtctggcgaagtatggtgtgttgttacgttgtgtaagcacaaaggctggcagaaaactcgaagttgttctggaaggtagggcggaagatatcgacagttacatggctcatattgacgcggtaagaactggatattctcactgggataaggtatcattgctatgaaatactacggattcaaaacgagtcattttggtaaagcgtatcgcacagaaaacatcgatcgcaaacgtccgtactatgattcgttagtacgagcgggacgtaaacgcgctcgccaggaagggaagaaagagggtgaagatcgtggataactggaaaacatggatatcaattatcgttggtgttatcatcgggcgcggtttgtatgatttaatcttttcaataggggttaactatggacattggttcgggtagccagtacccatcatgcgcgttaagcaactttgcccctcatccatttacgtttgatggggtagaatgtgcatcaatggagggctttttgcaaagccttaaattcagtaatcccgatatgcaagcccatgtgtgtactctggtaggcaaggccgcaaagttcaaaggcaaaaagaaaaaatggtggactaaccagaccctatactggaaaggtatccctattcatcgttcctctgaggcgtatcaaatcctgattgaaaacgcatataatgcgttattccttaatgaagggtttcgccgtgcgctggcagcaaccggaaaaagtaccttgacacattcaatgggaaagaataaaataaatgaaactgtactgactgaaagagagtttgtacgcaacttaacccgattgagagatctattatgagtgaaaaagaaagagtagaatgtgtgttccttttcaaaggcgcgatcaatccattagcgttactgtatgcgcaacatgcattacgttcaacgttgattcaaagtgtcatctataaagcaggtgtgtattatgttaccatcggcgcaaataacatggttgttattgaatcctacgttaaggaatgtgcatcaaacggcgttgtctttgataaagtcgattttgatgctggggtagatgctgtttatatgtataagggttaatatgagttacgtagtttatttcgattgttcggatctcgatccgttcgtgcttcaacaggcaaagaaatatcatcaagatgttgttggcattggtgtaacaaatgatgatatgctgtgtattgaatttgaatactatcgtaaattcgagcgtgattatttcctgggtgaattgaacgcattcaaaagtacccttttctttgatcgttatgaggttatatcttgaaacctgttattcttaccgatattgacggcatcgccgtaaaatggcagtcggggttgccgttctttttgtctaagcacaacatgcctactgatattgcattggaaatggttacggatgaaaaatttcgtgatatgactgaaatcttcggatgtgatcagcagttggctaaaatccttatggaagaatacaataacagttctttcattcgttatctgaacgcgtatgatgatgcattgattgtgatcaaccgtctgaaaacgcaatatgatttcgttgccgttaccgccctgggaacaacaccaacagcaagccttaaccgaattgctaacctgaatactctttttccttctgcgtttaaagaggtgatggtcgtgggccacggtgaaacaaaaactcatcgttacctggaagctaaagcaaagtatggtaatcgtctggtttgctttgtcgatgatctcgcgataaacttaaacgaatgtcataacgtcattagccagttgccgttattccatatgttacgtggtgaacgtgaagaaacaaatgcacctcatcagttagtaaaatcgtggtttgaaattgaagagaaattaaatgatcttgtcaatccttaatgaacttgcttccactctgaaaactaaagagaaagaagcaattttaaaacgtaacgcagataatgaattgttgaaagaagttttccgcattacgtatacaaaacagattatgttttatgtgcgccagttccctctggtagaagggaaaccaggcacaacaccgctttccgatgcaatcaaagcattgctggaagatttagcaagccggaaatatacaggcaatgcagcgcgtgatcgtttattggatattgtatcatcagtgaacattaacgatcgtgaagtgctacgccgtatcattaaccgcgatctggaatgtggtgctggcacaaccttaccaaatcgggtatggaaaaaacttatacctgaacagcctcaatgcctcgctacgccgtttagtgaaaaggctttacgtcgcatcattttccctgcttactcgcagcttaaagccgatggtgcgcgttgtatggctgatttgttggaagcattaaaccgtaaggtatcgagggcgggtaacgagtacgaagggttaacccaacttgatatcgatctgaaaaagatgcgcgattatctgggatatgatgtagttctggatggagaattgatttatgttccttccggaaccgtaccaacattacctgaacctgaaacagacatgcctttttctttatctgctttcatggacgatgatgataacgacattgcgttatttgcggaagaagttcgcaaagtatcgaccccagaagaagaacaggccgaagcaaaacgcgaagaagggaacgggatcgtaaacaaatctctgaaagggacgatcaccgaagaagaacagcgaaacattgtttatgttgtttgggatattattccatatgaggtgtattacggcgaagctgaaagtgttcagacttatgatgaacggtttagcctgttgcgcgatatcctcctggatctttctctgccttctgttcgtttgattcagtctaagctggtgaataacattgcagaagcgaaacaggactataacaattaccgcaatgacggtaaagaaggttctattctcaaaaacagaaacttcaaatggaaagattcgcgagtagccgatcaggttaagctgaaaaacaaaaccccgattgaattacggatcattgatatctacgcgcacactaaagaagaccataaggtcggcgggtttgttgtggaagatttatccggaatggctcgaacgaataccggatctgggttaactgatacagattatcgttacgatgatgatggcattacccgtgtatacattccattagatgaacgtggtgaactggatcgcgaatacatcatggcgcataaagatgaatacattggggccattgtagaaatggaagttgacggcctccagaagtcgaaaacgcgtaagaaaggggaaccggaatacagtttcttccttcctattatcaagaagataagacgcgataagactgaacccgacgatattcatgttgtctttgcagatctattttaataaaaagcccttgactccggtcgggggctttgttatattagccatatcgaaacgaaacacggagataaacaaaatggctcacatgatgaagaaagcagaattccttaacctggttaaagattgtggatttgctcacttgaaaacttttcgtggtagtgtttacctctatgaccgcgaaatccaggttgcggaagtctattgcgcttctaacatgcaagaatctggtattatctctgcaatgaaccaatcaatcaaataccgtaaatggatgggctgattatgaaagttaacgtttcttatgaatctcgcgttaatggcgcacagtggcggaagctggataacgggcaagtagaaaggcgtttacctggttcagatgagtggatactttcggcagtgttggaaaccgaaatcgatctggcaacaaaagatggtattttgtttgaggtgaagaaatgatcacactcagtgattatcttctgtttactgctttttgggtggcttcgatattcataactgttttgatttacaataaacgggatgattttgggttgttgttattcattcacgggtttcctctttctatgtggatcgtgatgactgctgaaattctccattaatagcactttttgctaaaactatcttgttcttgtttggtatagtgtgctcatcgaaacgaaacagacaaaaggaacatcacatgaacttcatcgatatcaacaaagatttagaaggtaaaaacatcaaactcgttaaccgtgaaatgttagagagtcttggtaatggtggcgaaaaattcagtgaagaattctataacaatttatcgttgatgacggttaagcgcgttgatgttcagggtggttctggttgggtttctgcaattccggtttccctggtagatcaagcaacatatgacccagttgccgattcatgggatctagaaatgccgttggtattcgaagaagtcatgaagtgttacgaaattgcataggtgagaaaatgaaatttgaagaagaagaagtgaaagaacgattatcaaccgcgcggcgattccttgaatcgattgatttcgataaactcggtaaatatccggatacaatttgccttaattgtgggcgttctgttcttgttggtaagtgttgcgataatccaaatatcgttgtgatggaaaaggaacaagtatcccccgaaacatgggatcagattcaggaaatcattaaaaacccgccagcgccaactaaaaaattacgtgaattgatgacaaggaaaatgaaatgagcaaatttaaactgagtgcaaccgttcgtcttattcgctggaatggtgaagagatccgttatgatgaccctgaattcgctcatgaaatgctttcgcatcgtttggggttgaaaaatgcgtcactagttcaaaccgtgaaaacatcagcggatccggaaatctggcgttgtgtgatcctggatctcgatagcagtattgactatgatgatcccgctaactatccgcttctggaagcacaagttgataatgctccagaagacagacagtgttttttggttgagttaccgcgcgaacattacgaaaacatcgtaaaggcccgtagaaaggccaataacaatgttttcgatctccacctcggattgtttgaggattaagtactgctagttgtgttcgtagtagcggcgctggtaggttcccccacctgtatacattcaagtgtttgcaggtggaaatcttttgatacgtctcgaacacattcaacgatcagatattttcctgcatattcttccccaaatacctcaatgattgttcctaccttaacatctaaacgaccctgctttatatcgaatcggatccggcgttcatagctggatagcaattgcattttagaagcctggaaaggtttaccttctgaatctgggttctgaaagttggtatcatagattgcattacggtttgtgaagatccatgtattctctgtgtctgtatcagccagtatatcaccgtacatctttttatcagtcaatgacagactaaagaaactagcgtctttaaacagcgttgtgttatccttatgggtaatatactgggcttctgtgaatatgacagtatcaccaacaaacacgttatcaacgttaaatttgtatgtcgggatcggtgtctgggccagaatgtcagttgaacttttaaggaaaataccggaaccatcttcccacagataacagaagtcagaagaaactacactttgcccgttgtccctgatataatcaaatatatcctgatatgtaccatttagacatccaggagggatacgtatgttaccaccgtcaacttcgggggtaagcagtttcattttgctatacagtgccgtcatacactctgtaatcgtctgtacggcgttattgctaaatgaacgggcaaacttacgtctgaacgttttatgcagcggagagaggttcatacgcagcacagaacggtttttatcgtcagtatctacgttagagtaaagcaatccgtaatagtgttgttcctgtgtaccgttatactggaaagatacctgtatgatcggctggataagttgctgatagattaactgtgcatcgtatatctgcatcagtgtttcagaagatccattaatcatcgtcttttcactaaacgagacaagagcgggtaacaattcagtgtatgtattgtcaatatatttttcgtatgatgtatataatttaatcgacgtgactcgattgacgattttttcagccataaaaatccctcctaatatatcctatttactaaatagtaaataatgacccaggttcaatttgaggcaataatgaaaaataaaactcttgataaatttatgactacacggcttgaaatcaagaagacaaacgttaaaaccgttcatcttccggatggaacagccattgagatccctaagatgtcgtatcgtcattttgtaaagattaagactctgaaagatgacccagttgcgatcatgcgcttcatcattgatgacatcaaaccgcgtgaactgacagcagcggaaattgaatttgtgttgatccatatgtatgcacacaataacgctgattatgccaatacgcttaaagaaattgggctaaatcttgatgacctcaaaatctccgaaccttgctatgattttacgtttaacaatgtgcggttagtctttgacaaacccagcctgttaaatgctcaccttcctttcctcatcaaagaggcatatgttgacggtaagccagtagaattaactgaggataaacgagacgaattaattaattgcctgtaccgattcgaatatgatcaggtatcgcgtggtgtcctccaggaagtatacattattcatgaggggaaaaccatcaaagggcttaacatcattggtgaatgataatggctaactcttatttcaacgaagaacaaaagaaaaagtttctgaacagaaacagcaccagacaaccagcggtcaccaaagtaacagcctcccttgatgctgaaagcgcccgtgacctaaaggaaatcaacgataacacccttgaaagtgcaatcaatacgcttgatatcaaagaagggttgaaatcgtttgaagaaaaattccgtgacaaattcgcgggattcaaagaacaatacgaagaggataaaaaggaatctttagccgaacagctacctgatttcgtcggcccgatccgtcctatatccttaacagatgataactcaaaaactgttgacaatacagtaaacgttaaccaaaatggtcagttcggtaagctggaagaaaacactgaatcaatttttcatgctatcaataaacttgttgatttgtatgaaaatactgataaacataaaccgcttcctgaaccagtggaagaacctgatccgtatgtagacactaagaaaaaacgcatcattgatgatgaagacaagagaagcaaaactctggatagtattgctaaaagtctggtttctattaaagggtttacatcgcagatccttagccgtttcattggctactctctggaagcaatggcaaaatttgctaaatggacgctccttattggttcgttaatctttacattcgatgtgttgcgcgtcacaatacgcaaatggtttgaagatattctgaaagaaggggaatcctcaaaaaaactatttggtacatatctgggtaacgtaaaggcgatcgtaacaaagattgaagaaggtttgaacaacttcaatatgaacaacttaggcgaatcacttcgtgatttgttcgttgagcctatgaagctgttagggcaaactgtacaaactgcgatcactgagggtatcggtcgtcttattcaatcattgggggaatcaactggtatcgacagcattaccaatgccggacgcggaatgcagatcaccgctttacgtgataaacagaaatttggtcttgagttgtccaaagatgacattatcatgatcaagaaacaagaactggcagagcaacaggaagcattggaaaaagaagataaagccattgcagcacgtcaggcattgactattacccctagtcagatccctaacggttcaatctacaaagttgctcctactgattatcaggaaagaaatcagaagattgtcgatgctgataaagaacgtctggatactatgaaaaaacacaccgacgaattaaaaagtcaggtgaaattgattgaaggcagtgcagaagaagcacagaagttagccgatgaggaaaacaaacgcaacagagagcgtgttcgtcaggcacaaatcgaagcggatcgcctgaaacaagcgcgtaaggaaggcaaacaaccgccagaaggatccgagaaaaaaggcgatgacctgttgggtaaagcaaccaattacgccaatgctgaaaatattgatgccgatgatatcaaagacattaacaatatgttggaacagcttgaaaaacgtcgtaatgaaggaaacgttaatgacgtggaaaaggatcgcatatcggatctgattgaacaactgcaaaacaagattgcagcgcgtacagaatcaagctccccgatagatgcacctccaccattagcagccaataaaccgaacgctgataaagcaagcaacattcaggttaacaacaaaactgttaacaacaacgtaactcattcagtacaacgcacagagcataaaccgctcgtagcgctggcataaggaacatataatgaagttttctattattgatgacagtataaacactctcaaaaatattaaaaatcgcggtatcccctctgggggtgccgcaatcacagaatcagtattaaagcaaactatcgttaccgccgaatttccggcccaacgtgcagcaggtatcgataacgcttataacgcttcaagtctgtataataacggccttctgttcactgcatatgattttaatggtgttggtagtaaagacaactatcgttcattacgccaggcagcacagaacccaaaacaaatactatcatctgcgacgggtaatgttaagtacaaacaagtgttgaatagttctattggtactatggaacctgtttgccagatcctgctaccgcgaagcctgaacgataacgaagtaaacagccaccgctatcaagatgcaaacgatagtttcttaaccaaagggttgagccgtgttgtttcaaacatggtatggggcgctgtagaatccgtttctggcggtattatggcagaccgaagagaagcccttgatgttggtactaaagccgctttccagggttccgacaagcgaacaaagatgtattacaatacattcgtgatcgaaagccgtaacgatttgctggaactgattaaaatctactatctgtttactgttctgggatacggtacaacttctggcggtactgctaaagaggttgctgcattggttaaacagtattacggtgttctgggtgctaaaaccgctaacgcaattagcccttccagtagcccagtaacagcgtcagattttgataatagtctgggtaatgatgtggttgatttcatttcgaacgtagaggttattaaatcgcctcctgtctggtttatccgtgatttccagtctggtgattctttgcgtttaccccattcaacctttgggccagcaggtattaccagtgttcggtttgggcgttctattgataatattgtaaatacattaagagaatcaccaaataccccgatctcacttgagatcgaaattcaatttatggaactgatcgatatgcgtcaggattctatttttgatacaaattactaaggagatatgatgttttacaacgtagatgaatttttatcaggtatggctaatcgcgattttcagcgtagcaacctgtttagcgttgtattcgcaaccagccccgcatcacgtatccttgacaacacgatcggtagtattcgagatactttgattgatggatctattagttctatcaacgcaaacaaccctaacgaattcattaatgctatcactggcggcgtgagtaaattgtttagttacactgttgataaggcgattatgtcgctgaacaaaacaggatttagtaaaatcatcggggctattagtccccgtttgattacttccctgtttggtgatagcatgtatggacaactactatctgaattccgtgatgaaatgatgtataatatgggtttgagcatcatgggagttaacctccctggtaaatccatcgggtacgaatacgtttataatggtggcgtacctcaaatcagattcacgcgccctgagaatggggaattgtctttgactttccgcaccgattcagaagcccgtaacctgaaaatctttaacgaatggatttccgctattcgcgatgatgtaacaggacaatacgccttcattgatgaagtgacaagtactattcaggttaacttacatgatcgtgatggttcgccgcatacgacatacgtatttcagaagtgcttgcccgtcaaaatcagtaacagtgaattgagctatgagaacaacaacgaaatctggacatttactgttgattttgcctataaaacatcatgggttgtcgaggctgataaagaaggctgggaagggttcaaacaatccgtagaggaaggtttagccattgcagcacgtaccgcaattacaggacaataaaggggctacggccccttttgaggatcttatgtttgatattattcgagtaacattaccatcagggatcaaacgattccctatgtttacagttaaagaccagtttaaactaatgctgacccgtattgatatggaaggtcggccccttaaagagcaacaggaaatacttgatgaagtgttggatctgctttatcctgggtattccaaaacagaacaggaatacattttcagccgggtgtattgtggttcgttcggtaaaaacgttatcaaggttgtgataggcggtaaaggcgggggccactccgaagccttcatggtgattaatgatattcaactagaaaatgaatacaagctgaatgatgaaatcacattaggatttaacttccctcgtacacgcaatacaagcgaagagttgtttctcgaatgcattagttatgtgatatacaacgagcagcgttatgaatggacatcgctaaccgaagaaacgaaagaaaatattcttgatgtcgttgaactggatgatgtcgaaaaaattgttactatgctaactaaatcggttgatgtgtctatgcgggggaaatcgtttagtggtatgttaaccctgttcaagatcctgtttagtcgtggggatctggatgagtttgtgaagaccaactatctgctaaataaaaacggccttaacctggaacctatcatgaatagtagcccaatggaaaggcaaatttatactgcattgcttgcagaagacttgaaaaaacaaggtgctgttaaatgagaaagcatgaatataaacacgttgagaaatataatgttgattatcgtcctctgacacatacagagtttacccccgacgcagattttatcaaaggggatgtttacctgtatcaaagagaatatcttttcattctggcacttctggaaagtaaaaatattgatacccgtcaactgttcatcaactgtgaagaatgtcaggaaagaatcgaattccagcttaaacgcaatcaaataatggttgaagatttcgacgataagctatacggcaatgacgggatcgcgttatctgttcaccctcgtaagactggtgatgaagagatccccgatcttatcgattacgtaatgatagacggcgaacagatcatgtggagtgattgcagcgacaaagataaagaaatggtattggatgcaatcgactatgcaacctataaatcgatttctaccgccctggataagccagcagtggtcgcaaacattccggtaaggtgttcgtgtgggcatagccatatcgtctctctgagaggcttacagcaatttttaaaggtggtctaaatgggtgtaaatctgaggttgctatatagcgatatagaacctaacatgcaacgagattggaataatgacgtagcggcttcaaaaggggccgcagcagtaagaaatagtttgattggtatcgtaaccacgatcaagggtacacgtccatttgatagtaactttggttgtgctattagtgatatgctgtttgagaacatgaaccctcttacagcggaatctatcagaacatccgttgtgtctgctatccggacatatgaaccgagagtatataatctttctgtcgaggttatacctctatatgacgataacgcggttactgtgactatctattacagtattatcgacgatccggatgatgtagaacaaatcaaactccaactttccgcctcataacaaaaagccccttcctttcggttggggctttcttttagaattcaatgaatcccattagttcttgatatcgcaattcaaacggggagatataactttgcatctggttttgatcggatacgatgtaataatacacctcatcattatcatcatatagcgcttctttgatgatgcaatagcgatcggtttccacgttcacataaagagtatccatgtactttgtaactttggaaccctgtgaactgatttcacgaatagcgttatctatgaaaagcgacaatgcttgcatgaagttatcaaactcaccatattcacagcccataatagaaattgcagtgtattggtgccagcctttgattgtgtctccacggcggatccatccaatttgtctacccccgatagatacacaccacactttaccaacgggactataaaaccgcacaacttcttttaataacagggacatgaccccacattttgtataaggactcatttcaacctcatttcatatcaagtagccaggaagggctagtttcaagcgaaatcgcagtatattcatattttacagtataacctttgaaaccgaaaggaataattgcattttcattgagatattttactttatgctttgcttcttcttcattcagagcagcacagactgttgtttgttcaacgttaccaacaggagaagtaaatttttcaatgatgatgtatacgcagttcatatcgtttccttatttcagtttctttccggttttgagttcatattctaactcacgaacttttattcgtaaagtcattaaacacacctgattctgactgtaaaggtattgggttataactttggttttaaacttctcatcgacttcggaatctttgagccaatcagacatcatctgatacgtagggaggtgttcgcacttctcatcgtctgacatcgcatcatacgttgctttgtccatcgggggcggttcctcgaacgcgagagcgggggttgcgagaagactcagtgcaagtagtaaatatttcataacgtattcctcattgttttcgatagaaccaatatagcaaaaagccccgaccgaagtcaagggctttttcatcaatgcaagaaagatttcacgtactgttcgatcttttcacgacatgtatcaactgaggtgctttccgcaattacggcatgacataacgcctcaccgccgacccagaaactcatcatgtactgaatatcacgaccttccatttctttttgatgcgctttgattcgttcgaaagcattttcgattgtttcagtagcagtaagcatttcggattccccgtcaacctccgccagttccccatcgatcatttcgctttcgacttcttcccagtatactatcgttatcatgcattaccccagtggttaaccgtcgtaatccccgccacaattcacatcgccttcaatgaacagttcgcggttatcacgtaataaattatactttctttcgagttcaggcccgaacgcgtcggcgtcttcataccagctataattgtatcttccgtattcatgatcatattctggttcatcgccgcgttcattgaagtgaacaattttgatatcgtccatccccagttctttcaacttatcccagatatacgaaatctcaacgctatgggaaccgaatgcttccagtgagatcgtaccgtcgctatcgacttgaggaataccccacttcgaacgagtatcatcggtgatcatatctattaatgactcgatattattctcaccgtagatatcagcaacttccttttctttaccagggcgaacaagtccgatcccgataataaagctactgcttgagctattgctcacaaacccagaacgaattttcatcgcatcaccatattaccaatcatgaatagagggattagcgcgaagacgataccccatagaatgaccttatcttcacgacggtcgcacccatgatagataacacctccagcgaaaaccaatacaacaactgaaacgaacgcgaataaagaaatcatttgcgggtatccattttcattgaaacttctttcaggatcttattcagatcgtgaagcgcatcttttacgttaccttcattataggtaagcatatcctggtacagccctttcaagcaacgattgataacatatgctttttcagaaggtaacattgtaccagaacgattataatctctgaaaatgtccatcatcgtgccgttgttgccagataatgacgggttgaagttaaccataccggacatcaaactatcaacatacacaacggttgtgttatcagaacgatacgcgccaccaactttaaaccagttgctgaacacatacggtgattcccgcacttcgctcaaatcggttccgatttcatcgatgtttacacgaatgttgttaaaatacaccgattcatcaatagaaccaggacgccatacgatagcaccgttgttatttttgaatccgactacatcaacctgccagccgttatctgttaaccggacatcatcaacgacgatgaaatcaggtagctgtgaatgaaagccgatgttttcaggacgggaattacgaaacccatcacgattggagaaataaaggatgtcgccttgattcagttcgcatatattcataagatttttaaagtccaattcaagtaattccacaagtcacctcaatgccccctttcgggggcaaattcatcagagtttaacttctttttcttccagaacgattgtgcaatcaaatttcacatctttccagaattccgctgcaacgatatctgttgcggtaacgcttacgctggtttcttcaaaatccagatccgcaaaccatgcgtgtccgacgacaataccgtacattacacgactcaggcgattattaagggcgcgaacctctttaatagtttcctttgtctgcttatcaagatactcgatcaggtcattcttgtcaagcgcttcgatctctttagatacggtatcgtaagcccacagaatgatcaggtcaccattgttgagtttcttcttaccttcggcgcgttttgcaacggtagcagcaacagccggaagtgatgaaacgcctttgattttcacgttcagttctttcgacatgtaaacatcagtcgattctgtgcgctcaaccttcggagagaagccgtaatcacggatcccttgctcagacaaccattcaccagccgcctcaccaaaacgctgtttaagtccttctgcgttgcgtaaaccaatcgcgttatcacggaagaacttcattaccttctgacggcctttcaggatttccagacggacgttatcagcaacaaattccttaccagaaataccgcgagtcatcgaacggttaaccagaggcagagaggtaaagtcaaccagcacagacatacggtcttcaccaattttagccagcggtttgatagtcagaccagaagcacgtaagtttttcagagtcggaatatctgtttccagcggaagtaccttaacgttaacgataccatctttaacaatggtaaagttacgcacttgtttggtttctactttttccggcaatccaaactctttttgtttgctttccggaatggttacgtaaccttgcagatccgtattgatggaaatgttcggacgggaactgttacccaccaggtgtttcactgcaactttcgttgtggtttgggtaaattccggtttccatacttcgtgcgccaccagttgagccgccagtgcttttcgttcttccggagtagaagcatttgcaatctgttctgacagtttatccagtgtatcatcatctttctggacagtctgacggcctgtacgattgtacgcccagtgttcagaagacaggtcgatcactgtgtcggtttctgccagcagttcgagagcgtcaaccagagtaaacgcgttttcatcaggaaccatgttgtaatcaacaccatccatcagacgtttagccggatcaacaaccgcttcggagatcatatctttagcgttggaataatcctgtttggtaaagcagttatcgtatgctttaatcagacgtacatcacccagctttttcagaactttccaggccagatctggattcatggtatgaagcgcatgatacagaactacatacagaacctgttcaccttctgctgttgccggatcgaagccgtcaacgtcattgatcgcgttttcacccagcgcccaaatgtttttgatatgttccggaaccagaacaacaccatttgcagcattcaggacatacacacggccttcatccaggtagatagcatgggttgcatcgccaacttttacttcaacacgtgcggaggtttgcgcggtaatgatttcatcaaatgcaggtacatacgcatcaaacccttcaacgaatttgtgtaacgcgttggttgcttctgccattttttccagaagaggacggtttacataataaccatattccaagaaagcaatgttgttaaacgtcaacggtagagtagaacatgctttcaggatgtcatcagtacgccagcagttatcataaccatcagtcaagaaaatcagactgttcagattgccattatccgcttgcagatcggtagcgacttcaaccgccagttgcagaggttcaacgaagccagtacatccggtcggacgcagataacggtcgatagcatcattgattttgctcaggtcggatacagagctaaccttttcgccaacgaatacagaaccgaactgaccacggctggagaaatacagaatagatacggtatcatcctgtttaaccagcgtcgccaagttgtttttcaggtgctgacgaatgcgcgggagttcgttatacatcgatccggatacgtcacaaacaaaaacgtggttagtcggggttggtttggctacggcgtttttgaattcaatgttagtgatcataattttctcatttataggtaaatttgattataatttcgtttacttttttgctaataatttctaatgcattatcgcatccaaacttactactcaacaatgaaacaaaatcatccatcgttgttgtttgagactcgcctacatcaaaagacagagcataggcaacaggatttttaatccttacgatttgaatagtatactcattcagatcaaaccgttcaagatattttcgcaaagaaaataaatcaatcggtactggtagagtttgactaaacgttatttcttcccccagttgataggggggcatttttacacagatttcgtattccatcagtgatgactcttcatagtgtgttccagattacggaaaatttgcccgtgttcaagctgggattggaattctccgcattcatcagagtaagtaaattcataaatgaatacaccgttctgattgccaaagttggctgtgtactcttcatacaaccacatcttgatcagagcgtctttctcttctgtttccagatcataccagtcacgcccatcataagcaagcgcaattttaggattagaccgatatcgagtttcggcgctatcttcggtttcccattcataacgcttatcatcatagtatgattcgaaaccatttcccatatgaccgcccaggtcgcggtgtacttgctgtacaacttcttccgctgtcgggcaagtcatccaactataaccacagttaggaacacaatcacccatcatttcgcggagattgttgatatcagtcggatccttcgggaaccgtacaataaagctacttgatgaactattgctcacaaaaccagaacggatcttcatttgatttcctcaaattcaaaagctgtgaaatgttttctttcatcataaccaactgtacagcgatgcgttggctttcctgtgaatccatcaaacacagttacacaataataatgcaacgatggaagcagtgtatgcttaatgtacttgatcgcgacgttcaggtcaaccgtggaacatacacaatcacacgtttgctcaaaacggtcatcaaaaatcaactcaatgctatagatattcatgatttgccttttgtttctgatttcagaacgatgttactgtaaggatcttttgctaccagttcccacaggtcgccgggatgttccccgctacgatatacggatgaacgaatgatttcgttaaacttgcttagggcttcgtcgatatcatcatacccacgtttaagaggtttgcggttgcgacgaatgaaaaacatttcttttgttttctcccaacgttcggaatttttaaccttcatctttcacttccttcatgtttttcataaattcttcaaaagttacggggaactcgttatactgttgcgattcctcatcccatacatcgcgttgcccgaatgttgaactttttgcaatgagtttttcgttttcccatacatcaatagtaacatgatcaccaagataagggaaattaggaactttgttcagcgcatcaacacagttttgcaatgattcagaaacatgaacaatttcagtgaattcataatcagcactataagaagctacgtaaatcatcaccaccccctaacgatgctaatcagcagtaaacccaggatccagaacacagcaaccgcacaaatacgagccattactacatttccgcgactagtccactccgcactaagaaacaagagaacaaacgttaacgcgtataaaaccatttcaataacttcggtaatcatataaacctcacgaaaaagcccctttcgaggcttgtttaatcaatgcccgaacacaccacgaatagactctgcgaatgcatacagttcaggatttttagctttcactgtttcgatttgttccagaatgtaatctggtttatatttcgcaccgaaccagcagtaagagaaagagcgatcccacatgaacacattatagtattcaccgttgcgaacttcaaccatcacataaccaggattagaacccagcgggtaatctttcagaagattgaatttcgcgccagcaccagtacatccgttaaacaggtcattaaaagtcatggtatgttccttttgtcagtttcgtttcaacaaggtcactatactattcttctttagcctatgcaagcgcttttttgatttgttttgctattgcttcgatcaccggaacagatacagagttacccgcttgtttgtacgcctgtgttttgctcttatgcatcttgaatgaatccggaaatccttgcaaccggaaacactcgcgaggtgataacattcgagggttcttaccttcctgcaataccagacattgaacaccatccttatagtattgggctgttatcgtcccagtacacacagaatcaactgtaacggcctgatagccaaaccccttaccgtttgccttgtttcgttctttacgctctctaaagcccttccaggcacgatctgatatggtgtattgatcattatccggttcgagaatgtcaccgacccttgttggggtacgtggaggaacaggaaaactaaagaacaccggatcgcgaaagcagacaataaacacgcgctctcttcgttgaggcaatccaaaatcttttgtattcattacctgataatggatatcgtatccttcgtcctgtaacagcctgtagatggttttaaacgtgtttcccttgtcatgggttaatagctggggaacattctcaaagaacagcacagagggctttttagcccgtataatgcggagtatttcaaagatgatagtaccgcgaggatctaacatgccctgttttaaccctgctttactgaacgcctgacaaggaaacccagccaacaggatatcgtgatcaggtacatcgttttcatcaatggcgaatatatcaccctgaatattttcatcgccccagttatcagcatatgtttgttgtgcatgtttatcgatttcagacgttaaaaggcattcgaccccgccgaatgccttatcgaaaccgagcctcacgccaccaacaccagcgcaaaggtcaattattttcatacgtcgaaatcaacctcatcgattttgtatgattcttcgccaatatcagcccatagctgaatattcacgctttttgcatcacgataaagaggggttccatcgaaaccgcctgtataacaagtttctgtaatctcgttaacttccaggcggaggctatcgcgcatgatctgaacaacagcctgatccaatgtaaccgcgtctgggtgtataactttatcgcccaatacaatatctttaacgtttaaaataacatcagtcattagtgccactccgtttcaattccgtgtttataagcgtcaatccccagtggggtaatcactaaacacatatcagtatttttcgttggtgaactaaacgccatagatgcgtagcctttttgaatcagggcatcacgccctgatttactggggacatcgttgaaatccaaatccaacatttttgacgagtatccgtaaagtttacacaggacatcaatttcagcgccggataatttcggatatgtcatttgtagtacctcacaacatgttcagaatacacacgttcaatgaaatcattccagaaatcgcgatcaacttctttcggataaccagatacagccgccagcttttcaacttcacacatcgttgattctagcgcctcttgtacagttgcgaaaggaacaccgccagctttaaccattttcaaaaatgcgctatccggaagaggatacacaatatcaccttctttgaaaatctggatcaattgcataccaccgcgcaacgcatgagaaagagctttccagtcgatcccgttgttggcttctgcttgccgtgctcgttccccgtattcatcccagagtttatacacggattttttcatttccgctacggtgatcgtagactggaatttacgccccagaacttcataaaattcctgacaacctgatttcagtgttttgtctgtaacgaatcgacaaaactcgttggtcgggaatcggttagaaatctcaccaactttgatgcgcttgccgtaattagattcatccacgttacccagcaatgatgtaccataccagtaatcgggaatcatttgtaacacatcaacaacttcacgcagtgccgccaggcgagaacctttaacaccatacttcgccgcttgcttacgaacataaccaaacaggccagttaattccgtagtgtagaagcgcgaacggttagcgcggagatattgccagatatcagagttagcgatcagcttgctatcatctgcatgaagcatatcaatcgccacggtatcaccatcacatgcgaggctaataaacttttgcagactgtaaatctgacgatctacgtcattaacatcgttctttgagtttttatcaccagttgatgtatcgatagacttcttcgcagtgcctaacaggatttcgcgaggatgagggagatagatccctttgtagtctttatcgcttgttggtgtttccagtccgtacaggtgagaaccgaatacggtttccataatcattttcatcagaattcaacctttaatgtttttgcgatcccgcgcaattcagcggtagtaatatccggaatgtttgttccgtagctattcccaaatacttttttaatcttatcacacaaatcgcggcgatacaccatttctttgtattcttcttcgctacgatacagttgataacccatccacccctcagcccatccggaattgcgcttgattttaatattagtacaacaatcagacccatcttccggtcggaaagatgcatacaggtactgacgcgcaactttttgtacgtaaagggttttggggttgcgattttgtcgctggtcactacggatcccagcatcatacaacgtatcaccaactttcacatcacttaaatcaatcatttacgtctccagcaattagttttttcacagtaatgaacgggaacaggcacacccaacgtttctttactgcttctgttgtatgttatcacaacgaatcggttttcgccacccctaacacactccagatccaaaatctcgcgggttcccttcgtgttaatgtctgcaacataatattcttcgttgttgacaatcactatatccgacataatcaagcgaggtttcatgcagcgtacacctctgattcatcgacccattccagatcctgattgagtgattcaatcagctttttatcgcgtcgggaaatgacaacggtagaacctttgtcagctttcacgatgatgtcaccagaagaggtgatgtattcaaccacataatcacggcgagggcttccgagtctgtcaccaactttaacagcacgtctaaccgattcatgagatttttcggtgaacactaatccatcacctacatgggtaacaataccatcaacagcagaacgagaattaacataaattttgctaatctccgccatgaaaacactatctctcagatatcgagcagtcactttatctaaacactgagaagatactttatctccgccaggatatactgagataatcattacatgaccctgaacacgggcggttcctactttatgcagaatgtaaaccattgaaccatcagaatctttagatacaaggatcacgctgaaagattctttgtgttgcttctgagtttctccacaggtaaaactcacgtccagaaaatcaccaactttaacagcacggggttttgctacttgttcacgagcactaataacagggatcataatcatttcctcacagtttcaaattcttcatcagatttccaatatacgttaaaattacgacaatcgtgttcggatgtcaacgtatatttttcatttgttttctcatcggtgataaccatagtttcattatcgattgagttaacaccgtaaacgaaaacattctcaccgcgtttgtttaaaaacgcatcacccttttcaatcaactgccaacaggcaacaggcaacccacctggacaaatcggacgggtaacaagacaatagggatgtttcataataagcctcttttgtttctgtaggcccaatatagcaaaagcccctgacctaagtcaagggctttgttttaaattccggtaaatgctacgatgatttgataatggtcatcgaagaatagatcccgcatcgcgatcacttcgtgcatcggtagccagaacgcgtctgctgcatcatcagagccgcccataatacgaggtaatgaaccatcgttattaggttcgagcttgatatactgtgctacagtcggttttgagaagtacaccgaacgtttcggatgatcgaacagcatcgaattacggatagaaccacgaataaccttttcaggtactttaattcgtacttcttccagcagttcacggatcgcgcaatcaaggaacgtttcgttaccgtttttgtgtccacccggaagcgctaacgcatctttaccaggcgcaaacttacgacggattactaacacgtggttattacatacgaccaccgagtcagccgtgcaacagttcagagaatccggatacggatattttttgaacttgtcaatctctcgttgccagtgtgcatcttcatgggacaaacgctggaattcttttgtttgtgtccattcatcgataaaggaaaccgtagtgctaggcgcatattttaacaaatcttcgtcccagccttcatggtgttcccagataattttgcgtaaattggtcgaggatagatcctgatctccaaccttcacaggttcaaccggaatatgattccatccgaatgctttaagccagtaagaatctttgtctttttcgtacccaacgatcgcaattcgatcatttcgagtttcatcgattgccatacgaacacgggatttccatttttcctcgttatagaggtaatccggaatgtgcgcgaatttgattctggttgcatcttcaacatcaagtttgcagatagaccagcgagtgatcattgcttgacgctgtttagcggtcaatgggtttaatgtgttcggatatgcataagcagaaccgatcagaatgtaaaccgtatcagcaacagcaagggcttcccttaccattttctcatgaccatagtgaaaaggttgaaaacgtccaattactacagctttatcatatttgtgtttcataacgtgctccacgtttaaaggttaatcataaaacagacgcaattatcaacacaccaaacaatccaccaatgaaaccaaagaatagcgaaatgattgtagtcagtacgatctgttttatgttcattatagtattctcgttttagatgtcaagcccccaaagagggggctttaaaacattatttacgagaatcaaaaatcactttaccagcataatccgaacccattacagtttgaggtacgccacctttatagcgggtagagtagttcatctgtacatccagttctttccagcggatcatttccggcgtaatggtacgttgcagcgcggcgtttgcttctgcttctttcttcgctgcatacagacgggcatcagcatcacgttcgttagcgattgcggcattttcacgggcctggcgatcagcttccgcttgttttactgcttgcaatgaagtctgttctactttttgtagttcagctttagcggcgttaacctgttcttcgcggatcttcgtgttagttacctgttccatgataacttccggcagggtgatatcctgcaagaatacctgtttcacggtgtaaccgtaaggccgcgcataatcttctacttcctgctgaattgcaatttgtagttggttttggatcttcgcatcaaacaggtcttgcgctttcggtacggatttaccaaattcgcgaacagtggaaagcagtttttcagttacatacttatccagtgcctgatcctgattacccgcgttgatacggttgatcggtgctttgctaccgtcgaattgcagcattacggtcatatccacagtggatttaaatttatcctgggacggaacctgtaatttgtcgaacttcatcgcgatgtctttggtgctgaacgtgtcaaacgttgccagcgggtttacaatgtggaaaccaggcagtacgggtttcggtgatactttacccatgaaggtttcagttttaaccgtaccgtcttgcacaatggtatacatgttaggcactaaccacagtgctgcaactacgcccagagcgatcagagaggttttcttcgggttgttcacgatagtgtttaagttcatcataatttccataagttgttgttcaattcgatagttattctatcatcacatttcacgctgtcaaactattttcaagaaagttttgtcagcttgtagattgtttgatagcacaagcccttaatctcgtccaggatgttcttcaaagaactatctactgattcgtagatctcgtttgcttcgttggctattttacggagatacgctaccgtgtcaagcatattttcggtttttagcacaggtttgtatcttcccgtgattcctatgtggatttcggtgaatttatcaaccaaatcctgcatatcttcgtaaaaaccctcatatgctttatgttgtgagtaggaacctgttgcaaaatgtgcgctatgcatatacgtaacggacataaggcacatgccaataaaggcatctatcttgcttgagttctcagattctgtaatttgtttaaatgattgcatgatgatccctttatgaacgatggatacttgcaaactcatacgcgaccctgattcctagctttgcgcattcggattcagatcggcattgtttttggtgccattttcgttccatgtagttgtagaatagttcgcttgtatttacgctgggagggatcgttgtgatgtatacttgaagggccgcattaatataatcgtcaaattctttctgaaccggacggtcggcggcgtgtgttgtgggtgtcatcatcaacaatccgaacagcacagccattgatatgcgtttaatgttcataacaattactcttttactcatagacccactataggtctactcctgtatatatttatagcaaaaacgaggccaagcctcgttataatatttttgctgtaaagtcaatcaagtaatgtcataccaacacaaacttctttcgaaagcgcgtattttgttcacgttttctacgttttcgtcccaaccaatcaccccagctttcatacgtttcagttcctgacgtaaacgggtacgtacttttgaatcaattttctttactgcaatagaaagcattgcattcagatcgccatgagctttgttaccgtcgcgacacagattattatcaaatcgaatgtatgcacatcctgatttgtgtttccagttggttgagtaccaacgcaacccatccggatcaataccatgttgagcataataacgagaatactcttttacttcttcgatcttttcgttagatgaacggtcacgaagaggattgtatttcttacggtaagtgcgactcataatgatctccttttgtttatgcttccactgtatcagggttgttctttagttgcaagtagtgttttcgacaaagtgaaacatatttgtcttcggccccgatctcaatctggtcgccattagcaacaaatttgccatttgcatcaatacgggcaacggtagttgctttctttccacaatgacaaacccctctcaactccctgatctcatcagcaagtgccagcaacatataagaaccttcgaacaagttcaactgaaaatcggttcttagtccatatgtcattacgggtatatctaattcgtcaacaacccgacacagatccatgacatttttcctggaaaggaattgcgcttcatccacaaacacgcaagaaaccagattcgggctatcactgtaaaaatgattgttatgaacatcataatacaagtccatatcaggagtaatcatggtgcatgttgcttccaacccaatacgtgaagagatactctgtttaccttctcgcgtatcaattgctggtttgtacatcaggatccgcataccgcgttcctggtagttgtatgcatcagtgagtaaacgagcactcttgccagcattcattgatgcataatgaaaatatagtttagccatttatcctctcaacaaaatctggggtattttgaaatttcccttccccttcatggtttttgcatgttttgtttgaacagtagatccaccaatcccactcatcataagggggtttggtaatgttcattacacaaattaaagggaaatgacaatctctacatctagcgtgttctataatggttgcgttatccatgcgcgtaaccgcccatttcgttatcttgtgcttgatgaatatcaagataccacatattgattttacttttcagttcgtccatttccttactcagacaattgtcaacgagacatagaacattaacagtttctttacgttgcataacgtcgatgttattcgctttcatcgcttgcgccaatgcattacaggttttcaccagtgcggcgcgttgtcctttgattacggcgatccgtttgttcgctttctttattgcccgtccagctttaataggatccatcatgattaattcgccttacgaggatcgaaatgaacaacaatgatcgggtaatcaccagtcacctcattaataatgcgcttaatgagttcccagtcgcccccagcgaggccagcaccgattaaaggtgtgataataggctttccagtcttaacggcgtcagcaagccctacagcctgtttaaaagcattgccgattgcgtcataatcgacacgcggcccaggtgtccagaaatcatattgagtatatgcattgaaaacaatgttgcctttttcgccaatgtaaacagaacaagttcctagcttatcacgggaaccttttaacgtattggcatcaacttgaaatgcaccaggaatacgatcgcggatttcgcgagcaataccagcgcccatattgcaataacagttgcatccgtggatcaaatgaccttcaccattcagatacatattgacagcattacctttcacttctttaatgatcatttttattattcctatataattcgcgttcgattagcatatcgatgaaatcagtaatatcatcaaaccaatccttagtttcttgagcatgagccaaatcaccatcatctaaaaacttttcgcgagcatcagcaaaattatctagtttgttatagagttttgctttgtctatatcattcataaattaaccttaattattaaaagaacgtaagaaaaatacgtaatgtcaaacctgtttacctttccgttcacggcggcgatcttcttgatgacacatatataaaacaccaccaaaaattataaaaccgataacaacgcctataaagtatccagcactaaacatagtcatcatccccgcaatagtaacaaggcccagtgctctcatgcttaccagcattgtacgccaaaaacaccacaaccgccgccataataataaaaatccagatagccattagtaaagccctatgccagcattaaattcatcaaccaaataagtacggaacttttcacaccgttccttatttggcgcttgtttgcatagattcatcattggttcagactgcaaaaactctttttgtttcagcaacttaccgcgtttatacaggtgagcattttcctctccccacatataagcaacatctaactgttctgcgatcacttgcttacataccgcgacatctttgatatcacgattgttgcataactcatccaggcgagcatcaccagcgtgagcaaatccagcaaccagagttaaaagcagtgctaactttttcatgatgattccttattcatcctcttctataggggtataataatgcgcattgcagatatacgcaagaacttttttcagagacatatccgagaatgtcggatcttgatttcgtctcatcccactaccagtttcaacagcccaacgtttgttagctggattgtatgtcagccagtagcaatcccattcagacagagtatgttcgaacagatcgaaacgcttgcgcccgtttgcttgcggtctaacaaaaggttcgaccatttctaaagcggttaaaactcgattaatgtttgaaccgtcttcatccatcgcgatccgcaaacagtattggttaatgtccggatccataccatcgatacccaggccgatagattcgaaaaattttgtagccgcgtgataagacacactagaagaacgatattccaacatcacagggatcttttccccgtccttgacgttgttaatgatatcctgatcgataagttcaatcaggtctcttttctccttgatcaaggtagaaatttcttcttgcagcggggctatcttcgcatgaagttcttttatccgttgatcaattacggacacttcgaaagctaaatttctcattgtacccattccccgtttttgtcaatatacatgatccaatcagcaaccgaccaatgggaagtattgcctttcggagtcgctactaggtaggaaccagctttaaacagtacgcgtttagtttcgttcagaatcaggtcgctcataatgtattcctcatttaaccaaagtgaatcgatattcgattgcatcgttcgggcgctcatacacagtatccgaacttgtgataacagtatacacggcttctttcacaagatccataattttctgtgagtttccccagacattgatactaaaatacaacccatttttaggaataggattgtattccatatcataatatatgtccataagttcacaaatgaacaagcggcgctgttcgttatcatatgtaaaataaatgttaaaacaatcgagagatttactcaaagtaatctctttgataacgatgttatcttgtttgctaaaatgatcgcggattgtttgtacacaacgcaacagattagggtagtcatatttttgtgaaacaatgacttgatgtgaaacgctcataatgtattcctctcaattagatgcatccataataaaaaagcccccgaccgaagtcaagggctttttgtcaaatgatttgtttttcttctaacagcttcgcggttgtattaaccatacgagcataatcacgggcttctttctttgtatacttgaaaccagcgttataactcgccagcgcctttttcaagtcgcctttgtggtaatcaagccagtactccagttcatagatcgcatactttgatccaccttgaagagtttcgagctttttgattactacgcgtttaggatatgacttatccattcgtgcgctggcgctacttgcggtaacttgccagcatccataagcgtgatggccttttttacctttaccgacattctcacatgcgcgagactcgatccaggcgatagccgctaaatgatagcctaaacgtttagccttatctttttctacaggttttgcagtcttcaaatcatagttgtgtccaactcgataagcatactccaaaacctctttctgcttcggtgtgatgttctccaaatccttgatgtaggatggagaatttttgtttgccggaggctttacagtagccttttgtaaaggcaattgatgagtaggcaaatccgcaatgaaatcccctagcggatccgtcgcagcgttgccagaaaaagagcacaagaaaatgctggcagcaataataattttcttcattttaatacctatgttgcaaaaagaggggcaataatacaccccactttatatttatgcaactattttagatagttttcgcgtcgcgtagtttatcggtgataaactcagcaatgttataatttgaaatagccttgttaggatcgtatagtgcaacgatttcatctattgataccataacggcatgtttaaagtagacgctccagctagtagtaaagatttctctgttgtcaaatccacaatcagggctgaacaaagcgcggtatttgtatccactgtatttcgtcagacgattcgtgctgtgcgcgtcactggtgatcagaaattttccctggtgagtttgtatgacgaaaaagtatccgagacgttctttgttgtccagcatcttttcaaatttattttgcgtatcttcgcgaacaatacgagaagtcagcatttccaacactttatcgtattcgggccaatcattctcgatcacgattgcaccaaatggtttcttaccattgatcccgcgcccgatttcgattttcgtgcaaatttcgttgaacgttttcaaatcttctggcgtcagttctttaagatcgctcaattttgctacataataacgtttttctagttccattttacaattcaacctcgtttttacagtatacgcattcaataaaatcaacttttcgcatattgaagaaatatgaaccctcggaagatttttccttgtgttttacatcttccttgtcatatttcatggtagtatcacaacaattgcacgtaacaatacgggattttgcatttatgatctcaatcatgatacacctcaattcaaaaataatttcacagagttaccacatttaggacatgtgataaattttttcacgacataatcagcagcagagaaaaatccattgtaaaccgattctctcttttgctctacatcagatagttcatactctaacccacttttacaacaattgcaaacggtaattagtttttgactatggatgacagtaatcatatacacctcacaaaaagggggctttcgcccccatcattagaaattgtcttcgacaaacgccgcgagacgggaacgatacactgtatcaagaatgatatggcttgagtgttcgtattctttcagcttttcaacagcccatacaaacccgttgtttacggcagtgtttcgagggttgtcgatctgcttaatgttcccgcatagtatcagaagtgtgttctctccgcaacgagaaatgatagatttaatttcatggttgctaaggttttgacattcatcaacaatcagcacagaacctttgcccggatccggatgaccaatactgcgaccacggaaataatacaggctagggaattgcaccacccctttttcaatcaaaccttcaatgtatttttcagattccggattatccttaaacagaatgttcaggctagtaatacaaggttcgatagaaggccggagtttttcgcccagtgtaccaggaaggaagccaatttcacttgataacgggctatctgacttcacatacatcaagttagcgtaatgtccactattaaccaggtgcatagcaccggaaacagcaagcattgttttaccagaaccagcgccacccataatggtagcaacatcgatttcattgctcataatggattcgacgaaagccgcttgcagagaatcacggggctggatagctttcatgagtttgcgtttcatcgcctgttcgtgcttaacaggtaagacattcaagcaaatctcatcagcagtcactacacgcccgactaactcaccattagaggtaatgtactggttaggataaaaatcttcgtcaggaagcgaactgtaagtgatttgggctacattatccgtatatcccaacacttccacggtatcccaaaaatcagggatctctacgtaaccggaatacaatacatcgctatcttttaacgtatcgtcgccagtatactgttctaccttacacccacgggacattgcgatcagtaacatcataatatcgcgagtaactaaggttgcatcctgttgcatacaagtttcaatgattcgttcgtcttgcttgtcaagagcaaacgttttgtttccgacataatcaaccactttaagggtgatagtgtcagacagtgctgggtttgtcaggtttaaaggaatacctgatttcgtaatcgcatcatatgactgaccgaaaataacttttgacagaagccggatcgccaatcgtgcttcgtgcgctgttcgttctttcgttttcaggtgatctaattcacccatagtagcagaggtaataatgatttctgtaccaggttgagtgaatgaatagattgaataggggttcgagactaaaacgttagtgtctaaaacatatttcatagaaaattcctgatttgattacggggtacgcggattcgcaccccgcgtactgcaatcacatacccagcgaaattacgtgaatatatgctaatgggtgtctcttttgtacacaatgcatgattgtattatatacaatgtccatgcgttcactgtgtgtaagatcacactcatcaaaaataaggtttattgcctggtgctcgattcgacgtccacggaaatgattaagaattgcccctctactggtcaatacatcacatccggtagcatcatttaaccgtttggcttcttgtgctgcatttaacgtatgtgctacgtaaatgttaagggaactatcagaacgtttcataaaatcaaacgcgcctttagtcttttgcgttcgtctacccagatccagcctggtttcaaatactataaaaccactagggaagtaattatgtgttggttcttccaactctcgcataagatgcatcttacgacattcttcaattgtctttacataaaattcactattcatgttttacctttaaggggccaaagcccctttgttacgctaattccacatgcggggcatcaatgaattttgtttcgatcggaaggttcggatcatttttccagttgataccaaaacgcagtttaacacccagttcatcacctgcttgtttaacagcattcaggacaggcaaccacactttagggtttgtttgccagccttgaggcaacacgctaggatacagatccaccgcatcacccgtgatgtgttttgagttcattgtttgagatacacccttacggacgttctcgcgctgttgttccacagtacgcagaccttcacgtacaccaaaatcaacaggagacagttgcagagcacgttctacgactttcaccagttgaggtttaacgcctttaaggttgttaaggcttttttgactgaatttaaacataaatcacctcttgtaaaaataccctgtttgggtacacagggtatttatggtttaagaggttcgataattaattagtaaaggtcaccgaaacattcgtcatattcacgtttacgttcgatttgctcgtttctacgatcttccatatagggaggaagacggtcttcattgacttcatcaatgtaagcctgtgcatcctcttttgttagaaagagtgcatggaagttatatccgttgtacccgtccatactgcgatctttaagagagaattctgtgtgataatcccagtctttgtacagggtgatacatttagcaaacagcccaataccgcgatgaatgtatgggaatccagtaacaatcatcttgctacccatttccgcattttctccgttcacacagaatacttcatacatgatcgcgcctggtttaacatctttcttaacagcacgtttttcaaaagcacttttcataatatattcctctcaattggtgtaactacagattactagtttagtttctgaatgtcaacaaggtttatcgttttttgacggaaaagttagagtgaacaaacgatcatgaaggttgtcgatccgttcacaagcctgtttcagtatggttttatcaccatcatttgttgtttcaatgcatccaagttcatcagcgtcaatgttcactacatcgctcatcaaagaagcaaacacgttagcatcaggatgtaacagttcttcaatttcggccttcatgccgtcgtgttcagaaaggatatcaataatatcgcgggttaaatccccctggtacgggaaccctgtttctaaatgattaatgatcctttgtgctttcgtaatcataattttacctacaaaaaagcccctttcggggctagttaattagagttcacagcaacggcacacaccgtattttgtaaatggagcatcaccgctaacgtaggcccagaaatcacatgcttcttcggcagtatcgaagattgcagcatcatagaacccgtgggcttcgttaccgttctcatcgatgaaaaccggagtccagatattaggattgaagcaatcgtcaacaacaacccaaccttctttagctttcattgcttctttgttggcttcgatgtgagctaagatttcgttcatgatgtccatttttctctcctaaagtgcgtttcgtttcgacagggctatagtctcataaccccgtatctacgtcaacacttatttgaagcgaattgtactatttttgaaaaataatccagagcacacagcaccttcaattttcacccctgtagggcttttagcaacgaaccctgttgcgtaggtgtctttctcatcacatgcgaaccaggcgcggcctgtgtacgtgatatcggtaaacccgttagcagtcagaatacgttcggcttctttctcatcggtgcatccagcttgtgctaaaacgacaataacgactaacaccaaagcaataatatatttcatgttaaactctttttaagttggttttactggcttcaatccagtaaacgggatcagaatagttaccgcacatacccagtaacacagttgtacaccctgaatgatcggaaggtcgcaatccatcaggatgaaaaggcaattcgttaacaccgatactggtagcaaaaagagcacctccagtactgtaaaatgttttgatatgatcgtatgcatcatcaggccactgaaaacgataagttttattgtcaatggttactgtatacatatcatattccgtaaacaacggatcttttccttgtgttgccccatacagagcgccgcgccattcaaccagatttgcttcaatgtcgcttacacaaatttcgttacccatacgcaaatcatgaaggatcccttcaatggtacgaatagccccactaagttcattagttaacatagagtttcctttaaatcggtttaatggttttcaggtgtagtttagcataagaagaaccaaatgagttaccattatgatcaaacttatgttcttcactcttccagtatttccccgatttcatcaagggtatacgcttcttacctgctgttatcgtttcaaccattccggtatgagtgaatgtcatgatataccctcttctttcagcacttcccagatcagtttatcaaggtgcatcaggttccacataaccgaatcataagaacccagtgagcgggagtaaatcactccccatgaacgataacttttctggaatgcttctgcactatctacatcatacggcatatcatcaccggatgcaatcaaaagtttaaggatcatcagactgttcagaagttttgaactagcgtcttgtgcttgtacttttgcacaataattttcaataatcgcttttgcctttggttcggtgatgcgtccatttttgcatcgctctttgtacacatacataagttcatcgattatttcttgcatacattctttccttctgttctgtgctcatgccatacaactgagagcgtatacggtcttgtatacgacgcgtttcgttttgcatcagttggtttgaaagaatcaaatcaaccaccgcgccgcgaactttccatagataatcaatcatcgccatatcttcatcagtatggaaacccttcgcatcacattcatagataatgctttgcctttccgccattgccatttctgctgtcgccggagtagccagagaatattcatacttctcgatcaatgattccagtgtacgtggttttacgggaatgtcaacagttattggacgaatcatatacagccccacttatcaccatctgctttaatctgtaaattagccaggaatgaaaacataatatcacagttgctttcgattagatagcgatattttaatacggtacttacctcttccggttctaccgtagtgaccttaatgtctttagcacaaagatcataatcgttacagtacccgtcaatatccataagcgttttgttttcatctggatataattccagcaaatacgcatcttcatcagttaccagcgcaactatccggttgcgccttgtgttataggttaagatcttcatttcaattccaccgcgtatacatccaattcaggggctttgtgtacgcgcatatctttaccacatacagcataagccggacagttacggcaaccattatgatccttattaccgatcaattcctgacggaatttcttagttttcggatgttcccagatatctttgataaagtcactggcttccagtacgttaagcccttctgaccatccaccctcgacccaacgttcagtaaaggaacaagggaagaattcacccttctcgttgatgtacgagctaaacatagttgcttcgcaatcttccgcgtactgtttgtattgttcaaaattttcatgcccttccatagcctctacaaaggccggagcggaacaggaatcaaaaccgaaccctacaccggattcaaggcaataatctaccagcgctttatactgctcgcgtgtaacggtatcccagttcttcccacgacctttttgtttcagacccaggaatacgatcgcgttaacttgtttcaagcgcggatcattctttacagcatcaaccacgttaaacgcgtcatcataggttttagagctaaccatgaaatgaaggttgatttgctgttgtccggcttctgcaagattagccactgaattaaacgctacatcgaatccagcatgtttgtatactgataccgcaacagccccagcaacagccgctaaacgcgctgcaacgtcttttgatacatcagcaatggtaaggtttggtacaatgcctttagaacgcgcataggccatcatatcaaacatatcagggtttgtttgtccctgtgcatcagcaccgagggcgcattgtgttaaccagggcattttatcaatgatagatttgaatgtatcaagatccatattgaagccgttagggttattagacttgtagcaaaaaccgcaaagtttaccagcagggccattgcatttagttgtgatctcgatatcgagaatttcggggaatggggcataggtaggatcagtttcgaacgatgttccccagcgagcaaactcaccagttttaacgttgaaattgtagttataccacttagagcgagcgtaacggatatcaccatcttgatagatgaacagggtaggagctttcagaacagtttgtgcgttattcataatataattctcaaaatctaacatgggattggaagacagcgcgagcgagactttcattatcaaacggtattgattggtgttgtcctttgctatcaatgttaacgcgccaaaattcactagaacaattttcagtggagtagttcaacagcgttaccgttttattcttttccaaaaatacgcgtttgtcaatctctgttttgattacatgttccatcattttacccaccgttgtttgcgttcgtcagccagttcttttttgtacaccttgatgtattcgccgttcaaggcacggagatttgaaaatacacgattgaaaagatttttcttttctttgtatgccggagacatacggatcgattcaatagtcatacccatttcatttttaggatacgctcttaactctgcgccgatctcatcgatccatttttggtacagatcacgcttttctttgtactgttcaaaagtcaacatgtccatttttttatccccgtttcgtttcggtatgggtgtaagataacatcatcctacacccagcgcaagagttatttgtattccatgaagaattttattgcttcttctggcgtcataccgtcagagaaaaatccaaagaaagtacagtgatggtcgttgtatgaaatattcaaaggagatagtaaacttcgaacatgttcagcccacaaacgatattttttgctgaatggttgatctctcattcttcgtccccttgtgcgtagtattcacacactgcatcttctggggtgcagccgtccgagtaaagagcatacatcagatcttcgtcataatcagaagaacccagcatatgttgaacagagcgtttccatttgttgtaatctttttcgcactgggtttcgctgttttctgatttaagcatttcgtacatgttcatagaaatctcccgtagtcggttacagcatcttccggatccgcatcaagttcgtacagttcgcgagctagggcgctgggtttaatatcgcgccctaagtgggcgctaacattacgtagccatttcatatagggttcgaatttgttcattttatacgtaccgcgttaaaagcctggttccggagatcatacgctttttcaagctgttctgtagtgaacagagaactatccgagtttaccgtgaaactgcaaatggttttgttgtcggcgttgacttcttcgacaacgatttcgtaaccccagatcccgctgtactcacatttcacgttccggtacttgatgtaaactgctgcaacatcttcttttttgtagttccggcttttgtagatgatttccatgatatcctccttcgtttcgatgtgtgtaatataacagaacagggttatcgagttttagcaattcgtgctaattatgccattttcttagcgattttccaggaggctttgaacgccggaacatcttcaatatcaacccagaaaccagatccgaaaccatcactgtagcaagggcaaccatcgcagtagttttcccaggtcatcacttcaccaccaacagaagcaccagtttccatagcacgtaatgcatcttcaactttttccagtttttcggcgttgtcgtcgtaaatgacaaagtaccatttaccgttgtattcgttacccagtttgatagcttcgcgaacaagtttcatgatgatttcctttttgtctgtttcgtttctatgtgtgtaatataacaaaacccctcaccattggcaaggggtttttgcaaaaattatcgtttgattggggtattatctacaaccctttgaatttccgaacgtatcgtagaatactgacacaattcggtaagcgcccgatccaggtgcatcatagcgtaaggaaaatcttttccgcatttgtcacatcgagcgtataaatgtaaatggatgcgcccgatcccatctacctgactatatttctggaatatgtaaggttttgcacctcgatagccagtagcttcatgcttacactctcgttttttgaaccatgacattaataatatccttgtacgttgaagcggtcacacaacaatctacgtgtttggttagtatcgctttggatagaatgcaacatagcgctgaacatgtttaggttattttgcatcatttccgcgctcatgagaacttccatacgcgcacgtaagcgtttattttcttcttccaactcaaccatacggtcatatgctttgatgcgctctaagggcatatcaggacgctctttgagtacgcgagcacgttcaacctcacaagcatgatttgctttccagtggttcgattccgcttcaaatttattaaggcggcggatctcttcaaccagctttttgatcatgtgtggatccatcatgtcgatgaatttcatcaagcaattggattttgtttggttgtcagcaacagaccaagacgaattatacgtaaccgtaaacgtgcggcccatttcatcaacaaccccgatcttgttatcatcggtgattgtagccgcccatttctccctcatggctgtacaggttccgctggcgacactatgcaacttgtttaatgttgcgtcatcaaacacaatttcatcactcatgtatgcctcacatagatttcaaaatacgcagaagtgcgttagtaaagatatcaggaacacaaccaccaaacaacttatgattcatcagcgctaatttcatgctgtgattttcagtatatcgcccgttatggatcccccaggcaacgacattaccaggttcatgaataactaagttagtgagagtaacggtcatgcgctctttatcattgatagagaatgaatagcagtaaccggatccgatgtcgccgtaaaggttaaggtctttcaatttcccttgctcatgcaagcgtttcatatgaactgcacatgcatgattaatagtcatttcgtcatccctagcccagtcatcaataccagaggtataacgaatattgaagtagttagtcagttcatttgatacgctcattagaaacctcacttttataaaattctttaccagacccattacagctactgcatttgggggaacggttgttatcataccgccccgaaccgttacatgcaacacatttccttaatttccagccatacacgaacctcatgtaataatcggttcgtgcggccttgcgttcatggaaattcattcgatttctaccgagtaaccttctttacgtttttggtcagcgaaatttcttgcgcctccccaatcgtaacaggttctacgaccaacttctgaatcattatgaaaccaaatcacggtatatcgctttcccataataacctcttaaactttgttgtaaacctgaaccaaccacatttcgatgttaggcgcgtaagtaacgtttaccttatgcattgtgcggtatttgtaagcggctttgtatgcatcgagttcagtcggaacacagaaagagaaaccgttgtcatagcgttctgcgttagaaacttcacaaccaactacagcggcaatgtttttattcatgttcatgatattttcctttctctgtttcgtttcgatgtgtgtaatataacaaagcccctgcactaatgcaagggctttttgattattttggtaatttttcgattgttgctttcaactcattgattttattaaagagttcatcgctatatttcatcaactcactacggcgtttttcggcccacttgatcaggaattcaggagaatctacaccatacgtgtaaccttctgcactcagttgaatacgagcacgggaaccataatcaacagaactttgttcaatgagaaacttaaccgcatcaagcagggctaaatcttcatgacttaccatgattccttctgcctttggaagatccacaacttcatcctgaatgagttcacggcgggttgtttcttccagtgtttcatgattctggatcatcgtttcgaccggatcctttgccacggctggtttgttttcacctacttcttccaaaaacatcaacatccatccaggaattttagtccggaaagaactttgtacttcactggtgcatgaatttcccagaatgtggatcgcgttaccatgcatatcagctttattgatatagataacgttctgctgttcctgtcggttgctaccataagaaaggaagcggcgtaacgatgtgttatgaccatacttccctaaatcgatttcagccaggcaatcaatgatcccacggttagaaaccttgtaacgcttaccctgtttgaaaaataacgattcttccaggtgagtaggggtaaactcttcataaagaacatagaattctttaggaattttgcgctgaaccagactcagtttacaattattagaaggaacaataacagagtgaatgtttccttcggtatcacacatagcttgcattacttgcggatagtaaagatggtctttcttgcaagtatagctatggatacgactctgacgttttttgaagtaccatttaccagtttcaaaaggcgctgttgtaaaattcattttgcattctcatacatagttaaaattgcttgcatatgttccggtgattgtggaacccctgcaaagttcactttcaaaaagaaattcaaccgatcttttatgttgcactcatcgagtccaagcgctggcaatgaaatgttttcaaaagcacgttgttcatgtctttccatttcaccccaaaacaaacgagaaccgtccggcatcggtattccaatttcattgttccagaatttcatgatagttgtcaagcgttgttttccatcgatgacttctacccatcgagattcgttgaattcgctatcaactgcgatcgcaatgataccacaaggaaaaccagtgattaacgttttcatgaaagcatcttgctctttctgcttccatacgtagggccgctgataggacggattcagatccaaatcgttgttcttgaaccaatgaatgtaactaccaaccatgatcgcatgatcgcgactttggaaagtttttaactcccggatacggtttcttacaatttcatcagccattatacaatcaccatccagtatataatcgtaatcataaccgctacggtgaaactcattgcagcatacacccgcgcattatgaacctgtgttttcaattccgcgatctcttgatccttttctctttcaaactcttcacgagtaccataatacccaggatcattggcagttgccaatctaaccgcatctttttcaaccagcgttgcgtaaccgctttttatctgtgtcgccccgtaccatccaccccgatcgttgttaatgatcagatgatcgcctttttcgttatgttttgactcaccaatgacaataacccgtttaccattcataatatgatcctcaaaggggccgaagcccctattttgcgttcttctgtagataatctaacagatttccactttgatgtaaatcaacaactttagaaaacttctctgcgtttctttcgtttgtgagttcgtcgaaatgccatacaccatcatcagctattaacgcgccaggtgatgaacctgtttctacatcacgggaaagcgcaagccccagagggtgtaagatttcgcggttaatgcgccaaacaaggcccatttcagatagagtattaaaatcgacgtatttcatattatgcctttggtttcacaccgtaggccaacataccgaaacggtgatcgttgtctgcatctttaaacagaacttcgttaccatcaatgcagataacctttgcttccggatcgatgtatggaagcaaccacaaagggatcagacgcagaccgctatgttcatcccagcgactgaaattaagttcttccagttcatcaagggaaagctcattaggatcgatataacggaaccatttggtatttttgaggcgttcggggaatgttacgatttcttcatagccgaattcagcactccatgaagagtaaacagtgacttcggatgctttggttaaaacagcatcgcgaattgatttacagatatcgattaaagtcagttgattttccatgatatatttctcatcttgctaaaattttaggcaatagttgccccatcgttttacgtgcatgtgacggaatctgtgatactgggacatacttaaaatcatccatttcacgtatagtccgtccgttcttaacgaaagtggatgcacaatagcattcttccgctactgggtaatcttgccctacatagaggaataaagcaaggttttttgttttcgtgtaatcgagaacacccaggctaaccaattcctccgcgaatacttcaaatcctgtttcttcgaagcattcgcggatcgccgcgtcaatatgagtttcgcccttttcaacatgccccttcggaatatcccaatggggcgtttcagtggcatggcccatcaacacggcaccatctttaataaagataatacccgctgatagttccatttattcacctgcaaaagcgttatcaaatgctttaagtgcgctgttagcgcgagaactggcttttgtctcaccagcatgaatgttttcgaagaaagtgcgtttccacacttcgcgacgaatggattcatgttccagacggtttttgtgattactgcgaatctgttcttctgcgttataacggtacagatcgagttctgcgtttaatttctgttctaatgcctgtgcaaatacatgttcaatattcattttgtatagcctatttcagatttaaggttttcgagggtggagtgataaacaacattcccttcatgtcgagtataccatacttttccgttctggttacactcattcattactttttcatctaaaccagggatcggcttcatgctgggagaaaacgcgatagacatcatttgctctgcactatcagcaaacccacaagggaaaacagacccagttggtttatcaagatacatcaactctactttagccatagatttcttcgaaatcctcacaatcaggcaaatacgtttcacagaaggtgcaaagcgtaaagaatgcaggttgacgaataccaggattatccggtagatacatccagaaggtgttagcaaacacgatgaatgttttcaggttttcggtggtaatttcactaacaccatcatacccggattgattgatcgcgcgttgcagaggcacctcatactgttcgcaatagtctgcataatgatcgcttgttaccaggctattagccattttaatcaaatcaacgattttcatgattttacatattccactttaacaggttttgcaacaaatttatctttggtgcgcccatgaccattacacaggtcacattctttgttgaaatctttcatatcttcaacccatccagaatccggcaacccagacggatatgcgttataacgaatggtttcataaccttttccgttgcatttcgggcaaacatgaggacgttcctttttagcagactctaccagttcgcgaatggtagtagaactaccataagcccgactcatgttttcaaagtcttttaaagtcatgctataaacatcaatgatgttatattttttaccggatggtttagccataatatatttctcacttaaagaattttttgatgaaagagatagcaaggccgataccaaagaaaacccaatatgctttaccatcaccatttgctaacacataaactgcgttaccgtatgcaaagatttccgcgatgttcattaagtttctcatgatatcctcctttttctatattaagtatcttaccataatataaaccaaagtcaacaacaaagttttatcaacccacttatcaccagtcattagtaatcccctacaggttgagacgccgcaacactcaggatcttgaaagtgcaattgttccactcacaatacgtttttgcacagtgaacacttcctttcataacaaacccgtttgagaaaattaaccagtaaagtttcatgatagcctcctttgtttcgacaaggccaatataacaaagcccctgcacgaatgcaagggcgtttttcagtttttcaacatccaaagttgcggaggacaatctttagaagcgattagacgatccaggcgggacataacccgacgataaccgtcgtattcaaaattgatttttggcggaacgtagttaacctggattgtttttctgttagctaaagaaacatactcagggatcaccgttcgcaaccgtatagcgatgactggcttctcttcaccttcgttaaagaacatctgaacagtgataggacaggcaaagatcttaccgtttacacgacgataaacaataacttcctgcgtcccttctgttttggccttcacagcgtaagttagaacataacacgaataatgatttgctagactcatcatgatatcgcgataagtttcaatatcttttttaatcgatactgaacggtctttaaagcgatctgcaatgtggtcagcagtagccgctaccttgattgtataccagtcacctaacgcgctagtaaacgcctcgctaacttcttttcgtacaccgttaacaagatacattaaacgtgttctgttcatataatcctcactgatttttgaagtattcgatctgacgcaaacgcttttcagcggcggcttttgaatcgtattcaccaagttcttttgtgcgatcgtggttcattactacccacttgtcgcctcgctgttcaatgtgttctgtaatgtcttttaacgacttatccagatccagtgattcagcctcttcacggataatagtcaaatccactggcagtgtcaacaaccttttcactccgctgatatcatccagcatagaatcatatgcaagggttacgtgcggcttgtaatccgggtaatcgtatgttgcaccagcatcaattgaatctttgaaacggctatgcaggtattcagactccaggatccctacgatagtgctaccgtattttgtgtcccacttttcaacatcaaccagtttagcaggttctataatgtcctgttgtgggaacaaatcaaccgttttccggctgtatacgatcgttgtatgcatcttttcggcggaaacagcattctttgtgatacctaatgtcttttgaacatttttcaaagcctcacatgaagcctgatcgaatttagcacacatgtagataccaggatctacaacaggttttgtgatttcaagaaatgatttcataaaacaccccaataaaaaaggggccgaagcccctttgtaataaaatttgtttttacgcttcttcgccaaaggcggcttcatcttccgcgtctttttcgacttcaacggaagggatcagagcggataccgcgccaatcactgcttctggggttactggctggcttgcgtcaatacccagtaccgaacacaggtcggacagaagttgacgatgaaccgacagttcactttctttttgcgcgataacttcgttaagatcgaatgcgcggcctttcagtaccagtacttcattttgcagtttttgaatatcagacattttattacccattgttaaaatttaaaagtatcgagcactttgctctttagttgtttcaaagtaccttcgttagtgatgatactatctccaggttgaggtgtcaaacctttttccgtggaatgttcatcaacaattccggtatcctttacaataaacacaaacttagcacccaaacgtttcaggtatttatattcgtgttcctgacgacagtcagttaccagaaggtggttgtattcgtcactagcatatttattgacgaatctttccagtgtgtaacgaacccaaaccgtgttatcatacttgcatacgatatcagttccaaacacttgcatcaagcgtctgatactccagggagtatcgttattcataatcaggttatgaatatcacccttactatgaacaatattgtatccgcgttctttgaggatttcaagcccgattctgaaaatatttagaacatcttcattagacatcacaagaggtttctctcgatcgccttcataaaaaatagcatcaggatcagaatattttccttcaaccagattacgaatgtatggtttatcgtaaccatatctctgcattgctactcttagcgttcttttgataccaaatgccagtgcttcacactgaacatcattgtacgcctcttgaataaatttagcaaccgtatctttaccagttcgcttttttccactaatcacataaatcattagctcattctcttttgagaagtgactacttttccgtcaatttcaacttccatatgaaggaagccaaaagttgccatacatgtaaccgcttcatcactatcgttagtatagcccaattcaacctcacccaagtttgtggggaaggcaccataaaatctaaatgtggcgatcgttttcatctgggagttatccaggatatgcacagcgaatgattgcttaggatcatcccacgcaacagagttaaactcgttgtaatcgtttgtgctcaacatccatatgtaaatcccaagatacgatctcatttcctcatcgactacaaagcggatcatcaaaggatcaaactcaaaagccgaaccaggtactttacctcgaaccatcatatttgcaggaatatcaactgctgggaggttcattgatggtagtgtaaccccttgaacttgtaaagtcaaacctttcatgtaactgttatcaggaatatcaacccgaaagtttgtaggcgagatttggtttaaaatcatttctgtagacataggatctcctttcctctatttagcggggaacgggatcgaagcgcctgacggggtaatataaaaatttgaagaaagtacttgaccttttaaaatctttgatctataataattattaattaaaattttatcaaaaagatctaacaagatcaagtaaaatttaataaataatttatcaaaaatttttggatctgatcttgaattcataaattttatgatctataatatac

SEQ ID NO: 23 - DNA, 143261 bp, unidentified
  source 1..143261: mol_type = genomic DNA
catgctaaagcaaaagctgaggaagagacaagggctgttgcaccacttatcgccggggatactgaagatccttattgcgaaagttgttctttataagttgtaggggcttcggccccgtttttgaggagagaaaatggcagtttttaacgtagaaaacaccgcgcataagaccggggactacccactgttccttggtcaacagatggggatgtatgactccatcaataaaaagtatccgcaactgtttgacctgtataaaaagcagaaagaacaggactggtcagaagatgaagttgaactgagccagtctatcactgactttgctacttgcagcaaatcgacttacgacgtcatggtgcagaccctgatgtggcaatgggaagctgatagtgttgcagcacagtctatcatctgtctgtttgcaccgttcatcacgaatagtgaactgttcgccatgatgatgaagcaatcagagattgaagtcctacatgctctgacgtattctgatatcgttcgtcaatgtctgcctaattctcgccagatcattgaagatattcagaacaaccaagcagtccttgaacgctctggagtcattgtcaaattcatgcgtgaattagagatcctcggtgctcgataccgtattgacccggactctgtcgacaaagagggaatccgtcgaggaatcctgagagctatgttctccctgttggggctggaaggtattgaattcatctctagctttgcctgtacgttcgctcttgcagaacagggtgtatttgtccaggtggggcagctagtgcagaaaattatgttggatgagatgctgcataccaagatggatttcggagttatcgatatccttctgaaagacccggtatggaaggccagttttatcgcaatcaagcacgagctgaaagcaattctggatgaagttcgtaccaatgaatatggttggggcgattatctcttcagtgaaggccgtgcgatcatcgggttgaacgctccattgctgaaagattggactgactggaactgtgctccgatctacgattactacggcattgaaaaagatttcgtagcaccaaaacgtgatcctctcccgttcatggatgtttggatgaatccttccaagcaacagaatgcgaatcaggaacaaacaaacaccgattatcgtcttaatgcgacagtcaatgacgctgaagacgaagtctgggatttttaaggagtaacaatgaatctgaagaattccacctttaccatttatggtaaggagaactgccagcactgcacccgcgcgaaggagttcgccattgcaaacgggatcgagtatatctatctgacactcgggaagaattacaccaaggaagagctggtggagcagtgcgccccggttatccctcgcaccgtcccgcagattttccgtgagacggactcctcaacggagtacattggtggcgctgatgacttcattgcttttgtgcaaaaacatatgaaatcctgttgacatagcaaccttctgtctgtatgatttatgtaatcctgccgagaaatctgtccggcaggaaatttagaggagaattcgaatgagtaagaaagcactgcgtaaggcatataccaaggaactggctctggaactgcgtggcaaaaagccgaagaataaacgctcttctgatgaagaacttcagcaacttgcagcagacgctgccgctcgcgggggttactaatgtcaaaaaaggccgcagttgtaaccactgacttacgaccttctctggcaaaggagtttgtttctctggtgtgggaccgactgatcggagattttgctactggattgcaggtgcaggttgaaagtctccagaacatggtgaagggagagaaagacgtctattttgccaaggaaataaaggagaaaaaagaacgccttcgtaaaactctctctacagaggttcaacagaaagtgtttgataaattggtctgccagttggcagaggctttgacagaagaagagctgagatacgcgatcttccaagagaagattacgatcaagattcatggggtagcctcccagctcgaagcggcttttgaagaggcggtgggagaggcctaacctgaaaaaggaggtcttttgaaacttacgctggaacaactcaacaaaatatttccgaatggcgcgaaggctggcagaaatgccaagtttattggtcctttgaatgatttgtttgagaagggtggtattaatactgtcaaccgcattgccggattcctttcccaaatcggtgtggagtccgcagagttcctgtataccagagagcttggaaacaatgcctactttaataagtatgataccggaccaattgcaaagcgacttggcaatacaccagaaaaggatggtgacggagctaagtacaagggacgtggtctgatccaagtcaccgggcttgcaaactacaaagcttgtggtaaagccttagggttggatctcgtcaatcaccctgaattacttgaacagccgaaatatgcagttgacagcgctggttggtactggaacatgagaaacatcaacgccgcttgcgatgctgatgatatcaccaaaatcaccaagctggtaaatggcgggactaaccacctcgcagaaagaaccgcatactacaaaaaggcaaaatctgttctaacctcttaaggagaaccacatgggaagaagcaaagaggctcgtgcaaccaaactcagcgttcgccagcaacaacgtgctgagagacaagccaagcaccaccctaaattcgatgaggaaaggaatagcgctccaccgctgactcctctgaatgacaagcagcaagattaccttcacaagttgcaaacttgcaatattgttatcgcaaaaggtatcttcggtacaggtaaaacttacctggcatcggcctacgctgctgatctgctccgtaagaatgaactcgacaagatcattgtcgctcgcccttatgtgcagacgggtaaaacctccggcttcaaaccgggaacatcgttggaaaaactcttcccgtatgttcgtaacatgttagacaccatccgtaaacgtatgggcgacggtgcctattacaatgcgcttaaagatggtctgaatgggcgtattgaagttcaggaattggaaagcatccgtggtcgttcattcgatgaaagaagctatctcctgatcgacgaagcccagcagagtaccccagaggaaatgttgagcatcatcacacgtatctctgacaactgtacactcgtggtcatgggggatgcctctcagaaagatatccacggaatctccggtctggagtgggtggaagatttcctgagccggaacgggatcgcgggtgtgggtattgtaaacttcgacaacccagatgatgacatcgtccgtggtggtatggttcgtgacattgccaaggcgttaatcgccgaccgtgcagaaggacgctatactccactggcttcgtaacggaggattatggcttattatacaggcgtggggtcgagggagacccctcctgaggttatcagcatcatggaagatgctggtttccgccttgcaaggtgcggattcaccttgagaagtggaaaagcaggtggcgcagatgaagcattccaggtcggaatgcaaaaatattacgaatctcttgacaatgggaagcaagaagagtatcgtacacatttggcggagatctatatcccctgggatggatttgcatctgacaatgacaatctctgggatttctgggattatcctttagattatcttgattatctgattcccgaccaaaaggttgtacgtgaggaactggttgaggagattcatcctaattttgaagctcttaaaagaaaaagaggagcttttgcgctccattctcgtaatgtgcatcaagtcttgggggccaatatcctcgatccacgtccctctgcattttgtttgtactatgccaaagaagataggaacggaaatcctaagggaggtactgcaaccgcagttaatttagccagaaagtacggagttcggattcttaacctgaacacacctgataaactagccttgttggagaggttcttaagatccttggaggaaaaacgtggcatccagatttcgcgataagcttaataattcttattgtctcgttaaagttgatgggcagggctggtcagttggtaaaatcggtaacaaagtgattttcattacttacaaggatggcgggatgaaaaacatctgtaacacagacgatactgatttattcagatacttcctggaatccattgagtaccaaagtaagagagagttattcgttggtgacaaggtcaacgttgacaagttcggaccgtactatgtggtagatatcggtcaccgtgagaaagacgggagtattaagtaccttatagctcgataggaggagtatgacagttagtattcatgggattctttcccatcggagactgatggaactgaagaattgtggagtcgtcgagcctgaatttttcgagtccgaggtgacaaagtattacaatctctatctaaaggttgtggctgaatcactttatagaatgaatgacgggttctttacccggatgatttatagccgttccgctgccgagcgggatgcctcttggatgttcccggatcgtcgtgacctgttggaacatttgatttacctagatggaaaatctcagtacgtgagtttgaccaaagaagagcttaaccactttacgctgttgcatcaagcggcagtagcctcagaacgcgccaagagggtactcctgtgctttaagtacagcgaccaagtccttgtggatgatgattcagggttcaatatagactggttgttacggaatgcatatacattacgacaactgattgtagacgcgaatggggagacacaagatgcagaataacgacaaaaagaattactttggctttggcggtggttttggtggggaaggttctttctgctatccaatgccctctcatgagcatgtgatctatattcatgatttggattatatggaagatcatttcaataaattgcaacaaatacgccaagccaacccagacgatatggtgcgtgttatcatcaacacttacggtggacgtgtagatatcgcaatggcttatgttagtgcgatgcgcgagagtcaagcaactgtagttacccatgcagaggggcaggtgtgttctgctggaacaatcttatggctggcttctaaagagcgaactgtcgccccaatgacggaatttatgttccataactatcagggcggggcatttggtgatggggctaatatttatacccaggtgctgttctataaacaacacttcgatcgcttaatcgattatttctacaaaggtgtattgaccgacggggagatcaacacaatcaaaggtggcggacaggtgtggctggatgaagttgagatcacgaaacgaacccgcgcagtgattttggatgataaaaatatcgaaaggatgaaatccggtaaaaatccgatcgtaacccctgttggtgtgaaagatacccagaaagaggacaccgttactggagaccctgaccgaagtgttgtcctgaaggtacatgtcgatggtgagactttctcgttggatgtgagaaacctgaaggcctctgatttcgatatcttcaacatcgatgagctgcaaagcattctgtcacaggttggggctattgcacaaggagaagaaaaggcactggagattacctctcgtgatcgccaagcactaatcgaagctatcctgaccgcaggtgaagttatcatcgatacctttgggaatgccgagtaatgagtgctcccctgaagaaaaagggggaacgtagggattatgacgtctatgagactcctgaatgggccgtacaggcccttttggatgttatccctattaacccctcatggacatacctggaaccttgtagagcgtctgggaggttctataatcacatgcctctcggttcagcttggggggaaattcgtgaaggtgtggattatctcaacacctattatccaaatcatgtggattgcatcatcaccaacccgccatattcattggcccaagagtttgtgacaaaagcacttgacgatgccgatgtcgtgattatgcttttgcggttagggttccttgagagtatgaagcgatgggaatggtggcaagagaatcctatcactagtctgatggtgttgtctcaaagaccatcatttactgaagatggtaaaacagacggaagtgggtatgcttactttgtctgggatcgaaagaacaggctgaatcttaagccattttattttttggagggacaagacgatgagtgccgcaagcaagatgcgagggatcgcagaaatcgcaaacgcagcaatcccgcccgagatgaaccagttgtacgacaacatggtggaggggattcaccaatgtgccaagaagggacttttggggatggggatggtgatagacctgccggatcacctgcttgattatttgcctcatattattgctgatcttcgtggtggaggtttcgaggttgatgtcgtagaagttgaaccctctatgcaaggcattagagcacgattgtatattacatggtaaacccgcttcggcgggtttttttagtttttgtgcttgactccctgcacagcttcaattatgcttctcgtatcagaggagattgctatgaaattctacatttatcaccgtcctatgcataccatcaaattcaaagagtacatgggcgatctgatccatgtttcttgtgaagagaaagattttagcccggatggggagcaatggaaaattaaacgttgcaatcgtcctgaggccgtgtataatcgattgaacaaaatgctagcttctggtggcgtcccttcagatggtatttatccactatccgacaaacgctcacttaaggatctggtttcttatatgaatacttgggggagacacaatgattaataaaatctataccgttgttagagatctgtgcagtgaagttgtgggaacatcttctactgttggacaaattgtaacagcagtcgtagcaatacctgctgggacagagatggctatttattccgaggataagttgtgcgggactgcacgcactagtcgggatgtctacttaaccacgggcggaggatcaagaactttacactttggtaaggttgttgatcgtacattcgtcgtgcgtattggtggtacagtgtacgaaggtaacgatgtgtataccgcagaagagctggagattactgaatgaatctttacgcaaagcttactaacccgaatgcgggttggccttatgatgagaaacgggcaaaagagtttttgaaaactcatgatgaggaagaaattctctctgtgcttgaagttgctattggtcgtagcagcacagccataactcttaatgagcatggaaacggctggaacagtgttcagtttacatttttcgttgaaggtgaaaatggtcttgaagagtacgatatcttcatgaataaaaacaatcttccccaaatttataaaacttacgtgatatggtgatgctatgaaagtaactgcatttgtgaaatatgatctgtatccgtattacactgttgttttgggtgatctgcaagagaattttgatgtgaaaacggtatctggcacatacaatcgcgaaaaggtcctccatgtgaggccgtcacatgagatagatggtcataggaatacccttatttccattaaaaaagaccacgatcttcttttacggaaattaaaggttgacttgttgaagaagaacggtatacacttcatcaacacagacaatttctaaggagaaaagatgaaagtatatctggtaggtggcgctgttcgtgatggtctgctgggtcgtccagttcatgaccgtgattacgtggttgtgggtgcaacacacgaagagatgattgaaaaaggtttcacccaggttggcgctgctttcccggtgtacttgcatcctgaaaccaaagaagaatacgcactggcccgtactgagcgcaaaacgggtgagggccatactggctttgagaccttcttcagcccggatgtaactctggaagaggatttatcgcgtcgtgacctgacgatcaatgcgatggctaaagacatggagacaggatttatcattgacccgttcaatggtatgcatgacctgtcgaatatgattcttcgtcatactacgtcggcgttcatggatgacccgctgcgtattctgcgtcttttccgtcttaagtcgcagttgggtgagagttggtctgttgatcatgaaacatacacacttatgtttaataatcgtcaccgtcttgcggagattagccctgagcggaaatggaaagaaatggaaaaggccttaaattccaaaaacttcaataattacgcctaccacatgtcgattatgggtgaacttccagaactggatgccctacgtggggtagagcagccaccagaacatcaccctgagggagacgctttcattcatacgttgatgtgtctgcaacaggccgataaaaccttttgctctcctcaggtgaaatttgcggtgctgtgtcatgactttggaaaggcgatcactttccgtaagtacggtaatctcctcggtcatgaagaggctggtcttgatcctgtgcggacgctgtgcagtcgaattagagttcctaacgaattcagggatattgcgctgtacgtgacagagcaccatactcgtgtgcattgcatttttggccgtgggaataataaaggaatcaagccacgttccatgatgaagcttttcgaagccgcaggtaacgtggctagtcagaagacacaggacaaggtgtttgccttagcagacgcttgtttctgcgatgcccgtggtcgtggtgccacgcacgcagataaggaatatccacaaggaaaaattctccttgatgctttcgaggcggttgtaaatacggacagcaaggcggtatcttccgcaatgctagagaaaggcaaaagcggtaaggagatcggtgaggcgatccgtgttgcacgtatcgatgcaatccgtaatgttcttaaggagagaccatgaaacttgtaagtcacgaagattttaacttgtggcggattctaaagaatactgtaggtgcgaaggaagagtatgctcgacttgtggcgagatgtgactaccccgcttgggaattccttaagttcttggaaaaagaggcgagcaactttaggaccacaaatgaagggaaaaggaaatttcttgtgtggaaaaatggagagcttcctttccgcatagagaaggtggaaatcttcgatataactgagtatgggactcatcactcaatcagtttcaaaggaatttcttgggcgactgagtttgagaaaacgctgctcaaccatgcgttagcaagacttttcaacctggcagacaggctcacggaaaaagatgaaaaactgcttgaacttgagtctttcaaacagaccagaaatgaactcgggaactggctggagtcgcagaacaatgcctaaggacaaagaagagtacacctacgagaaacatcatttctttctggacaaacatgcagggaagcaagtttgtgcatggtgcggtttagtagccctgcgtaacaaggccacagattggtgtatcgaaaaaggttgtaattatcgcttgcatccaagctacaagggtgctatgtttaaatacacagagttcttcaaaaaaggatagaaaaatgaattatcttgatgacgttgtactccctgtatggagatttatctttaataacgcagccttgctggttgtcgttctaagtgtcttggctggattgtgtgttggtctcgtttatcgtgcagaggacgacacagtatgggataaatatggaattccagcgttaatagctgttatgtgcggtttattccttccggtaatcatagggcttggggttatgcttcttcccgcatttatattccttgccataactgcggccataggattggggatgtttcttctggttaagtttgtgaaggaaaggaaagggaaatgatttttgccattatttatattgttctcggtatcatcatggcaggggctgtaatttaccacacccttcgtgaacaagatttactgatggtcgaggatattttaatttccctgatctgtggtgttttttggtggttagctattttatgtgccatttgtggttgggtagggaagcatctgaatagtaggacagttgtgtacaggagaaagaaataatgaagacacgtatgtattgcgtagtaaatcaatatattgcaggtatccatgccggaattcagtccgctcatgcgatcgctgaggtattccgtgactacacccctgccaagacaaaggcaggtaagttagtattggaatgggctgatgaagataagactatcattgttcttaatggcggttatcagtcaagccttcaatccctgtgtgaaaagctgatccctgtttcagctacgtacccgtgggcctcgttctgcgaggaaaaggatgctcttaacggggcaatgacggcagttgctgttgtgctaccagagtatatgtacaatccacaatacatggaagttgcggatctcgtataccggccaggtcaactgtcaggaccacaaattgcgaatcagtatcgtgatgagatgggaaatgttatccacaactatacccaagtggagaaagacctgattaccatgatcaaatctttccgactgaaaggagaatagcatgaatgatgttcgtggcgatactcttaaggttggcgactctgtttatatttatttcgggtacaatgaactaaaacccggcattgtaaagcagatccggggtaagctagccaaggtgttggttgatgcataccctaaccggaaagaagacgagagtcgttactctttgtctaagtggaaacctggtatctgcatgatcaaggcggaagagcctactggttattatccagatgaggtgatccttctgcttgaagagatccgccgtctgcgtgacgaagccccgatgaataaagatggtctgccaacaaagcaactgtgtcagggcctcctgaacttttgggatatgaaacgccagatgaaactggtaacctcctaggagagatgatggaaaatttcgaagtgatgcgatgccactcaggaagtttggcttatggcacaaatctgccaactagtgatgtggatatccggggtctgttctgcgcccctcctaaattcattcgcacaccgttctttaacattaaagagcaaacactggaagacgaagaggatggaaagatttatgagctgacaaacttcatgaagttgtttgctgagatgaatcctaacattatcgagctgatgtttgtcgatgatgtggatatcttgcaaacctccgaagtttatgaatatctacgcacaatggctccggctctgctgacaagtaaggtcgcattttccttctctggctatgcgatggcacagcttaagcgtattcgcggtcatgataagtggatcagcaatcctcagccagaggcaaagcctacgcaaaaggagttcttccgcttagttcacaactatagtgagaacgagttccttgctggggcaattaaacatgatcgcttcatggaagcaatgaacaatctcaacgatatgtgtatccttgtaccttatgggaacgatatctatggggtgatggaaaacttcagtagctcagggatgttcaatgctgacggttcaattcgccatgttgactatcagcaactttctgattctgacaagcggagaaaacctgtctttattgtcaaatatttggcagaggaacacaaacaggccaaagagaagcatcgtaactattggacatggaaacagaaccgaaatgaagttcgtcaccagctcgaagttgattttggttatgacacgaaacatgcgatgcaccttgtacggctgatgcgtatggcagaagagattctttctgatgggaaggtcctcgtgaagcgtcctgatgctcaggaactcctcgatatccgggctggtaagtggactcttgacgaactgctctcatgggctgacgagaaggaccattatatccggggagatttgtacaaaaagacacagcttcctaaaatggcggatcttgacctgtttgccagggttctcatgacggctcaagatatgtgttggagtaaactggtatgattgaagcgctggtagggatatttggtgttgcatattcaatcatagccgtggtatactcaatcaggatggaaaaggacacagtcctgaagcaaatctataaggccaagacggatcgggattggtctgaaatttgttttgccatcggttttgcatggcccttcggggccttaatccactatgttatgaggagaagaaatgcgacagcttgagtttatgggtagaatggtagaactgatttcagaatggcaatcagaatataaaatgcacaggaatctctccgaagaacctgagaactggcccgacaccagagatcaggaagattggatggaggatttctttgtttggctacaatgtaaggggtatacagtatgagttatggtcttctcactccagaacaggcaaagattatgagagaaagatactatgcccagcaaggcatcgagaaagttgtatggccttcttcaggtgataccggaactgtgaagtgcttgcatgactcttgtccgaattgtggtggcactggtgttagaaaagatggcacgggtttatgcttccacggtatctcttgtccttgtcccaagtgcagttttaagtgctgaatcgtccctatcttatatgataaccctgtttttcatgataaaatggatctatcattaagataggaggttagtatgtttcaaaagattgtacgtgaacaccctatccttcgagagcactggcatactctgctggaaaagggttttatagaaaactcaaaaggttgcatcgctctcgtaagggagcctgtgacagaagaacgagttctcgtcataagggatgccaaaaacggcatccttttttctatcaaagttggtcgtctggacgtcactaggggttcaaataccataagaccaacaacttacacttttcgtgttggagacatggggaagctcgatccagaacatctggaagaggcctttgatagttatgaagggttcgaagcctctattcgtgatctctatagatcgttggataggattatcagtgaatacaagaaaacgctaggtgtaaaataccgagtaaaagactggttcagaaattccaataaccgctggtttctcctggcggcagttctctacggcctgttgacggtatttctgaccttgcactaagaggagattattatgagagatcgtcaggagtattatcgtcagtatgccgcccgtcgtcgtgagattgatcgtcagcggcgttccacaccggaaggtaaagcagaacaacttcgtattcgtcttgctcgtattgaagcagagaaacgtgctaccctccatagtgagtgggatgagtttgtcagagatgaggctgaccacttgtgttctgttcgctgtgaagatactggaataaagtgggaaccagaccacatgcttccgctcagggcaactaaagtgtccggccttaactgtggtgataatatccaggtgatacctgcgaccctcaacaggaagaagaaaaaccgtatgatctataccgaaaggaatgaatggttgaaagatgtatagaagaaacccggcaatcgccgggttttttattgacctttggatagcttttctatcacgagatgatctgaatcgtccaggtgcatcaagtgatcagatcggatatcatgcagatatgggagtccatcaacgtgacaaagaaaccaggattcgttacgagggtaatatccatttacaccgaggatggtcttctccagcacaagacagcgttttccattaaggatattatcctccgagaatccatacagcaggcagatggaatcaacacaaaccttatggtctggctcgttacgatcaggcatgccactatcttctaattctagcatttttttctccaaagttaagttcgtcatttagcttttgtacacggtgtgggagaatctcctcataccaccaatctttctcgtgaagacgataagacacatagacctctacggtatcctcgtccttgcgtacagtccgggtataaatatcccgaatggttgcctcgtattgaccatctatgaggacgatttcgtaaattttgtacttgtcttgttcgagaatttgttctgacattttatctcctatttgattctttttccaccatgtttttcatagatggagatgactttttctaagtctaacacagaaactgtctctgtccaaccatctttcaactctctctcattaaggacacctgtctttagggtttgtttacattcacgctctgcggtcttacagcgcattaccgaattaaactgccaaacaccaacgttttctacttggaaagtgtttcttttgttttggtgcaacatccttttgagccaatctctagctattcctaattttaatgcacacacgatatctaaatctttgacaaggtggatgtaggcctgattttggagatgtcctgcacacaaagggcaaccggaacccttaagatggttggcaggtaactgctcaaaataaccgtgatgtttgcatcttattgataccatttttgaactgttggtgtaggcggttgagctataatcgtacctctgtccatgaatggtctccgcctgtaaaacgaaatcttctaaggactttctcagactgagagtatactttacctttccgcaactggggcatccattaccattcaggtgtgaactaggagtttgtttgaaggggccatgctctgagcacagtatctccacttttctattgcttttggtgtactttactcttccatagtcatatttctctccatgcttttctattgccttctttatgaaagtatctgtatttcctttgtaacttcctccgcacaaagggcatcccttaccagagaggtgctccttcggcgcttgcatgaaaggaccatgaagggggcaatctatggagacctttaaacggttattcttatagtcaacattcgagtaaccatacttatcaccgtgcttgttttttgccatttctatgaaagttttcgcggttcctctcagcttctcctttcctgaacgagatgagcactctggacatccagacgttctctttttgtttgtataattgtcaatactagtggttgtccattcaccgtgctctgagcagtacaatcttaacttggttttttgccttttatattctccataccaaccattgaacatgtggcctttttcattagctgtcaacgtcactctttctttccattgctcttctgttagtttcactctgcccccttttcagaacttatgcaggaagtatataaaaaagatttatgaaatgcaatccttgacacgacctctttttctgtcataatgccaagataaacaatttcaaaggagaaatcatggggaggcttatgaaaaaattctgcatctatgggcgagtgagcgttgacaacggctggtatttgtgcaaatctggtatcagtgaagaagaacttgccaagtggctggcctattaccgtaaaacttggcgttatgttaagggtgtctcttatgattgagttttttagaagtctttatttcaagctgtttagaaacaggcagttgtctttgtatgcgacatcaaaatggtcagtgacttgggcagacatcggggttaaggaaacaggtcaatggatgtattttgtatctccgagaggaaaaagatacgtagagccaaccaacgtgccgtgccttttatcgaggtctgatctacctgggtatgctgcctgtacgatctggagaaacggcggtccattgccggacagtgctcggagggtgaaagatgaataaatttaggctaaaatgtcaaggtggccgttggtgggtgcaggaaaaattctttgggttcctgtggctaaccatttggaatccctctttgacgaaagaaagtgcaatggcaaagattgcagagcacgtccaggaaaaagaggatgagtgcatttactatcccacacgggaagagattatcgccgcagtctctgctaagatgttgcgaccaggtccaccaccagcccctccttccaagccttaatgaggataaaatatgatttacgatgatttggttttgataaagtctgctctgaagaaatctcggagcaatggaatttacttcagggaccctaagtggttacagggcatttacatttacatgtctaagggaggcagtttatatcttgtttacaatttagacaaaatgtgcctgctggaaggatttcgttgttgtccgattcatgagcatgatctcctcaggcttggtggtgaatcttttgagatctgggatggtgctttatgattgagatctggaaaaccttgggctgtgttatcatgaccattatcatggggaccggcttggtgctgacaacagaatttcgcgagttcttggggatgttgttgtttggaatagcattcgcattctgggctaaccttttcctggatcgtttttggcggctattagaaaatcattaggagactaaatgggaagcacttttactgtccaatactggacaaacgcctacgaaggtgagtataaatattatgtattctggcagggcgaaagctttgacgaggccattcggcagatggtaaaatgtaaggacaaaggctacggttgcgtaaagatggagtggcggtgaatgaagatagaaagcaaaaatatggctatgggaacgcagtctttacagcagatggcaagagattaccaatggtgggacccgagtgggacccctaatgggagatcgctctcaaacgaggaggttatctttctgaaagccatcaagaagtacaccaaatggcctttgacgaaagtagccgaaatgatggggatctcataccacaaggttataaaggccgtccgattaagagaccctgtgctggttccttcaagaatcccggaatacttttatgaggtcacggggatggtgaagggtaaaaatggtcccgaaggtactgctaagaacatcaaggctggaaatcaagcactcagtgacgaggatgtcgcggtcataagggaactgcacaagagaggatatgctgtggaagacatcgccacagcctttaataaaagtatcggctacaccggaacacttatcagaggtgatagtcggcacttcttggccgcagaccctgaacgggtgaaagaaagaatggctagctttgaaaaactgtttggggatcgtgtataggcgcgaagcgccgcgccgtccaaatccagtacccccccgctacgccggggcctggattttgccgtcgatctttttgtgaaggagttttcgtggaaaatgttaagaaggcattagagcatcttgatacaacgcgccccggtatccggtgggtggagggtgtttctcatgggtatcagggcgcacttgcatatgtagaaaatattcgtgcagcggcagaggcttgttggtacattcaggacatggctgattggacaaagcgctttgctttgaaagaaaagacgaaagctattgttggtcatgatcgtattctttttggaaaagagccttgacacctcacggatagtaatatatcctcagggtatctaatcaagaggaggagctatgaatttctggataatgcgagcgatcgtccgcgatcacttcaatgcggaaagaagcggtgtttatgagaacctcggatgtctgccttttatcctgaaagtcgtagccattgttctcatcatcgcggtacttaatcactttggtctttgggagtaatgatatgtttgtcttagtatttacgtttttcctgttcattttgaacacggtttgctgtgggttgcagggattaacactcctgcttcgtaaaaaagaagatccgtttgttttccctggtctcatgatgattacccatgcatttctttcagcatggatgttcaatgtttggtgggagatgacaccatgaatatctttacggatgcaaggatggggaccccaataacacctgaagagcgtgagtggataaagcaagaaattgctaccgcagaggcgcagttaaccgacgaagcgtggatagagaactacgtgaagggctgtcatgaagatggcatgacctctttcgatcgcgagctagttattatgtgtattgaggctgacctttatggtatgaaaaggtgcctgaagtacaattacgttcttctttggtaggagaaagatatgttttttactatttttgcgttgttgctgaatttctttgttggtgtataccaaagtaagaaggctttgttggagggtaacaagtgttcagcagtgcttgctgtatttaactggttctttgttggaacactttcgttaatccttcttagggaggtcattgcatgacaatggaagaatatctgaaagaactctccaatgagaaactaatggagtatgccgagacggcagagagttacctggtagaacacccggaacctgagataatcaaaggtcgtagccatgtccgtaagtgggccagctttgctcgtgaagagctggcacgtcgtaaactggagggaagcaatgaagctaactgacgacccaatccccgcactagagggcatggttggggacataaccatctgtgcgacaggtgcaaaatacccgcgtcttcgcgggataactttgactcaaccactacacgcaaacggtgatgatgacgataccatcatgatcgaacttgatgaccttgatgagttcatcgagaaactacaggaagtcagaaaattttacaccgaaaacccgaaggttatgaaatgaataccctcaacacctatacaaaagtgttctacctttggtggcaaaatctgaaccgttctgtttacggcacaaaagatgaggcgcttaaaggctggatagactgtatgcttaagaagcacgaaatcaatgacaaggggagtatcctccggggaacagatgcgtactgcctgggatggaacgctgctgtcgagtttattcttggggagaattactatggcctacaggacatttgaggaatggaatgcccgtgggaggatcgtcaaaaagggcgagaaagctatgggccaccttcttgacggaactgcgcttttcggaaaggaacagaccaaagggaaaaagagtagagactggggcgagactgctttagacgatggcccggactcgtggtatatgggtgatgaaggggaatattattgatgacagcactattggcaatactctggtttctttggttattcatctctgtcacagccgttttcgaatgtgttggctggaggagtatggtgcaattcttccccgaaggtcggcggtggtggatgctgccacttcagttgctgacactctttaacttcgctgtatgtattctacagaatccatttgcggggtgataatgaaagctatcccgctgaagaagtgcaaacctgtaacctactgcaaattctgcaaagccattggcatccgcaggcgctgcacagttatgacgaaataccaaccaccgtggggactgcgtgactggtacaagcattacgcctgtgatgaacacaaacacctgattgaagaccccgacccacggggaatcatggaagctgctgcaaagaaccctgctccaccacaaaaggttgcacgggatgagcaccacacagaagctgactatcaaacctggatgagactgtaggagacagaatgtataaaacaccaaaattgaaaaaacttaaacactttccgtggatcgaagatattgacggactcaaggcctactgcaagaagatagcagaggggtctgagaacgcgcaaagagagggttgcgaggtctttattctaccaggtaatttgcacgatatctgtatcaaatacaccggaggagatgtatttcatttagcagagattatggctacatggttcaaagagcataagcatgaagcagtgatcattttgaaacaatacagggacacaacatcccccagcttttggacaacaatcttaaatgtatacaggtctcctgccagtgtagctatggacctttgggaaggctatgttcgtgaagaagaaggagaggccgtcaggattttggatatgtacgacaccagtaaggaagaatggatcacaaaagaggcgtacagcagaactggggttatgaaaattcgaggtggtttcaccacacaacaagcacacaataagggagcctgaagaggctccttttcttttatctaaagtggcgcatcaattttctcttgacgtaaactgtcgagtcgattatactggccccacataatcaaacaggagatatgtatggaagtaacggtcaagagaggaaaagggaggcccaccaaaagtgagcaggtcagaatacaagaaacgagggcatctttcctcataaaggagttgttgccagatatagttaaggatttatttacaataggccaagatagcactgttgatccatctgtgcgtgtgtcggctttgacagcccttctgaactacactggcaaagaaggtggtggcgaggatgttttattgccgggagtacttggattatctacaacactgaaaacaaatccaaagacatgggtatatttgcaaaaattggagtctgaggaaagggtagtatacaaatttgggataagtagtaagccagagcaaagattaaagcaacaatctaggaagagtgttttcacacacaaactattatccgccgtggggccattctcttattcggaggccaggaaaatagagaaggagatagcaggagccatatctgagacacctctctcccagaatgatttgcctgacggatggacagagaccttttcagaaaaggatttaccacaagtcaacaagatatttaataaatacttgtgagttttgagggttgacctaaagcgtcagccctgttatgctttatgtaagccacatctcctgaagctggaggatacaatcaccaagggtgcgccgcacctgagaattgaataattctcattcaacaatctcaaccgggcgttggatgcccggattgttgaactgtaccaccacccctgcgtgaaagattgtacatcctgttaacacacaacctgaagggacttaccgatatgtcgataaaacaccctttcataaacacattgccgtaacgtgtcgatgccataagcatgtctgaagtggcctccgttttctccacataaccacccccgcccccgtggggaaatcaaaacatgcccctgccgaaaatatcacttgccgaaaaatatctgtctgggtgttttggagcattcgtactgtctgaggtgctagacggacagctccgggcgtcaactatttttacggatctttacaaaatatcatgggcaaggtcgatccggtccccggtccctcggggcctcttcaggcatgatagttacttgccgaaactaataattatcaaatgtgacagatagcaagcatatggtttgccagcttatagcactatttatcattgacaagcttatatttatatgaattacgccatttaacataaaacacgttatacgcaccagctaacaatacatagcaagctaataatgccgcaatgttaccagtgtgacgcataggccagttgcttcaggtcattgcatggtgttactgttactgtggtgatagtttcacgtgtgattattcatgttttagggttgttttgtgaatgagacgacgaatgagaatcattattatttcgatttcgaattcaatttcgaaatgagaatcattccgcaaatataaatattttgtaaatttataaataaaagcttgacaaggagagagaattgtgtttaacacacagctatactttgagcatttccgcaatgataatcattcccatcaacaccgttacggaccggatacccggcaatgctaaagcattgaaatagttacaataagtaactattttctttattgctacgcaagggattgatagatattttcgataataaaaacacttgacagtttacacttcttccatgctcaaaatcaggcctttccataggccataggcccacattagcaagttatttattgctatttgtcaatcattaaatttcatttaatcacataataataacgggttgttaccatcaccagcgacacaataacacgagggcgatcaacgatagttgatcggtgttatcgtggcgatgtgataaagttccattgctaatcattacggatgtaatgataatacactgtaataatttcgtccttgatcgtagcgtctacgagccacgataacgcgaacgagaatgcgatttgttcgcatttgagttaccctcgtgttattgtgtcgctcgctacgctcgcgccactccccacgattacgcgaacgatttttatttgacaagattttatttttatgctcaataaaaccagttcacacaataggttagatgataaaagttatcatttgagagtgattctcacagtatgcatacataatgcttaaaaatgcatgttttattcagttaataacatgcgttattaattgttggggttgttaggtagggccataccattttaagcgcaatatgcgccattctgaggggctttatctcttgccctggttagtgggttgccgcctggagatctcgattatgcaggttttagtcacctatcactttttgattattgattgataaaacctaacatataaaaacacaaaagccgggagttgcccggcattatttttggggagtagtggagccttacagcgcgatagccagcaggccagcgatcaagaaagggagatcataacggtctaaacgattaaagcgattaagtttaatcagggtgtaaaacgtcaattgtaaaacgtctatgatggtgttaaatccttgcgccgttgtttccgtcgttaccagacaggccagccagttaaaacacgtattagacactaaagcaataaggcaagccagcagggtagcgcgtaaaaggcttgttttgcttacagtgtaaatcatgtttgtcatttggtgttactcgtttaatgaaggagatagaagaataacagacgaaaaagggcgctgcaatagcgccccgatgtttaagctaattcaatctcaaataaaacgcccatatagcgatcatcacctgaaagcgtagtaacaattttcatacattcttcaaaggtccaagccattgtagacccctggcgaacataagacacataaccggtttttgaagtgcttttgatattgtagcggatatttgacattttatttaccttcggttttgcgggttggttatcttcccgccctgaaataaataatagtcgaaaacatctggctagacaagcgttttgccttttctttacagcctcattcactgattagtttaaattccgcctcagggtgataaaggtcggccatatagcgctttttgtaatagaaagatacttccacaatgtggggcgcttcgatttctatttgtgtgatagtcactaaaccaggtttaaagcctggtgcaatgtccggtaactcaatgaccattccgccttttaaatcttttgcttttacagttttcataatcattagccttttttgcgtttcattactttgattactttaaggcccttttgttctaaaaaatcagggcggcgcaattgtgcggcactgctacggcttttcaccttgttagacaacacgccataatagcgcccgtcctcatactgcccgatgaaataacagtcatttacgccgtatttttcatcgcctgctttctggatgatttcggctaatttgtcaacactaatattaatcataattgctttacctcaaaggatagcggggcggctagcgccccgattagattatttggttttgtattcagcgatccagcgggtgaagatttccgcttgcttttccgctgcttcggcggtgcggtgctgcattacttcaacatgccaacaatcagccaaagtaaaacctgatgcatgagcggtccagggatatgacggatctttttcttgatatgctttcagcattgccggatcttcatggaaaacgtagggtttaagctggctagcgttgtatgaatcaccaccgtttccaagtttggcccactcgttatggcttgatagatatttatccagcatttcaaagaatttagatttagtcatttccgtttacctcgctttgtttggtgagtctgtattatggggcctttcggccccgttgtcaattagtttaaatcaagattcattgccaggtcaaccagggcggcgatctgctgttcgttagcgatgcggcctacaacgtggcggatataaacacggatcaataattctttattggttgcaaaacaaggatgagcgcggagatcttttttacgaaatttgtcttcggttgcgagggtcataacgccatttttaaactcaatagacatttgcaaaccatcggtaaaagtagccatgaaataattttcaaaagcaacggtttcaacgtgtaaacgtgcgccttctttgtgctcctgcatacatacagtgccataataaccgaaagcgctggcttgttcgtcgcggatgtagtaacggtcaaagttagttaagcgcatgatgtttacctcgttaagttgttttcgtttgtttgccctacgagataaataataatataagcggggatcgctgtcaatagctctttacgtatctttacattattcagtttttgcatctttatgcatcgctatgcaattgatttcatggtgaaattactttttagccgtttttacgtgtcaagctatttttatatagccttaaaacgtcctgaatcgcgttctaagcggtttttcgtccaggccgtaccctagcccattttatcagagatctcgccatattcactattttgcataggattttaggcgttgttgagagtaattctcattaccggaataacgggcacctccggtggctttcctccggtgtccatcgttgccgcttcaaccaaagaatagcaaaaaccaggaccgaaagcaagccctggaattgtaaagattttgcatatcatgccaggccggatctcttcgcctttgcaatgtcagaatataatttcctgaagtatgccgggcctcgctcgtttactctcacatactcatcacgcgccgccccctggagatcagcgggcaataaaccatgatagtcaccgttaacaatggcgatccgctttttgttgccatcataatagacgtatgacccatcggcaaggtaaattgtgcagttctgccggatgtagggtatcaaatacgcctcgccctggtgccggattttgtaaagcgccatttgcccattgtagatccggcggacgtgatacgggtcattgattgcccggtgaatgttttccttccaggcctggcgagcgttgccaacattacggatcagcgcttccacctcggggataacgacgttagcacgggcggcggcttttgcctggtctgataattcatcgtaataaaacattcgtacactaatcattttttaatccccatgaaaggaaagcaagccagatcggcggggcgcaagtggtctacacgtcgccagccttttggcgtttcaactaaaacgcggttttcaatccagcggtaaattttaccagatcgcatattgagaaaacgtatcatttgcatttaccagtaaaagttgccccggcgatccggggcctggtgtacattatgccacaagggcgggacggtttacaacggttgttttaacgtcttgatagatatcatgttttttaacggtggctttaaacttaacaaccgcgccaaccgggccgaactcttttgatccgatgtatgttaccaggtcatcaccctggcggactttgataatatagtatgatgattgattccattcatcaattttgagataggagaaaacgatctcaccctcaaaaaccaggcgatcgccaatgttgccgatccagttgctttttaaatcctcggctttacgctcggcgcgtttttggtcacgggctgcaatgtaaccatgatcaagagcataacccaaacatgccgcgcttaatgcttccattaccgggccgttgtctggcttgttagccatatcagcaaaaaataaaacataggattctgtaacatcggcaaacgttttaccgcaatgcttgccaaaaggaaagcgccccgcttcgatttcttcgatccgggcagtatcaacgatcgacaatttaccgcgacgttgccccagctcaaaatctgcgtagcctgcaaaaacttgctcaaagttttctgtattggcgatccgggcggttactcgatcgaaatattcctttgctttattttctgctttttggggatcggttgaaagattgcaaatgtaagaatctgcaaaaacgccgccaccacagttacggcggcgcaatgtatacattgcattcagcttgccggagtcgatgtaataagtaacggtgattttagtagtcattctgtttacctcgatttgtgggccgtcgcatcattgccgccctacacattaagcataataaaagtcgctcacgtttgcaagcgactttttagattaattttctcaatcagttagcacgaaaaacatcgttaacaatagcagttgtaaacatccagaccagatccggggtagttatcggcaggctgtcagcctgttttattgttactccgcttctttcaagcgtgtaggcgataaaatgacggttctcaagtttcccgctatgggattgaatagatctttcagtacggatcaggacagttaaacggtccgtttgttcgctgtcattctcatggcaaaatactaacatggttttttcaccctggcgattaaagtcacaattgacattatcgttaacattttccagaaagaaaaatttgtttgccttttccatactattttacctttttgttagtgtgtcaatcttgcccggtccaagtaatatacccgaaccgggccaggggatcaataattattttcgctttccggcatcggttcgacttccggcgatggtatgcaggccggattaatccagcgcccctggcgctgatagtcgacggcgacgatctcgcaagtcaattgatcatcatagctttctactacataatcatcacactgttttaaggccagcgcaccataaaagcacatacccgcgaatacttcaaacatgatcgttaccttactttttgagggtgagaatagggcgcttatcgccttctttaacgccggggtctaactcatcgcagatcccgatctgctcgcctttgcccaacgtgtattcgttttcgtagacgttgcaagcctgctccgtggggaatgtttttttaacattccaatcacattgtaatgccatcgaactaacagaaatatgacaagccaatataataaatccaaacatggtagccgccttaattgggcgcaaggccccgctattgattatttgttgatctgatttgtctgattatagatcccatattgaacacgggacacggtaacagattgagggagtaagcaacgaacacgatccgcgcggttgtcatattttttgatatgcgccggagtattgttgcgggtaaacttcacgcgtaaacgtaatttattgggatcgcgatcatcgattccggttaccacgccaaaagcgatttgaccatagttatgatacaccattttacccaggaattttgattcaagatcggcgatgttagattttacgttttgcatgttgtttacctttttcagtgtggcggtgaattccgccactgattaaaggatagcataacgccgccaggatgcaacaaatatttttaagaattgttgagaactgttctcatatgcagtgatgtgcatagaaaatcgctgttatgcaattagtttcaaccgataactaaatttgcggcgtttttagcggggcgcggttatcggataccctctaaaacgccctcaaatcgattctaagcgcttcaatgtgtaaccctggtaagtgcattgctacgctgagatctcgccatattcactattttgcataaaaaagccggggaattatccccggcctggttattcacctgctacggcgtatcgctgcaaattacgtttacgatccgcaaggcgtttatttaacctcggatcatactggtccggcgaccattgaaccgcgatccgttccggcttatgccgtttattgttacgctcgcgccgctcgttagtctcaccaaaagcaaggcgatcgcgctggcttgtcatcttctcaaagttgcggctttttgctgtcatatcttgatcccctgtggttgtatgtttccgctcgccattctgcgatctgttttttgcgatattcgatcagctcttcgatgtagtcgaaggatccctctttatgtaccaggaccacgccgccccggtgtttaatctcacatatcaggccgctaccctccagatcattcaacggcccggatcgcctggtgtggtactcctccccctggaagcgatattctatatagtggaacattgttttaaccctgtaccagtagtaaaaccattttataacacgccaggatctggcgtggatttttgcataataacaaaatatgagtagaatcaacaattctttcatattacgcggcgctgtttttaaatggcttatcccacgatccgaactgtagatcgatatagtgacctacattaaaatagtctgtcatgatgtcgcttctatcataattgtcagtgtttagcgcgttgatgattttttcaagcgttgcggtaaactctttatcactcgaataagtatgagcatgataatggttaatgccgagatatgtaaagccgtccgggtatccttctttaactgatttatgatccattttagacacaagatcaaacggcgcggatcggatagtgcaaacaatagttgaatagtgacggatcgcaaatgttgctttccaacctttgggcaatacagcttttaccgcttcgacaattttcgctttcttctctttattcatgtaggccattttgtttaccttttaggttatgccggggacaattccccggctttaatcagtatagcggtttaaagaatctttgcaacgtctttataagaccatgcaaaaagggaattttgtttacctggtgcaccttccgccagacgtccagcaaatcgggcgcggttatgggggaactcaaagactaccacgcgaccggatatcatttccacgcggtcaccgtttttaagaagtttgatccggtcaattagtgctttatgctcttttttgtgtttagtatgttgacgacaagcggcgcgccaattaacggaaaattcatctttttgcgtggatcgcttaaggaatttttcaggacagttataataacacgggccgcaagattcatccatgtctttataaaaaaccataccatctttacgggaaagaattgtaacacgaatgtaaagactttcatccctcgcccttgcaagttgataaacttcattgcctacaatagaagtttcgatcacgcggttatcagtcagataattttcaacaaattttttgttattaagattagaataaatgccagtccagcccatgatattttacctcgtttagtgtttagtttgttggtgcctggtaattataggccctttccgggcctggtgtcaaatgatacgttcgaatttatcaaatctttttgcggatctgccgtgaacgtcgatcacgacgttggcgcgtttaccatcgcacaaaccacaatctaaacagctaatattgtgagtagtattaacgcaagtgatctcaccttccaagcggcgcatgttgggagttttcacgcgaaaagttttataacccttgcgccatgctgtgatcgcttgtttttccgtatcggcggagatctggcaaatggtagcgatacgatgatcaaaattcttatggtggacctggtgagtgtatcccgtgttaccttgcgtatggttgatcatgttttgccatacctcaaaaggaaccgccgccggatcaccgtaggaacctaaacgaatatgacgacccgcaaaatgtaccagatcgcgagaatcaagatctttatagttgccttttttgtaagacttccagactgacagcggggcctggtgtagcgttacataacaagcgccgtttaagctggtacgatggggacacataccgcaaacagatgaatcaagttttttagcgctcgcttccagtgggctaacatcttcccgcatgatccaggtctggatcatatcgccggttttatcgttagcggttgacattgtagcaatgaccacgatcggggccttatccagaactgacgggcctttatataatacataacccttttttgctgtggattttttacccggtacactatgcacgatctcggattctgagttgacaaccagaccattattaagtttaaacgtagacattgctttttacctcgatttatcgcggcccttgccgcctgagaaaacactttatcaaaggcgctaactgaaagcaagcgcctaggataaaatattttatttagccagggataaggtttttccgtggttgatcccagggataacccattgccccgcgtcatctttaacaggttgacgtaaacgcgccgccgtggttaccttgctgttaacattacgggcaaaagcgcgggcctggtcacgggtagtaaaagaaatgtttttcatgttgtaacctcgttttgtgtggtttttgtttcgcttgtcaggtccggggattataaccccggacactagctagtgtcaattaaatgtttattcttcgccaggttcaccataggcgctagaaataggcgcgccacaatgggcgcatggagtatctgacccttcccaatagatatccactccagcaggcatccaggcccggtcgttttcgtctcgcaatccctccaaaatttggcggaaattttcacgggcacaatttgaacaaatgatctcactatcccgcatgatcaaaattttcggatacccaccgaactcatacgggtggcggatataattttttacagtgccgatcaattgtttgttagcggaaattttcattctgttttaccttttaagttgggcggcgaggcgacctgatgagatgaatagtaagcgctttactaattgccgtcaatcccctggatgaaaataaattaaaaatatttttgttcgtgtgggcttgcgccccggcgtggttagtgtactatataaggacgcccacaaataaaggtaaacgaaatggaaaacgcaaaagtgataacgagtgaaacaatggttaccctttccacctgggagacggaaagcgcagcgccccaggttaggatcgtgcctttaccgtttgcagaacgtgccagcctatccggcttttactatggcacaaaggcggttagtgagtccggcgcggtgttatgggatagccgggaggattgaaaaatattttatcgcggggcttgcaaacggccccggcctgggttatatttatcagacaggagaagagacgccaccccacggcgaaaaggcggggctaacataccaggcgcggagacctggttggaaggtggatcgccggtagctcgcctaaagtctatttgtaaagaattgtaaagacgcttgcaacatggggccgtgtatcctatattatacacatagcgggaacattgaaaccggagtacaaaacaccgggggtgcctgtcattcagcaaatgagaatgattatcattcaaataactaaataagaatgcttctcattcaacaaaaaatttaaatattgacttctgatttttcatgtgagatactgagcgatacccctaaaaaattttttcgcgtaagaaaacaaatacgatctggaaattgagatctcgatcgagaaccgggccgaaaaattttttctagagaaaaaacaattacgatctcgattttgaaaaaccgatcgagaacccggttgatagcgagaaaaattttttaatagtgagatcgaatacgtttttgaaaacgaaaagtcgatcgagaacccagagttttctacctgaaaatttgagatatctttttcgcctatttgagataaatgtccaatcttgatgccaagatacctatagcaatcatacacttgtgcataatttttctacatagatcccacaaaggtttgagataatctactcccaaaactcttgatttaaaaatttgcagggaagatgaaatccatttcaaaaactattttgaaaaccatttcgaattttaaaatatctttgggatattaaatatcatacaaatatcacacagttttgaatcttatctcggactgaaaatcactttccattttaaaatatcataggttgtacctgtagatatttcatacatttgaatttcttctggagtcggattacaaatgtcaatgaaaaatgtgctcaatacagaaatcaggaaccgttctgtctttcctgggactgtgtaaacaatacgcatatcaccgggaataggagaaaggaccaaagaagtagggccattcataagtgtaacggtattatcagcaatcttgatacgaccatcgacaccatacaccaaatcatggacagaagaataatgtgcaagcacctctactaccgggttaccgacaaggttcacgaggtaaccaagatacaggtctcgccatccacgattctgcatcatgtaccgtatatgggagcctccatcaaacatctcgcccagttgctctgcaatccaggcaacaccatttgcaatgtcttctctgttccaggtgttgtcgatatctaaaatatccttgctgaacttgttcaggcggcgcatagcattgagtacatactcacctctttcaacgaaggcacgttcagtgtcttttgcataatcgagaagcccttcaacctctgagcctgtggcgtattgcttaaggtcatcaagcacactttccacgctggccttggcctgattgaaagtccactcatcagcctcgtcagtagagaattctacaccaccaagggcgtatgtagcatcatcatagagttttttgagatcatgacgcatatccgggaagtcataaccaaccttgttatgagggataagttcaagagtgtttaaaatagtggtcattgtatatcgtcctgtaatcaatcctgaggcgttttatgcaaaggcagtacgtttgcctaccttgtatactaaaaaccccgccacggcgtttctacgcatcatacggggtatcatagcatctgtttttcagtcacgtttcatttggtagcgcatatacgccatattcatcttgtgttttacgtcgtaagtaaccggaagattaccaaatacaaagtagcagacatcatacatgatctcccagaacttaaaaaccaaatatttagaccgtttttctaagctcatcatctcacctccacaggttcaataaaatagttctgaccttgttttgtttgacaaaatgaaccaacgtaccagacaccggaaccaccatgatgggtgctacggaggatatcatatccgcgaagcttttccgctttttggacattttctggtgcatcgactatcttcatcagcaaatcaaaaccagacatcgacatcaggaacttgttcccaccttgatcgaccatttcgatattagcagcagaacgaccacgactgaatccagtgtactgaagtttcagctcgcgaatttcatgacgatcggaaacatccaccttatcttccatcttccagtcatgggcatacccggtataccaagcattactgcctttgaggtatagtgcggggtatccacgctttcctaacttagccatatctcacctcctgctgggcggctgcgagcatggtggcgcggcaggattcatacttcgccatcacgaccaaaacgccatgattccatgcgtgctcatcaattgagtcgcacgttttacattcttcaatcgccgcttcgaatatcgacacatcatccggcactaccggagagttgccagcctcataagctacgcgcatccagtgataaaaagcttctgcggtaacacagccgcaatctacttcaataaccccatcttgttgcgataaccattcttcgaatttcatggcttaccctcgttcttttcaataccaaggatcataccctggagttgttgtttcattggaatcaggattggcatatcatcaatccagacatctggtgtccagccgttttctgcacacacttgggccttttgtacaccaccacagtagattactttgatatccagctcattagcccagaactcaatgtccgagttattatcagtcggatatcggaaggtaacgaaacgaacatcaaagtcaccttcgataatcattaaatcaacaatgtgatgccacatggtgggatttaacgtgaaagtatcatcgaagtcaagtgctattttctttttctcgaatggtttcacttttcccccggatctgcattttcaccgcgatcccacttatcgcacttcttgtctacaaagtattcaaggcgtctttgggctaatgccgcgcggtccatacgatcttcttggtctgggtctactgcatcttccatttccagcataaatgcaaggtcaatagcgcagtttataacatccgcaatttcacagatggctggttcatcacaacgccaagggcgatttaatgctcgcgatagttcaccaacttcctctacaagattcttgaacaccgaatcaatagtccgggcttcagcccgaaccgaggactggaggacgcgttcagcgattcctgtcatttagactcctttttgtcttcttttgttttggcggctgcatccaactcttcagtatatttcttgatttgagcatcaagatacttaatggtgctatcagccagttgttgtgtacgtggtgactcgaccacattctgacctacatacgccgcaagcattttatatgctgtttctttctgtggcataaagttagcgtacaggatacctaggaaacatacaaccatgccaaagactgcgatcttacgtggacctttggtaacatcctttaccacaacaggtgttgttgattggctctccttccgggttactttataaattgtggactgcttaatatagttgctggagagctttccatcaggcaagcgaactcgaagtgtattatcactgttccataccgtaacgatctcaatcgtacccccggccttatatccactccagtcttggttgagaatcaggttttcaccttcgaagaactgataccctaaggctgtaccattcttctcaaggtcttcataaatcttctgaccgaaatagcaggcggcgtatgcgagagcagagataagcatcagagcaacccaaccaccataattaccgtctgtagtcagaacatcaatcacataaatcagaaaaggccatgaacccattttgtaatctcctcttaagataactttagttaagtgttaaatttccaacagtttcgatgaagccgaagggcatggaaaataccttcaccatataaatcttgtccttaccatcttcatagtaaggcacaactacaacatcatcagctcccagaggaagcatagtcataatcataccagaatctacaacgtattcaagcacagcttctttggtggcaggaatttctttctctgtttgtttgctttccaacaggccaccacggtgttgacgaatacggattgttttcatttattttctctccagcgttgcgggtttttcttcattgaatgcttggcggatgcccatatcgtatccaacacggagaatctctctttcgatcaggaactctatatcgtgttttaacttatcatataccgcatcaggaagtctttcaacaacccagcttgcaccttgagagagagtaagttttgccattttcttgtcggctcgcgccgcccccagttaatcgtcgcatttagaagctcctgtcgcccgtggctccgaacacattgcacttccacacacatctaacacccgtaaacgggttagcttatggctaatccacttatggatgactgaagtgatgaatcacttcctcttgaaactaactatacactaactaaaccatagatcaagatctttttataaagatctatgttttaggttttattatctttattgttttattctttattatgtcgtaggtcatccatgtccggggtgtccggtcaccagtgtccggggttggttacttaatagccacctcatctttggtgatatacaggctggtttttcctggtcggttgactacctctaggtatcccaactcttctaatttctccatagaccgacgaacagtcctttcagaaacaccaacctcttcagagatagtggtggttgattcacaaaactctgagcctttgctgtgaaagaactgccacctgaatttcaagtacaggtaaatgcggatatccgttgaagataacttcagattggatatcatcccataagagcataaaacactgaaactcttagagattctcatgtttctacctccagataattattcaagtgatttttaacaacctcttgggcatactcttgagatgcatcgttgtagtgaagaacagccagatcacatccaagtttgtgcaaacttctctcgaatggagacaagtgtgtcatcataacttcgaccagacttagctcttcttctgtgatatggaggggatcatccgtgaaatccctggaaatgataatctccctctccccaccttctccggcaccatagacctcgacaatcttcctgttacagaaaatttcgtactgatagcttttaccttcttgggcttcaaagttcacaattagacaacaaccaagccccaacaagaggacctggaaatccaaattgtgaacaacttttttatttaaagtgctcatctaaatccaccgtctttccgaatggaggaatccaacccttacgaccaccgcagataacccagagagtgttgtacttacgtccccagcttgagccacgatgtctcaggtcctcgatgtaaccatctgtgaagattataacctcttttgccttaggaataaactcatcgatgtactcaaaagcacatgccgcagtcgttccaccagtcgatgtaactctgtaatccagaatttcctttatgttgtcctgtgtgtacacgttgacgttgccaacttgggttgaccaacagaacaatgtgatacggaaacattggtacagggtgctcaaagcgatgatctcattaaagatacgtgtcattgtttgacgagagatagaacctgaaacgtcaaaaccgattacgatatctacagtttctgttcgttttctacccggcataaccatgaactgtttcttagttaaagcaccgtgatcacgaagaacttttgtcatcccgccggaccgacgacctaaaacccgataagtacgatcagatttaacacgagaaatcatccgttgcttaattatttgcaggtaattaatcttcggtttacctttttgtgcgattaattctctggcttctttcggtccttcaccgccagcggctttcatagcggcgtcaatcatgtcctcagaccaagacatatcctcatcttcctgatcaggagacttctgtgggtgtgggtctgtataccccagaatatctaggtctttatcataatccccgatgtgcgcccccagcggcttacctttactatccccggcttcaccaggcaaaagagcataaatttcttcagccgttttcccctcgtactgatagtcacaatagcagtaagcaaggaatccaaattcttttgacttatcaaacacttgtctatgagtgaaccatttcaaactctcggctttctggcccaactccttgaccagatcagtgttgatatagtgatcggctgcgatattgaaacgtctacggtcaaatgttttcccacgagacatgtggtcgttggtgacatggcggacctcatgcattagaataaatacaatttccttcatggttttttgacgatagaagacatcaacatattctttatattcatctttttgctgttgtgtcatcatcggatgcttgtcaatacgagcaaagacttttttcttgcgatcaacaggcatacccataatgaactctgggttaaagtataggttgcgatgatcagttgctgcggttggaagccatgcacagtcaactatcagcggcataccgcttaatagcgtcccgtagaatggtcgattagtaagtaaagcgatgcgggcagactgaactttcttcagtgctgaatcttgtagcttggagatcatctccgactcgtctttatacacagttatttccctcagtagattatgttgttggtaaagagatttactgtttctaatccagagacctcttctttatgaatcttcattgctatagttagtatagcatcataaacaacgggattaaaatccaattctttataatacttggttgaatagtcaagaagattatttactttttcctgttgccatgctcggtgagcatctgaaggatttaaaaacctacctagacctttcttcttcccgaggtatgaaatctgggaaacaaataaatcatccatcttggacacgccaagcggtaggccgtttttgtttactttgacgactgtcagtaaagagttcaaagtttttggaatgtatacacacgtaagggggccatatacttttttcgaaaaagataataaatccttgtccaatacataaccttccatcgaacgtggagcattttttacagaccacaacctaaaatttgaaaaagtcttccatgcgttaacaaccgtcacgtctgtgtacactccagtaacccttcccaacatactcttccacgccctatagtgagggcatatccaaacctgcttaccattccgaaactggactacgttgtaatctgcgtcatttataccgataccacaaactaatttcattttcttctccaagaaaaaaggccatcagttacgatggccttattataggttaattcatcaccctttgcaatgcaatttggggtaaaaattcatctattccttcaatcctgaaaccccacgctaattgtgggccaggcgctcccggaaggtgaggaacagcaaacaagacgatcccatcaatagctcctcgaatcgcgttctctgtgaaagtctctaccagatccccgaaactaagacccggcctgaagccagcattcagcattttttgctctggcggggatgctggcctgcccaagatatcttcgtacattaggtgttctcctttatttcaacaacctcaatgccgcctgtattatcgccttggtaggttacttcgacatacttttcacctttattgtatcgtattttgaactctcttttcttcttagatagctcttttgagtatacaacttcggagtagtcaaaatgtccaaggcgatccagtgcgaatcgctcaaggatcttatccatttacaccaccttgttcagcattgctgtaactttaggtaggctaagacccgtctggatcatcagttgagtcatagccgtttccatttttttggagacgatgatgaaattatctttggcaaagccaatgttaagatccagaatcagaatggatttaggctcaccagtaagcttctcccctgtcattgcacaggtgctgcgaatatatttggccttgaactgagcatatgtcacacttactttcataccgacatttgcaaaagtattgcagtaatttgcataggcaagcgcaacagctacatcttctggcagtgcaacactgatagcttctttcggttcagcctccacttccacaggtgcagtggtttcttctgccgcaggcggttgtttgtgttcgtgttcagcaagctctttgtagtcggtgttgtgattcttttctacttctgccatgtgttctttcatgtccatttttgtctcctgttgtgggatatatttagttttcagtttttcgagatggtctttagacatattcagcatcatagcctgcacaatctcacggtctagcggatcaattatagtgatggctgttttcttgtcaaccaaacgatctttcaattcattggctctttgcaagacaacgcatacatttccacgaacataacctttcttatcgtcaatgcgctcaactgtcggatacaatgggtctttttcgccatgtaccgacctcgtgctaaagttcatattggtgtagtcgcacgggccgatgcccaaaagcttttctcccatcatgaaccagtcatcaagggtcaaggagaattctaaaccccttttctttgtgcgttctacctttttatgataccgttcttctagacttttaatctcgctgttggtaaatttctttttaacatcaaacatttctaactccttgggtcttacccgttcttagtaaggtgattatcaccattcggaaaagagttgtcaacccttgatttctaaaaagtggcggtgtatctttgttcattatttgttagcgaggcaggtgtgattatgaacaaaatcgatgtgaatgtaaaaactggtgagttttgggaagtgaatcaccaagacagaagcttcatagatatgttgttggaagaaagaaaacttctcttggcccaggagagattcaattcaacctttgaaagggatagatatgttgaaaaccccaccatcagatttagagactatcttcaaggagtgagtgaccagaacccattattggaaataatcttgtcgtgcctcaataagcttccggtgcgaggaggcccctttcactgggagtggtgtgctgataacgatgaagatgtgatggatttcgcttacgatatgaatgggaaaaccatctctcactttctatcccgtatggaggtagagcatagaacacatcgtacaggtggaaaccacccctggtcagatcgtttaacagagacagtggaactttattttcgtgggcatgagtgtggtgaggcgtttaaatgtagattctgggatttttcccgccgtacccgtgactttctttatcatttgaagcctcttcttgaagatatgtcgaacggtgaagatcttcgtttgatcgtggaataccaaagccctcaaaggaataaaggttcttggttagcatctccagaccaccgctttgaccttctacatgtaaggctggtttgcggtgaccttgttcttcacactgattatttaaattcttcagggttggatcagttgtgtagacaagtaaatcattcgattatcaacatcatgaacaggaaggttggaaacaaagctcgtaaagccatgttcgtttgctctcctgtcgaaactatgtttcatttagagtatgatcccaaactacagagcatgatggagggggaaaccccgactgaagaagaactcatgatgatgtctattgctggatatgaagatgaattttggcttgacaacgtaaaatctttcgatagactgaacataaaaccctttaacctagaggaagctgtcaaatggtatcaacagacaagagttgtattcaagctttaagtccggcccaggaattggctctggcgatcaaaattgcagcagaagcccacctgaatcagaaagataagggtggtaacccgtacatccttcatccgctgaaggtaatgcactacctgaagaccgatgattttcagcttatggctatcgccgcgcttcatgatgtggttgaagacaccgatgttaccgctgcggatctggttctgctaggcttctcgaaccgtgtgaaggatgctgtggttcttctgacgaaaacccctaatcagacaccggaagagtattttaaccgcctggcccaaaactatgatgcggtacgtgtgaagcttgcagacctgcgccataactctgatgttcgtcgtctgaaaggtctgacagataaggatttgttacgtgtccgtaagtatcatgacatgtatcttcgtctgacaaagatgaaagaacaccatgaagctattaacatgttggctacattatgatcattacgaaaaaatcaaatggcctcccttggttcgaaatggaaattcctgacaaggttgtagtatgtgcgagatgtttttccacttataacctgaaagatgctcctgtaaaggctcccgatcagcttcggattaaggaaccttgttgcccgaactgtggttttaaatggtatttgtcatgaacctcttgacactgcttcgcacaaacaagtatactcagaaatagatgggattcctgctgggaatgtctaaaatgtgggcgtttcggcccttggcgaggaagatataaggagaagaaaaatgcctaactggaaaactgctctggacctccgcgatatctgggataaacggaatggtgaatgcggcagagaagactggacagataagacggtccatgagcttgctaaagagatagcccgtcgtcttgaacggaaattccctcttgagtcaaactatgacaacttggataatggctgcgattatgagctgtgcgatataatcggctatttccgggatgttccaacacaccaagattggttagcctctattgaagaatgtgagaatgagggatatgatgctgatcctattcgtcattatacacccttgcgggaattcaacgacatcatgaatgatttttatgattggtgtgatgaaaatcgcgtatgggtggataaataatcattgcaatgggggaggatcaaatgtatcctgctcccgaatttaatttacaggagacaaataatgtcaagtcgcaacatcttttctggtaactggatcactttacgtgaccttccaccactggtacaattttgccagcgtcacaaacgttcactgatgatcttcggcggggcaggtattggtaaaagtcaggctgtgaagcaaattgcggattctcttttcgggcctggtgataacctggtagactttcgcttggctgataaagataacaccgacctcaccggggtgcagattccatataccgatgacaatggtgttactcgcacagtgtacgccttgccggatttctggcctcgtgatcctaactggaaaggtattgtgttccttgacgaacttctccacgcagagccttaccttcagaaactggcattccaaataatgctggaccgtcgaatcgggacctatcagttcccggaaggggctgtactggttgctgcgggtaaccgtgctggggatggtactgccgtgactgcactggaagcccctttggctaaccgtatgatgctggtagagctaacctatagcgcatcggtgttcatcgaagactatgccatgcagaacggtattcattcgtcaatcattggttttctgtctcgtaagaacagtgctattgaaaactatgaagaaatgctggatatcgggtgtccttctttcgccacaccgcgtactttaacttacgccagtgatgtattgtacgattacgatgctaatttgctgcctgccaacctagctaaagtggcccttcagggcttcattggcacacctttaatggctgaactgtgggcataccacaccaagatccgtaatatggttccgatcgaagacgttatgaacggtactgccaaagatcctggagaccttccatcagacagcctgtggattttgggttcagaaggcgctatttggttgcgtaaggctattgcggataccaactacacggatgaccagattattgaattctctggaaacttccttcagtatctttacgatcactttatggaccagaaccgagacttcgtaagctctatcttcctgtcgttcattaaggaaaatgcgtttggtaaagctttgttgaccactgcgagcaaccgtgacaagcttcctgcacgtttgttgaaggcaaagcctatcataatgaaaattatggcagacttccaggtcaactacgctgaagatattaagcttattgaaggaaaataatattgacagcccctcctggggctgttatgctttatgtatcaaacaaaacgaggatatactcatgccgaaattaaactggaaagaagcacagcaggctatgcgtgaaggtaaacgtgtccgtaaccaatatttcacttctgacgagtggtttgaaatggttgatgggtgtatctacgcagaagacggttgccctatggcaggctggtatcgtggtgaagcatggcaggatgaaggctggagtgtgatcgaatgatctacaaaaaccaattccgtaatgtctggcgcaagtttgttaacggtaaaggctatgtgtcttgtgaccaaggcctcacttggacagaaaacggtgcccctgaggacttgatcaagcgattaccttattacgtggaggttaaagtatgagtcgcagacctggtttcggttatatctacattcccgattttactggggaagagcgccttgttaggatcagtgaccttgacatcagtgatattgaaaaccaggcgcaatatggacaggctggaaaagagtgttatcttcgtacagacaatggcttctgtcagtcaggctggacatctggcataactgcaatggaagttcttgagaagatcgctaaacacgataaagataatcttggggcctttcgtgattatgcccatcgtaaccggattgtcctcatgaagggggaattatggtaaaaaacttttcgaattttgacgagatcccttcttctgtaccgattactgaagaacatttcaaaaatgtcggaggtgctaatgacctagtgcaggcatatcagccacactggttcgatatcgaggcgatgatctgtttctttacacactgcatggtgtatggggaccgtgaaactttccgccctgcatatgagcgtgtccaaagtttggctgatgaagtgagggaattcggttggaatgaggaccgtgttcgccgttgcaaggctctcggagggcttgaaaaagaggtctatgaggtctaccctcatctttttgtacaacaggggtgatgaatgaaccttcagaacattgggccagagttaacagaagaccagaaagaagaactggaaaaggtccgtgaagccctcaaaaaaatggttggcgatagaaagattgttgttcttggttgtggtaatcctgtggggtactcaacactagcttctttgtgggatgcagaaaccatttctttggacgcgatatctgcccgtcctgcaaacaatatcattatgattgataatgatgatgttgactatgctaagtttaagatcgttaaggggcgtggtcacaacaaactaaagaagaaaaagaagaagaggaaataatggcaaaattcaaattcccagtttctgaactaaacgagtgttggtggcttgacaccgccgactgtgttatggcaggatacacctatcgacggcatcgggtgtttgttgtctgtgcgaaaaatcgtgcggatgctattgaatccatgaaagagtttaaagagaggagttgtaaatgaaagttaaaatgaccgcaagttacagcgaacaagggcacgccccccaaaaaggtgatattctggatgttctggaggaagtgtataatgggacatttattgactattaccgttgtgagtggaaaggccaagacctcgatatctatccatacgaatgtgaggaagtgcgatgagcttcaaatacaaagttggtgacctgatcgatgctgcaaaaagcggtgagattaatgtctttggacatggcgcaaactgtttttgcacaatggggagcggaatcgccccgttgatcaaagaagcattccctaagatgtacgctgccgatctgaaaactgagaagggcgataagaccaagctgggaacctgtacaatggcctttttgaatgatgggtctctcgcaggatttaatctgtactcacaatacggctataatcgccgtaaacagggcctcagggaccttgattacaatgccctgtatgattcaatggtcgagatgaaaaagctcttacagagctatacagacggtcctatggatacctaccgaatcgggttccctaaaatcggtgcaggccttgcaggtggggactggaatgtcatcgaagcaatgatcaaatcaatcttctttgattgtgatgtgacagtttatgtcttgaaagaatgggaaatccctggttactacccttcagacgacggccctctgacatcagaacagatcgctgccattcgggaaatgacaaaatgtggattatccacagggtggactggattatcgtggttaaattgagagacggtatggtagcacatacaaaaagatcgacctttacgtgggtaatacggtgttaacctataacgcccctcgtggtcagagctttgccatactactacttggggtagagaaaccaagtggtgacggcacgggtattcagattgacgaatggctgaatagtcgtggctggaagctggagggtcctgatgagtaaatcggtttttgtcatctatgacactgttgacagatgcctctggaaccacaaagccaagattggatggattagctctggcgctgccaagaatgcgtggaatcttgtccacgcaacatggagtgggaagcagtattttgatgaccaacaaagatatgtagttcttgaactttctggcggacacattagcaaattatttgaggagaataaaattgacaaaaccaattaaatacccaagcaccgcacagttccgtcaggttatccgcaccatgcatgataaactgacgttcgacggtattgatgaagagggtaatatcaagcggaaggtgttgccaccggaagcgtacctgatcccgtacatcggtacggttaagcttcacggcactaatggcagtgtggtattccactctgaggatgaagttgccttccagtccaaagagcgtgtcgtgactgtaggtgacgataacaatggcttcgcggccttcatgtctcgaaaagacaccgcagagttgctttctcaggttaaatatctgtgtgaagtcaatgacgttgagttccagttcccggttgaaattgctggtgaatgggctggtcgtggcattcagaaaggtgttgccatcactgaggtagagccattctttgctatcttccgtgtggctgtgggccgggatgaggcaacggataccctcaactggctaccgccaacgttccagtttggaattggattgccggatgctcgtatctacagtatccttgacttcggttactggatggctaatatcccattcaatgagccggaacttgtccagaatgacctggcagaactgactcgtgaagtggaaaacaaatgcccggcaggtaagttctttggcgtagaaggtatcggtgaaggcattgtctggtctccaaaagatcctgagctttctaaaatctctggcctgtggtttaaagttaagggtgataaacattctgtatccaaagttaagaccctggcggcaatcgacccagaacgcctcgcaagtatgcgtgagttcgttgagtacgctgtgacggaagcacgtcttgagcagggtgttagcgaagtcggtcttgaccagactaagattggtgaattcattggatggattaaccgagacatcaacaaggaagagggtgatgttctggaagccagctccatgaccatgaaagatgttggtaagtttatcagcaacaaagctcgtgcatggtacatgactcgtctgagtgaggagggctaatggccctcattgtagccacaacgcggtctgttgaaaaaagacctggacattctttcaccgagtgtgataccttgattttcgaagatgaagaacacggcaaaaagtttgttaaagagaacaaacagtttgtctatcatgtccaaaaagcgagggtcattaagaatggtgagaccagaaccgaagtttaaagtcgggcagatagtcaaagatacttggagcggcaagataggccctatttcaaccatgtacttttcagaaggggatgagtacaacaaggccgaatgggcatattctatagaccatatcgggtggttattccatccagagtcggacttggaggtggtaaatgggccgcgttaatacttagcagtgaaattaaaacatgcaaaggagcaatctatggttaaagtgaatggtaataccatcacgatcaacgggaataccgtggttaatggtgacattattggtggggacttgagtatttctgcaaatggggataaaatcctcatcaacggaaaagaagtctataccacttctgataaaaacattatcgtggtcatccacggaaataccgggagcataaacaccacatctggggatgtgaaggtgtatggcacagcaggtaatgttaagactgtttctggtgatgtccgtatcgaaacagggtcacttgcagatgtgaccaccgtctcgggagacgttatagcagaaaccattgaaggtaatgttagaacagtctcaggagatgtctctcaccgtcgttgatatacagccccgcaatggggctttttaatttggagtgtaaatttgaaattgaaaaatattattttggcaaccgcctgtatcctttctctgactaccacacctgtcttagccaaagaaagtgtaaagaagcccaaggtgattcatctatgcaagaaagatgacacagcggtaaacatcttagcctgcaacatgtacaaagaagctcgtggggagagtgattccgggttaatgtcgatcgcattcgtaactttgaatcgtaaggataacgataagtaccctgggacagtaaagaagatcgtctaccagccaggacaattctcctggacatcttcaggaacaacgtttaaagtctatgaaaaggatcgctgggagaaggcacaagagtttgcaaaagttctgatcaagattcataaacaaaacagggtcgtctacgatgctctggacataacacacggggccactcactaccattcacgaaaagtaaaaccctactggacaaaggccatgctacgcacagtcaggatcgataaccatatctattataaagagaaagaagattctcagggggcatgaactcatgaagaaattcttagtgatatttgtttgcattacccctctgtgtgtgatattgtcactgtcacagcccatatattgggaacaaatttgtggagcatacgcaataggtatggctacagcggcctttagactaaatacaaacaactgcaaaaagtaggagaagtagatgataatcgagcgtaatgagaagaaggtagaagttagtaccaacgtcaaacgctatcaggctggtatcgcgatcaatgcggaaactttcagtatcttgatcgatggtatttatgaggacaagatccttgctgcctgtcgtgaacccctgttcaatgcggtagatgcacacacagaagccggatgccgggacaaaccgattatcatccactccccaacggaccttgaaccgtggtattctgtaaaagatggtggtattgggatggactttgacatggttacccagaccttcatgatgttggggtcgtccactaaacgtgaatccaacgaactgatcggtgcgaaaggtattggctccaaggccccgttcaccgttacggacatgttcagtgtcatctccatcaaagatggtactaaaactgtgtactctgttcataaagaccaagggatacctgaggttgtgcctctccacgagtcaaaaaccatagaagaaaatggtgttgaaatcaaattcaacgttgacccggcagagactgagaaataccgccgtgcaattatcagttgcctgcgttatgctaagttcccttacgagatcaatgacccatttgtgacttcatctattcgagaccgtacctacccggtgcagtatacgttcaaagatgaagaatctggttggatgctggaaatgtattcgtcggtatctaacaatgctgatagcgttgtggttatgggacaacagccgtacaaatcaaagtttctgagcaataaccctgaatggcccctgatgatggtgtccatcccaatcggggattgcgatgtcaatccgggacgtgaatggactatcgagggcaagaatgaccgtggcttcgaagagcgccttaagacattcgttcagacggcccttgatcgccgtggtgaagaaatttaccatgaactccgtaagcttccaaaacttgcggatgttctggagtatatgaagcgagttggcgggtggtttgctacaaaatacggcgcaaaatacattgcggaattgttcagagattatgttgacactgtaagcgtgaagggatgtgtaacttacaacggtcacggggagaagcgcagaactgacaaagactattcatatgcggatatgatgaatggttaccatcttgtatacaacgacgacaataagctggttagaagtaaatgtaatcagttgtttgatgtaacaggtaaggccgtctatctgacggacaatcttggtgtggcacaaatgtgtgataatccattctttgcgggaatggtccataagctgtcggatttggaaaagcgcccagcatcgaagtcggataaaaagtatggcggctatagcctgtatgaaccagggcatccagtatggatcattgagcagagtggagctattaggaaaacacgtatctctcgtgcagattttgatgatattaaatatgccatgatttattctggtggtcaggcgcgtgggacttgtgatcttggatctacggcgtacctttctaaccgtcatcaaccagagaccttcttgtcggatcttggtattgatgataaattgtacatcgtacctttaaaccgagtgagttggctggatgatgatgttaggatgattacacaggacgacctttataaggttgcaagttcaaacctgttggattatcatcttaatcagttaaccagacagcgtgagtatcgctctctcttggacgacttaaagggaataggtgtagaggttgtcaaagatcctgaatacaaggaaaaggttaatatggctagtaccctttaccatgttaaaggttattatagtgcagaaagaactgcgaagagaatcgtcaatggacgtattcgtgttgggaaaagcctgattaacaaggtaaaagaacgttacccgttactgaagcacatcccgatggagcattttaactcaccagaggtggctgagtatcgtaaatttattgatagcaaaggagagaaataatgagtgatctttttaaatcccgtgcagatgctcgtgtttgtgctgcaagtcgtggtatgaaggttgtggaccgtggtgtatccccagcggtgctggcagaggggcgttggatggttgtccccaaagacagtattggtgcttccccggaaaagacgatttccttcgatatggaaacttaccctgcgccaactgcctctatgttctttgcgagtcggggagaggcccgagcattctctaagactgtacagaatgcgaagattatcgatcatgcaaagacaacagcaggacatgacaaagaggagggggttgtcaaggaccttggcaagcgtggtaagcgctgggaagtggtgttcgtagtttctgatgtagaagtgagcgttactgttcctcagcttccagaacctacacctgtgcctattaagatttcggttgttgatgacacgaaagctgaccccattgtcatcatgacaccaggcaacgtttccatcacacttcccgatgggaccattcatactctgggcagtaacagcgaaatctttaacgacgttggtatgttactgttaaacaacaagatcgacgaagccgtagcgcttattgaggcgggaatcgctgcaaaagctgaagtggcaatcgatcttggaccggatatgaagctgctggacggtattctgtactggcacggtatcaaacaagaaagcggtattgctcgacgtattgtttcggatatcgagaccgggaagttcgataaccgttatgttgagttcatgcgtaaactgatgctcaatccttcttacaaatcggttgaaatgctgtacgacttcctggagcataacaagtttgagattctggagaatggcaacatcttggcctacaaggggcttaagcgtactgagaatggtcctcgtgactggttcacaggcctggtccccaactgggctaacaccaccgtcacgatgccaagaaacatggttgaagatgacccaaccaaagcttgtagtcaagggctgcacatcgcttccaaggaatatgcccgcgattatggcaatgtggttgaggtgtctgttgacccggcagacattgttagcgtaccatataactacaataacaagaaatgccgatgctgccgctatcaagtattaacagggaaagaaaagccagcaggtgctcctgatgttattgttgtgggtgtaaggggtgctatcctggacgaaatttatctcgataaggaggattaatgtccttagtccacggacagggcattaatgatgccccttatcccacaacccggtacactcttgttggtggtaagagcacacaggcgtggaggtgcccgtactacaccctgtggcgtaaaatgttggaaagatgttactcagacaaagccctgaataaaaaaccgacctactccggggttgttgtggaagaggcgtggaaaacgttctctaatttcagagagtgggttgaatgtcaagatcaacacgttgcttggctcgaggaaagtgggaaaagaatagttgacaaggtgtataattttaatttagataaggacattcttgtacctgggtcaaaaatttacagttggaatacatctgtgcttgtaccttcttatctgaataaattttttctgttgcgggattcagctaggggggatttccccattggggtttcttggcattctgtggttaaaaaatttcaatcaagaagaagaggccagcatctggggtattttgatgacccgttcaaagcacatcaagcgtggcaaaatgctaagatcttggatataatagacattcatgatagatattcgcacagtggtgtttgcgaccacagagtctccgaaagattgcttatgatagtaaaaaacataaggcgagacttgcaatacggtatcgagacaaaaaatttattaggagggtaacttgagagaggattttggggtgggaacggaagaggccttaggtgctatcattgaaggcaaaaacgttttcattactgggccggggggcagtggcaagagccatctgatcaaaacaatccaatccctgtatccaagttcaacattaacagtggccccgacaggggtcgcttcacttaatgttgatggaatgacaactcatcgagctttcgggttatcaatggggatagccacagaagatgatggtaagacagtaaaaactaaacctaaaaaacttttaaaaagcaaatctcttgagcgtatcattattgatgaaatatctatggtgcgagccgacaaattgtgggaaatggatcagaaactacgtgttgcgagaagggagcctaagaaagctttcggcggtcttcaggtcatcatgtttggtgatttctttcagaatcctccagttctgacagattctgaagaaaacgcttacttcgaactccacagcacagaattgtcgtgtttctcagacacttggagagagataaatccataccctgtacttcttgacaagatttatcgtcaaaacagcgtgcatttttcatcgctattgaatcatatgaggaaaggcgagcgtattgatgaaatagttaaattcctcaacaatcagtgctattcaaaaggtgcagcactgaatgcgattaccctgacttcaactaatgccgcggcggaacgtatcaacaaaaagcattacgatcagataccgggtgaagaggttatttacaaagcctccaaaacaggagattttgcccagcgtccagtttctgagagtctacacctcaaggtagggactcgtgtcatgatcaccgttaatgatcagaatccagatgaagacggtcctaaatttgtaaacggaacacggggtattatcaaggccctaaggaagttttcggtagatgtagaactggaagacggcaaggttgtagagatcgaaaagaatgtctgggaaaatgttgaatacttcccaagaaaggttatcaagaatggtaagactgaagaggaattggaaaagattgttgttggaacatatacaaacttacccattcgccttggttatgcagtgaccattcacaaagctcaaggcttgactttgccagaggttaatatagactttggttatggagcttttgctcctgggatggcctatgttgcctttagcagggccacttctacaaaaggtttaagattgttgcgtccggttaaagaacgtgatattatcgtagaccaaagaattgttaaattctacaaagacacattcccaggaaaattttaggagaaaataatggcatcatattctcgtctggagctggtagaaaagttccgcaaagaacttgaagtatggaatcaatggcaggttcctcgctctgaaaaagctatggacactacccacatccaaatggcctctcttgacgagatgatgtctgcttatgggtatgtccctcgtcgtctttctaacttcccagaagttaaagatggtcgctttggctaccagcttgcattccctcgatgtaaaaagatttgtcgcccattctttatctcgttacaggatgcagttagcatccataatggcaatgggtacaaggggaatccattccgtaggttgggggatcgcatgagttttgctctacagaaccgtattgttgagcaggtggcggttcagagggacaagtctttggaaggtggtatcaaatcaactaagaagtggattaagttctatgaggagagcaaaaatgcaggttgaagacttcactgacctgagtaaggtaacaacagaaaagctaatgaaactccgtgatatcgctcaagattatcacgatgagatgcagcaagctgaactggaagcgtgggaaagactccaagatataattcatgaaattgtcaagagggcgaagaatgttcaaacgtctaattaactggctctttgccaaagaggatgaaaccacagaaaatgaagttcgggtatttgacttcacagaacaaggtcctggacatgatatcgctatacgagtcatcaatgatggtgaatacgcagaggcagtggttgccctgaaacttgcggatctgccgcctgcggttggtgacttcatcgtcgtagttttagatggtgtccacaatacttttgtggtagaaacttcagaaggtgtgagcctgactgttactaaattgaccctaactcgttatgaaggcgcagaagatgaaacatcgtgaaaatatttgtaagcttattgatgatttgaaacgcatcgcaagtcaagcaacaccgggtaagtggtggatagattcacatggtcatgctatggttgcattttcaacggaagatgctggcatggaaacagtgtttgtgacagacggaaatatgggtccggttgtgcgccatgagaacacaggtaatctttcggcttggcgcaatgatatggatgcaacatacattgcgactgcctgccctcagaatgtgctggcagttttggaatatctaagttctggtgctaacgcgtggaataccataagcacttatatggaaactcgcctgcatggtgatgcagccgctttacgtaatgatgtaagccggaagttgtttgatgacggttgtcatagtgcagcagtccatgcaattcagtttatcgaggcactcattgaccagaatattgaattaaaggccgaactggagtctaaatgatcaaagattgttttgggaatgaggcgagagttggcgacaagatcgccttctctcaaggcaatgctggagcaaaaaagtgggaattcggggagattacccggataaccgataagtgcatatattttcatggtcgcgccgggggaatgttccgtgactggcgtgatgataccgagcttcgccgtggagaaggcgcgttcgtaattaatttagaggcgagaggacttaatgagtaaagccgcacttcctgtagagatcgaattcagttatgaccaccctactgcgggtgtcgtcaccgtcgaagcactttattctgtgatggaaggcgaccgtaacagtcgtgaaagcgatgtagattacaacggtttccaagatttggagtattatgctgtattctctggaggcaaacagatctacgttgacattccagatgatgtcctataccatcatttacgcgagtatattcgcaatcttgaaattgtaggttgcttccaggaagaggaggagttttaatgaaacacgaagttaaagtcgtcgaattcgaattcaataaccacagtggtccaaattacgtggctaaagtgttggcagaacatcttgatgaaggatatactatcgcagggcaatctgaaagtgctagatatctgacctacactctagttaaaattatcccaatttccatgacgggtacggtaacaaatgccgatcaccaaggggtaagtttccactaagggaggcagtttgaagaagaaagtgatcattctttatgattacacttcggtcatggcgcgtccttggttagaggctggctatgaagtttggacttttgatggtcaacattcaccaggagtcacccgcgagggtgaccttgttaaagtcgggatgtggttcttccacgacaagaccgttcaacaagctcaagagatcaaagaaatggttggtgacaatgttcatatcgtctttggtttcccggaatgtactcacctgaccaatgcaggttcacgtcattgggctaagaaaagagcagcaaaccctaacttccagaaagaagcaatggaactttgcctattggtagagaaggttggagatttatataatgttccgtgggcctttgaaaaccctgtcggtgttctctcttcaatgtatcgaaaacctgattacatgtttgatcctaaggattacggcgggtatctcccaaccactgatatacacccactatatccgcacgtataccctcctcaggacgcgtataacaagaagacgtgcatttggatgggcaatggcgcaaaacagcctgacaagcttcctgtgaaggaattgtacaaggacaatccaggctggaagaagtgtggtggcaaatccaccaagactaaaaatattcgtagttgtacacctcgcggttttgcggaggcgttttaccagaaaaataaatgagagggataatgggaaatggaccggattgggcggcgtatcgcaaaggtggcaatgaaaacccaagagcaggttttggaagtaatcgcggaggcaagttgagttatagtaacaatcgagcagaagagaccctggaatcagtgctgtctggcacccgcatcatggctgttcccgaaatgagtctctctcttgaagcagcacagtattttaagatccgttctgcggtatccccggcggatggtatcaccccggtagcaacatacttgccctattatgataagtatgggaaactgacgggattcaagaaacgtgactggacgttacagaaggaaaagacaggacacttttcaactgttggtgctgtgaaggcatcatctcagttcttcgggcagcatgaagcctctatgggtgttggtcgtaagcagatcaatatcgtggaaggtgaaggtgacgtatgcgccgcatggcaggcagcgtatgagatggttaaggctatgtccaccagtccaaaggccagtaaaggcgttaaagactgggcggatagcatcttaaaaggtatccgtcatattcagaacgacgaggacattggaggtcttccgacactaccctatgtcggattaaactgtggtactgcaaacgctgttgatactttcgcaaacaacgagaagttcattcgcagttatgagaaggtagtcttgggctttgataacgacgaagccacagcattagaaaaagaaaagaaaataaagaaaggtaaagaagcaaccgacgatgtcgctagcttcctgctgtcagaaaacatttacgttgtgcgatatcctaacgagcgtaatgacccggatggctttaaagacattcgtgacatgtatgatgcgggtaaggtacgcgagctttatgcaatgtttaccaaagcagacgatcgctatgttcctgataagcttatcgggcttaaggatattaccattgagaatcttcgcaagaagaaaaaagatggtgttccattaccagggctacccggcctatataacctgacccgtggtccccgtactggtgagctttggacattgacaggcccgtctggtggtggtaagtctacaatctctcgtaagattgaatacgcgatcattgactatcttcgtgatatgtcaattccccgcctagatggctggaccgagagtgagaaagtagccatcatccgtctggaagaggatgaagaagagtctgtaaacagcttgtatgctgaagagctgaaggtggaccctaaggcatttgttgctgacccggagcagttcttaaccgaagagcaacaccttgagattcaccaacgctggattcgggaagataagattaagatctttgatcacttcggttctatcccgacagaccagcttattcagaaacttaagcagatggtgttccttgatggttgtaaatggatcatcctcgatcacctgtcaatggtaatctctggtcttaagtccgacaacgaacgtcgagaccttgataacatcatgaccgagctggcagctttctgtaagaagtacgatgttttcatcttatcaatcagccacatgaagcgtaaagaacttcagcttccgaaagataaagatgggaatctattgccgttctggtatccggtccgtaaagaagacctgcgcggttctgcggcccttgaacaactctcatgggtggttctgggtgttgaaccagaagagcttcctgaccgctcccgtggacgtgtacgtatcgtggtgctgaagaaccgcccacacaaaaaactgggtatcgctgatacaatggttatggatgacaacgggcagttctccgatgcttccggctgggaatgggaagatgggatgttcaagcttaatggtgaagttatgcttcgtcctcagagtctgatccatcaactctctctggaaactccggttggaaaggtaaatgttccggcacctgagtataagccaaccatcgatcttgataggacaccagtccctactcttggtcctgacgatgatacgcctttttccccgatagggttgcaatatgcaaaacatgcaatttatgtaatttaataccaactgagaggtgggcgacggtacagtctagtccaccttgcataggaggaatattgaaaaccgattttggaattggtaagcaacacgaatttagtgccgattttcttagagagctttttcatgtagacccatttacaggagtagcgacttggctaaaacgacctggtgaaactaaagaatgtaaaagatggaacacacgctacgcaggaaaacaggttggccatctgcataaatcaggatacctgagagttaaactccttggaaagacccatttgttgcatagacttatcttcacttggtatcatgacaaatcctgcatgtttattgaccacaaagataacaataggcttaacaatgccatcttcaatttacgcccttgtaataaaaagcaaaatgtccgtaactccaggctaaggatctccaacagctctggatacaaaaatgtctggttgcataagccgacaggaaagtggggagtttcagtgacaggagaccaaggtctggtttaccttggactgtatgttgaaaaggagactgctgcggctgtagctaaaaaagcaagacacctattacagggtgagtttgggagggatgtgtgaaaggtttgtatgtctatgacaatgaggcttcgggtctgctagaagaggaaaatctgtattaccactgcactctgtttaaagagtatgcaattgataactggattctttttttagatttttcccatcccgagcttgatgcggcgaaaaaattcatagaatcaaaaggccataacctgaagattcttgattataaagatttagaaaagtggctcaccactgtgcctagagctatcgcagcgcacaatgctttcggttatgaccttcgtttatggaaaaagctgtcaggcatcgattatgacatgttcaaagatccgaagtgcatggggacgatcggtggtaaacaggtaaatctctacgataccctctccatgagccgtgtgctttatccagaccgtccattgcctaatggctgtcctgattctgtgcttaacccggtgaccgggaagagagatcgtgtaggccctcatggcctgttagcctggggctaccgcgtagcaaataagaaagttcagatcgatgactggcgtaaccaacctctttgggagtatgtgagccgtgttcatgaagacgttctgatcaacgagttagtatggcaatccctgatcgatgaatctacaggtgctcgctggcctgatgacaagcagttcatgtacaaagataaaccggaagggatgcggcagatcaactggaagaacgcgctacgccgccgtatgttgactgattacctgatgattgagcaagaaattcagggtgttccattcaataagcatgaagctgaaaagctgagagaccgtattgatggaatgatgaaagagattgaggaagaagtagaacctcaactcccgctcaaagagatgacgaagtctcaacagccaaaattccctgctaatccttttgatggtgcaggaagaatttcccatcacgggtggaattggttagaatacaagctgggatatccagttaatcgtgaagcgctggaattcaaaggtccaccgaagacggcgtttaaaggtaacggtgatgtaagtgcagcaggggaaagatactgtatccagaatggtgttgaagacccggcagcgatgccagacttcattagaagccagataaagaaagagaatacccttgtcccattgccaccagacctaatggaaaaggcaattgccgatcttcgtgctggaaagatgccagacctgatggttccgatgaagatctcgaaccaggacgacatcaagaagtacctgatccgcgatgcgggatggaaaccaacgctctggcgtgttaaagatgtgacgaaagaccagttcaaaaagacccgcgatgatgcggaggttgatggtctggtgcgtaagtacatcgaagaacttggagagtccgagtataaatctctgattcttgagcacttaaataatagtgacgcaaagttcaatatctcggaaaacaagttcgaccatcgtcatggttctgatcgtgtttacgaggagatcttcaagaagttccgacgcaaagctcgtcaactgccgacttcaccacagttgaaggataactttggcaagctgtgtcctaaccttgaagttatcgatgttcacttggctaaacagattgttaagtggctgtcattacgtaaccgtcgttctgttctcgacccgattgacgaggacaaaaacgacacagggctgttgaatcaccctcgcctggcgattgatggaaaacttccagctcgtttctccggcatcaccaataccgggcgctgtaagcacaccatttgtgcaaacatgcctaagccagatcctaaggtgttattgggtaaagagatgcgcagcttgtggacagttccagaaggttattatctgatgggttgtgacggttctaacttggaaggtatgatcgctgctgccggggcttttgaatttgatggtggtgaatatcttcgcatcatgatggaagaggatgctcatgaacgaaatgctagagcatatacccttgcggcaggaaaggaagtcacacgatcaggggggaaaggtataacctatgggatcatgtatggtgctcaggccgcaaagatttcatcgatgctagatatctctcttgacaaggcacaggctgtaatcgatgctttctgggatagtaactttggtttgaaaggtcgtaaagagtggcttgaaaacttctgggaagcaactggtaaacgttatatcccaggcctcgatggtcgtaagatttggacccgttctaagcactctcttttgaatgcttatcagcagaatggtggtgcatctctttttgacttagttggcgttctcttccattgggaaatcgttaagagaggatggtatgatgaaggtgttaggagactaatatactaccatgatgaaatccaggtacaagtaccagaaaaattcaaaaaagtgacagaatattcttccttagaggcggcgcaggaatatgttgacaaaatgctcgaaaaagggcattgttttgatgggcattatgtcaaagctgggaaggtgattgtagaacctgacgagaatggtaagtacaagatcttacattgccctgtcggagagcttgctaccaaatgtgtagaaaaagcttctcgaattatgaacctcccagtattaattacaggagaatatctttgtggatatacgtgggcagattcgcactaaaatccttactcaagacttcctaagggaagtctttacttacgattttgaaaacgggggtctgatatggaagaggaaggctgatgattgtcaagaaaatagaagatggaatacaagatatgctggaaaacatgcaggtagcccgaataatcaaggctatctccatgttaagctaggagggagaaaatacaaacttcacaggcttgtattcttatacatgcatggttacttgccaaagatagtcgaccataaggataatgacctccagaacaaccgtatcgagaacttaagggcggcagatcatcagaaaaacaattataattgtaggatctcctctgcaaacaccagcgggattaaaggtgtgagttggcacaagcagcataaaaaatggtacgctacgataagagttaatggcaaagccgtctttttgggaatttttgataaaaaatccgatgctgaggaacgtgtgaaagctgcaagggaagagcttcatggggagttttcaaacaatggataattttttcttgacacccgtctctaatagcattaaattgtatcacatgaagacgagagacctcgcttcaaaataacttcacaaacaggagaacgaaatgaccgcaaaatatgaaaccgtaccttacgctgacttcgtaaaagctctgaaagctcagttcgctgtcatgcaagcgctgggtgcgctttacacggtcgatgtaccgaaagatgaactgtacgatctgtacctcgactctttcccggaaggcaccaatctgatgtataaagagcgccgtgaatatgactgtaactgctgcaagagctacatccgtactctgggccgagtagtcgcgattcacaacggcaagctggtctctatttgggacgttaaagttggtggttactaccaagttgttgccgatgcgatgaaagcgcgtgttgaaagctccgagatccgcgatcgcttcttccactttgaaggccgcgttggtactgagagcaacgtagctctgctggaaaatgggaaaaccaaaacctggacccacttccatcaggccctgcctcgcgagctggttaaacgtggtgaagatatcccttcggccctaggtgagtaccgtgacaacgcaactgtgctggcacgttctctgaaagatatcgatatggactctgccgaaacggtaatggacctgatcaaccaaggctctctgtaccgtggtgatgagaaaaagcacattgttgctgcctttattaaggcgaaacgtgcatacgacaaaacgccggaagatcagcgaatgaacttctgctggaaacaaagtgaaacgctgggtaaactgggccgcttccgtaatgatgtcatcggtacactgatgagcgatctggcagaaggtgttgaccttgaggccgcagtgaagtccttcgaagacaaagtctcagggaccaactacaagcgcactacagctctggtaactccaggcatgatcaaggcagcacaagagaaggttgaagccctcggcttgactgagtctctggcacgtcgctttgcggtgacctctgacctgacgatcaacaacgtgttgtttgctgaccgttctgcaaaggcccagatgaacgtattcgagcaactggcagcgtcaaccaaaaacgcgccgaagtcactgtcgaaagtagaagagatcagcattgaggatttcatcaacaacgtcctaccgaaagcggacactatcgaggcgctggttgaaggtcgtctgacaccgaatctgatgagcttggttgccccggcaaacgcaggtgctcctaacctgttcaaatgggataacggcttctcctggtcgtataatggcgaagtagctgactccatcaaggagcgtgtgaaagccgctggcggtagcgttactggtgacctgcgtgtttcgttgtcttggtacaacagtgatgacctcgacctgcacgtattcgagccgggtggtggtcaaatttacttcggtcacaaacgtggtcgctcaacgggtacgctggatgtggatatgaatgcctatggcaagtcagacgcacaccatccggttgagaacgttacgtgggaaaatgagcgtaatatcacggaaggtgtttacaaggttgttgttaacaactataataagcgcatgactgatcgcgttggcttcgaagtccagatggaatacaaaggccaagtgttcaacttcgcatacccgcaagctttgggtaatagcaagagccagaccgttgtaacctttaagtattctcgtgcgaaaggtgttgaaattgtagacagcatcgggcatactaagcaatctaaagaagtatggggcgtctctaccgagaccttccagaaagtttctctggtgctgaattctcctaacttctgggatggtcagaccaaaggtaacaaacactacttctttatgctggaaggttgcattaaccctgacgatacccgtggcttctacaatgagtatctgcgtgacgagctgcatgagcatcgtaaagtgttcgaagtgttgggttccaagctcaaagctgaacactccgctgatcaactgagcggcctgggcttctcgtctacccagcgtaatgagttggttgtgaaggtgactggttctttcaaccgcaccctgaagattaaattctgatgaaaacggggttgcaaccaaccccggtaactgatagactcattgcatgtctggaggggttagctcctccagaaaatccttaccaaaggatatgcaatgagttcgggtgtgcgtacataactgcaaagaagatgttgcactccttcacttaccgggcaacagaagcacaattagtcgcgattcttgaagaacgcggcatcttaaaaaactaaagaggagaaacaaaacaatggctatcatcaacgcaccgaccctgttcgaactggctacccgtcaaaaactgcgtttcgcaagcccgaaaggtctactgaccacagaagatctgtgggatctgccgatgaccggtaataccagcctggatacggtttccaaactggctaaccgtgatgtgaaagcatctgctgaagaaagtttcgttgtcgaggccagtgctgtaaatggcgaagcaaacctgaagctggatatcctgaagtacatcatctcggtgcgtaaagctgagatcgcggatagccaggcagcgaaagagaaggttgagcgtaagcgtaaacttctggacctgctggcagagaaggataacgagaaagatgcagcgatgactcgtgaagagatcctgaaagagctggaatctctgtaatctgcccgccaaggcccttcggggcctttttgtattggaggataaatgaaagtaactggcaaacaaactattgtacagaatgtggaagtagatatctctgatgaagagatcatgaatattgtcaaggcacaaacaccagactacctcgcagatatcctcaccaaagaactgctgaggaacttcatctatagcttgccagcagattttactggtgagcgggccgtgtgggaaacacgtaaaagaggatatgaacagtttcttgtacttgtccatgtagacgcttggtgggactaccacaacaatgttggtgtggatgaagaagtcagaccgctcaccgaagaagaaacggcaaaatataatatgatttgcggtttgcgggactacattaaggagctgcaaaaataattcaaaagccccttgacttcatggttgaggggctttattgttaagtggctaccaccaacaggagaaaaaaatgaaacgtacccttggttttcaaaaagacgataccattttcaaaagtgaagaattcaccttgtttaatgaattcactgaagagcttccagctgttaaagtatttgaatacgcaaaagaaattcagaaaaactgtcatgaagatcagtatcctcaagcatggactgccgcacttagaggcgctcgtactggtttagatgagtgggaggaaagtggtgcgactggggaatatgagactttcttggatgatggtatcattactgagctatatgctttcttgctagaacagaatggtggtgtataatgcgtggatttatgccttgggtgaaacctttagtgatcgttggaataattgtggtagtggcgctttttgttgttgacacagcagataccgtcactcataattgcaagcctaacggtgagcaacgccttgctaactcggttgatggtgttatcgttgagaacaaactgatctgcgacggtggtcgagtgaagtggtctcgctactaaattctgactaaataatctcaagaggagattcaaatgaaaaagattatcctagccgccctgctcgcgctttcttgctctgcacaagcaacagagttttatcctgaagcaaacccgaatgatattaacgagtccgttgatagtgaactggcaaagtccctactgaaacgcgacacccttgaattgaaaattaaaatcgcagagcttgaagtggaacttgccaaaatgaagaagactcaagttctatacagcattgcccttgaatcaatggagaaaaacaaatgacgattactcgcggccttatcttcggtaagtttgcacccctgaccaacgggcatattgcctttattcgtcaggcggcacaacaggttagtgctctgtatctgttcctgtcctatgaccagaaattcgttgacgcacaaccagaatggattcgtccaaagttgggtcttgctgatcgctatcgtgacctgctggatgttattgccgatgagggcttggaaaacgtgaaggttgactacgttgatgagtcgaatatcccaggataccctgaaggcagtgctgcctatgcaaaactgatccgtgaaaagcaaccgttcgttaagtacgattttgctttctcttctgagccggagtatgagtcttacttcagtgagttcttccctgaagcgaagcatgtagttatcgacgcagaacgtaaagctgttcctatctcagccacgatgatccgtaatgacccgtacaacaacttctacaacctagcgtggcctgcacgtaagcgcttcatgaagaaggttgccatcattggtgttgagagtacgggtaagaccaccctgacacgacatctggcgcataccttcgatgctggttggattccagaggtcgggcggcttatctgtgagcgtgaatatcactccagtgagttagcaatgtctcgtggagactatcttcgtgtcgcaatggagcatcgcctgaaggagatggagttagctggttggggtggttgtggagttatgttctctgacaccacaaacctgatcacccatttctctggtatttgtgcagacaagatcgactactccgatcttctgttccgcacactgagccgtgaagagagctacaacttctacgacctattcctgttcctaacaccagaggtcccgtgggttgctgatcctcttcgcttgcaggatacgccagaaaagcgtaaagaaacacattctttgcttgacacaatgatcagagcatcttacgatacaagcaagtggtggttatctccggcagtgattacaaagaacgtactcagaaagccgaagaagctgtccgtaaattgctgaatataaaaggagaataagatggatgttacaaactcaagtatgtaccaagcgtttggtgtattaaagctcgtccttgaaaaagctccagagttaggccagggcctccaggcctatgcgaactgccgtgagcagggcttctccatcatgaagttggactactcaggtgggcaagataattgtcgtcaagtgtcattctctgaatgccgaaacagtgaccagatcactgtgtactatgggtcaacacgggacttcaatttccaaaccaacatccctacggacgatacctatttcaatcgccggaaattctttggttatgaggggttcgaagaagcggcagactggatcatcgcatatctgaaaggtgataaagatggagcaaactaagccgaccctggtctggaaaacccaggagggttttgatatgcgaattagccacatgtctgatgagcatattgttaacgctataaactggttgctggtagaacctgggacagatgacccttctgacctgctggatacttatctgcaagtccctatcgttatctggattcgcgagttgactcaggagttgtaccgtcgcctacatccggaactggtcaatggctaaggtactcaacttctaccacatcggtaaagtgatccctgaaggtgctgaatacatggggcgagcaatgccccacttgggcctgaagcaatctaaattcgctaacccatataagttgtcgaaggatgagcctcgcggggcaacgattgagcgctatcgcgtatggttatggcaacagatccgtgctgggaaaattactattcaagatcttcttgacttggatggtaaagaccttgtatgcttctgtaaacagccgaacaaagaggtagcatgtcactgtgatgtgatacttgcggcaatcgaatgggcaaaacagaggagtcaaaatgtctaaagaatttatgggctggtttgataaaaacgcacccgcacatctttttccagatgcagaggagcgtgaaaacctacaagtgatgtgttggttagcatggcgagatgggatcaggtctgtcttaccagttgtaatggagggttaaaaatggcaattcatgcaaagagtaatggtctgctgatcggcggtaagatcatcgaggagacactgacaggctgggttttccaggcaatggataacaaaggtactaattttgtgttcaagtcagatgagaagaaccaagtttttgacggaccgaatgctgttgacgaagcaatggcttggcaaactaaagttcggtcagaaatgaaaaataaaaagaaaaaggggcgcaaaaatggctaaagatacatgggaagtatttcaggatgacgatgaaataaaggtcattgtctcaggctctcttgaggtaggttccgggtggcgatcttacagtgacgtgtgttcagagattaataaccttgatgatgccaaactcattgccgcagcacctgaattgcttgacgcggttctggatctgaagtataagttatacggtaacggcgcggcgaatcctaaaatcgaagcgcttcttaaacgattaacaggagaataaccatgaatacaaatctgtacattaagacagcatggaccgacttttatggttggtcaaaacttgaatatctttggctcctcatctgctcggcatcgatcgccattgtctccttgactatgggcggtgggttagtagagttcatctcttctgttaccgggatcatcggagctatcctggtggcaaaaggtaagctctccagttattactggggctttgtggcaacggtgctgtatgcatatatctccttcacgtacaagttgtacggtgagacgattatgtacaccctgttgttcacccccatgcaggtcattggtgggataatctgggcgcgtaagttaaccgtctctgaggatggtgaacgtgcggatgtcatcaagaagtatctgaccacaaaacagcgctggattgttggtatcgggacattggtgacgatcggattatacgccgagttcgttagcctgctgaaagggagtatgccgggtctcgattctgctacagcaatcctgtcggttctggcaacctacctgatgatggttcgttatgcagaacaatggtatgtctggattattgttaacgtggttgctgtggctctgtggattcagacagcaatgcatcatgaaacacaaggatgggcagttcttgcaatgtgggtaactttcctgttaaactctgtgtacggtgcttacaaatggcgtaaaacagaaaaggaaactacacatgcgtgatttaatcattcccacaaccatcagtgtagtggtgttcttctttgtgcttgcaatatctatctctctcggatactatgttggtatcagtgcgggagaagtattcggaacacctggctttggcgagtacgcccaaacctctgtaatacttgggggtttttgggattagttctcggcatagtatctttcggcataagttcaggggtggagtgagtgtgaaaagaacaaagcatatcaataagaatgctttccgcaaggtggggcgttatgccctgccattcgcggtggcaatcacagttgcaggttgtgagcaagcagacattgacatgaagatgtacaaaaatgttgatgagtgtattgcagatactcacaaaccggatcagtgtcgggcagcaagacaagaagcagaaaaggttgcaaatgaaactgcaccacgctatgcgacttattctgactgctacgcggagttcggtgaccagtgccaccacaatccaagcagctcagatagcggttcttcgtggatgccgttgatgatgggatacatgatgggtaacagcatgaattccggttatcattcagcaccgctatatcagaatcgattaggtcagtatatggacaataaattccgtaactacaatgcacgacctggtcaaacgttcaaggtgacaagctctgcggcaaagccaacagtacagtctcctcgtacaacggtttctcgtagcaccacatcctctcgtggtggttttggcagctctgttagcagtcgctcatcttttggagggtagttgatgattggattctgggaatggtttacaatgaatcacaattgggtatctagcctgatcccgcttgctatgttttcctacataggatggttattgtcgggagggcttacttggaagggaaaagtggcctcctatgtgttttcagccgtaatgtttggggcaatgttctgggcagtgacttacttgggtggttatggaatgtataagcgccattatactacttgcgcaaagccagaagctgtggcatcattctatgtgtttgatgcaaagaaagagcgctgttataaacctgttgttggatttgcacctgttgatgataatcaggtaaagactctgacaccgaaacaaatggagactggagaatggctttaactcgtgaagaacgtaccggggctaagtttgtagagatgtatgaggcccgtgtcggttcgaaacccactcttgaagagcaactgatgcttgcatacttcaaggagaacgtggatgatctcccggttgactggggcgacccaacatctttccacaaagcgttcagacaaactgacgtttgtcgtcaaggataccaggatatggtcatttggagtcttatgtctggtgggccaagtgtagcaatttgggatgtattggaggaattttatgctggtcgatgaacttggtgttcgtagccttgtcccagatgcttgggcagaggcctatggtaagccacaagctgatcctcattctgttttcgcagagctgcttggtgtaacacgacagcaagcgaaggtagtcggttatgagtatatgtactctgaagagaccgaacatgttcgggcgatcaaactgtggcacctatcgggaaaagaaactcgatatgtttaccggaagcttgctaacctcttgttggagaatggggttactgttcctccgctgagagaaattcttgaggaggtagatcggaatgaataaaatccgaaaatttttcaaatggttattggggttattcagtacaccaacggtcgtatctatagggaagggaaacagcacttttgttagccaaacaaccaaggtgaccacaatatcttctgaagagcttaatgagacgctcaacgaggcccttcgtcaagcaagacaaaacaatgagcgtagattgaaaatgtcacccccaacgccaccttcaccgcctaaaaggcgtgtggtcgtggaggatggcggttatcgccggagaaatgatgatgcggcgatcatcaatacaaccacgattagtgatacgtatacccatcatacgccaagtcactcgtcaagtagtcatgactcgtattcctcctgtgattcgagttcatcattttcaggtagttgtgattaaggagataaaatgaaaattggtttcttaggtcttttggcgttggtatttatcacgcttaaactgtgcggcgtgatcgcctggtcgtggtggcttgttttactaccgctctacttcggtgttgccgttcttcttttcttcttcctgatggcgattatcgggtggctgggactggcaagtgtaggccgtgtggctgaaatgatgtcaagttcaaaaaagaaaagaaagtaattgacataacaagtgtaaaggggtaagataccccttcactaataaatggaggattgatgactgaagaagtaacccctaccaacgaagcacgcttcctgggactagaccccaatcagttcggaactgtgattttcctctcaagtgccagcgttcagatggctgaccatataaattctgaacccgtcagaaaagaaatggaacgtttgatcagtgaaggcaaacacgaaactatcgaaacggcgttggcctggattcgtggtcagcgtaatgctgtgatgcaactgagtggagcttcaaccttcgcgcaaaatcttttggcgcaagttgaagatatgttggttgatcaacttcttgctgtaccagttacacaagtcgttgaagaaaaatctgagtaataaaggagagaagatgagcgtagtaaacgaatacaaagacccaatgtccggcaaagtaaaccacttcgcaaaaggtagcatcaaatacatcagcatcaaacctgtgaagaatgctgatcaagatggcattaagcgtacccatatccctgcacgtaacggtcaacctgctaaggtgattgaagccacccacactatcagctttttaatgcaggaagttgatgcggataataacgtggtagacccacagagccaaggtgaatggatcggtatgggtgagaagaaacttcacgccagccacacggataaggttcaggtcaagtttgattccggttataaagatattctggctggcatggttgtatctttcccgctgaaagtctctaagaatggggataaaacctatatcaacggcactttaagcggtaagacattcaacattctggatgaaagcaaagctggtcaagctgcacctcgtcagcagcagtcttctgccccagcagcacagtcaggcggtggtgttaagatctacggtgagattaccgaaatcgtaggtaatctggcgactgttaatgacgagaagaacggccccggcggtgtagttctttccgatgaacaactggcacaggtatctgttggtggacgaatgactgcctttgtggatatgtctaacggtaacatcctgaatggattcaaagcttacggccccgcaggtcagaacaacggcggttctggtggtaaaaagagtggtgggtacgaccaatttggtgttgaaacaggacacgccattaacggtctgaaagagttgatgggtgctggttataaagtgaaggatgagttggagacagctaaagccattcaccgtgccacattggatatgaaagcgttcgttgcggagcgtactggtaagccagtcgattccaacccggtcggtgcaagtgcgggcaacgcaattctggttgcatgtagccgtttcaatgctaagtcagatgtttctgaagcaacgattctggacgcagccaaggacgtgtatacaaagctctctgagccgctttacacgtttattagtgaaagtgccaagggtgccgatcaaactccgtcacagcccgtccaggagcgtttaacgacacctcctgcccaagatactccggctatggattttgatgagccgccgatggactgggacgaagaaataccgttttgataatgaaaagatgttctaattgtggggctgaaaagccccttgaacaatttcagatcaggagggcttctaaggatggatataccgcatcttgcaagctttgtcttaaggaacgcgaccgaatcagggaccaagatcctgaacgtaaagcaatgaaagaacggtacgttaaaggtatcggaagagaagcggcagcacgagcaaagaggaagtatatcgagaagaatccgaagaagagatctgtgcatataaaaacaggtaatgcgatccgtgacggcaagatatttaaacagccttgtgaagtttgcggaagtgaaaatgtacaagctcatcattgtgattacgataaacctttagaggttatgtggctatgtcctattcatcatgaagagtggcacaggcaatacggcgaagcaaagaacgccgtataaaagaaaaggctcccaaatgggagccttttttattacggtctttgatagacagctacatcatatacagtccctcttccacaataggttacttgtagaattgtaactgaatttgcagcagtgctgatcgtaccaccatttatgattttataagatgcatcaagggtgacggcatgtccaccagttgcatcctggaacagatagatcgtggcagtaaaagcactaccaagatttgcccaaggtccgatagttaaagtatttgtcacatctacgttgtagatgttattcatcttcgttagatcggagcctgtccctcccggtgtccaagttgtccctgcggaaggtgtggtaacagaaccggggattgttcctacgaaattcgcagtgaccttcggagccgttgcttcacctgtaataacgagggatgcaccttttagagatccgtatgcctctattgtggtggttgccagaacggagttagggttaatgtccttcccattgacatcaatggagacacctgtcagagtcccaagtacgttaaggttgtttacggttgttgtgcctgtcccgccattattcaggttggcgtttccagtaactgtaaggttggtgcttaccgtagcttccccagtaactgcaagcaggcctgtgatggagagatttcctgcaacagagctagcagtcccggctgtaaatcccccagttaatgtgctgtttccattgactgttaatgaacttactacgcctaaattctgaatagaggcacttccgagagttgttacaccgtctacggttaggtctgaccctatctgggctgttgtcgttgtgataatagagttggggtgaatgtctaagccatcaacaccaacattcacacctgacaacgaacccgttactcttacgttttcaagttctgtcgttccggttaccttaagccttggttccgtagaggccttggaagagtttcctcggatatacacatagtcgaaggtgttattaccgacaccagttaatgacattgtggtgttatctgcactagctgtcccattcacaataactgcggaagtcagattattggtttgaacagagttcggagatatgatagtcttcagatagttagaggcagcggtgtaatcaaaagaaagcgtggcagtttgtccaaataaagaaattttctggaatttaccaagcacaccagaggcatcaatcgtcccaccaaattgtgatgtccccgaaacaaccaatgtgttaagggttgaagcaccaactaccgtaagagcagcataacttggagaagaccccgtaagagagttgatcgccgttgcgacagccaagttgacaaatgcagttgtcgctattgcaccactattacttccctgagccggggtaggcgctgtcggagaaccgacaaatgcgggggtgttaagaggtgcaaatttttcagaaactacaacggagtcattgtaaactttccaagcggtacttgtagacggatcagcaggtaaggttacaggtgtagatggtgacgcaccaggagcgtaccaccagaacgtccctgctgaattggtgaaggaatatagttgattaaaaactgtcgcctgtgtccccgcagcccaaggttgtggtggtgttttaaaatacacattatcaagaagcgctttgcgtaatgttggaatcgtactaccgtcttctacaataacagtgtcgatggcagatccgttgaccaccttatggagacgctcagaatcctcgacaacctgatccacagcctgttcaaattgtgttgtatcagccatttaaggtctccttatttaatttcttgtttatcttcatcttccgctgcctttatagctaagccccagcgaagtgagattagcttgcttataagttgtggagctgctacagtaggtgcatatacccacatataccattctgtaagggttcctttaaatccccaatacaggaaaacagcagtcatggatgccagacctatattgctccaaaacttggtatgtgaggccttatcagggtctataggggacctgactaagtcctttaggaacttcattattcgagttggcattttacctcggggatcaatgagtgaagaatggtaatgccctggcaagcaccaacaggcttatgacagttgcagtttttatccattcctttatcgtcgtgtctttaaaatttgcacaaagtatgataatttccatccaagtttggtaggaagaatttattacaaaatcaaagagtccggggattattaacggaaactgcatggatattatctggcagaagagaattggtactgctacagagagtgttagctttttcttccatcccgataatatacacgcagcaccaaagataaaagagatatccaggaaccaacaaagattaaggtaaagggatagatcgaaaaactgggtgtttgaagaaaaccaccataggagggtattctcaagaaagatatggaccatgccaaaaacggacatgatccttatacctttgtcagaatgaaacaacaaaataataaagcacagaaaatagaagactgagcttatcattttgcggatctttccattaacatctggaattgcttggtgaggtctgttcttaaatcaccaacatctcccttgatgtcccttctaagatcggaaacatcatccctaatcgcttttagctttttatccaagatatcatccagcttttctttagtgaccatttcggcccttatacggatgatatctttatcaagctcatcaaggcgctcttgagtctttttgtaatccgagtacgttattcttaggactccgatcaggacaaaggtaataaccccccagaccgccttcaggatagcaaacaggtcaatagacatagtgcccccttaggctgtctgcggaagctctggttgagggtctcccttggtccatcctctgagatcgatgatatatttcttcattgtctcaaccttgtcttcttcacccagtgcagcgtaagttgatagcagtatcgcggccctttggaaaagtccttgtttcttattttcaaagattctgtcttccatccaatccactttttcgaactcttcaccgttaaagatatgagttctattagagaaatcacttggaagagaatctacaaaacgaaagtaacaatcttcggggaagaatttagttgggtcagtatctgccatatagacctgtccgttagaatcatattgaatatagaggcctttttgtttattttttagttgagacaaaaaatcgtaccaatcttgaccgttctcatcttttagatataaggctccaggaactgcaaccttttctggagaatatctaacccatttcatatcagttattttcattaaagccccactgtataccaaatgccatcaagagctttctgtaaaaatcggaatcttatctcatcaatatcgtgtagataaaggtctccactggcgtttgcatcaatcaggccagtcaatacagaaccatcaggtccacgcgccaaacgtccgcttgaaccataattttcaaagtcaacttgaactttgttttgctccccgctccagcgaatgtcagaaacaccaatactgatagaaacgtcaccattggcgtttgcagctgtgctgtttactgcacgaacaatggatcttccaccaacagttgcgttgttggagtttactacgaggttttgtaacgtagctgtaccaccaacaccaaggctggttgtctgaatattaccaccattattaatggttgtcgatgccaaggttcctgttgtcatcgtacctgtggctgtgatattgccctggacccttaacagcgcggtgtttgtaccagttgcattaagctccatcatggtgaatgtggaggaaatgtctgtaggagagaagcggaagcgaatagaatccacagtcgcactgcctgctgttccgctattatcaccgatcacaaaatcaagcatggtaatgtcattgccaagcgttgtggtgatgtaagcggaatctgatgtgccaacaggaaaattaatccttggcactgtcaatggccctgtcattgtgtcgccatcgacgttcacatatctggcatcactttcacttttgctataaacatccagattgcttctcgctgttgagatatcagacacatcgctaaggttctgatcttttctcagataatcattagagagtcctgggatctgctcttctgagatgtacgtcatccaccaggtcatcatgttaagaacatagttaagttcttcacaagcgggtttctcacccaaatcccaacccttatcccaaagatcagcgataggggagattttatttgcagtatgagcattaggtaacacgacgtcactttcagcccatatctgaagaggaatagtaggaattgccatgattctcccttataatagtgtgttctcttcttcggaggtatagataagactggagaggccaccaggccctgttcgcgatgtgcttacagacccaaaaccgattgcataggaatcgtttttaaacccaaaaggtagcccttctgattttaccagtcgaaggtacgtaggcatagggagcatatcttttatttcttgtatagcggtttctatctcgaaacagctattaaagatattgatatcaaaacgataattatcacctttgtaagtggtaaaattttcggctccgaagagttgtttcagtgtcccaattacctcaggtctggtcccgtgtttagctgtgcttgagagaagaattgtgataatggcacgataattcatatcactcaagccatttctgtcaatccctacttgagcaccaatctcatccaagttgactcccccagcattctggaggagacgcccttctgcaagattgaccatcatctcatctacggccttcattcgctccaaatacacggataaaaattttacaagattttccttttcccgtaaaaagtcgcccggcaggtagtcaataccgtccgaaacgaaatcatccaatggatggatgtggttgacatcttttatcgtatctgccataatccctcttagattatctgtaggaatgtaatattatcagtgtcgatagagaatacctcatccatccctgcaacaacatcagaggttgtataagaagtatcaggatctccgacgttcttgacatccacataaagttgtgtgaatctaccagcagagatagaagaacctacagcagatacaagctggatattgtataaagtgtcagcaatgttaagcgggtcaataacacctttgagggcggactttatagtatcctgttcagtggttgagaggacctttcctttataacggacacggatagccaaatcccgtgcctgtgctttactgtgataaattcgttctgtctgattatcctcagtagggacatcataaaaaacattaccataggtagcgttagacaaagcaattgaattataaagtgccttgctaatatcttcagtagacccaccatacaccacggtctcaaacttatacggtggtattccattctggtctgtagcccctgtgttatttgagaagattttaaccttacttacaccactcaccccaaggatagcactcaccaccgcaggtctggtcgcagccgcactcgatgctgttgtgttagaagccctgaccttgtattcggtgtcggtctcaacatctgtaccctctgtgaaggcattcatgttgttaaggctgatgaacccacccggtgttggggaaatcgaggttacggtgtttttctctctcgacagttcacctgcctcaacagcaacaacatccattgtgattgtacgttcaccaacaattggcgatgtcctgaaatcaacacggctattaaggccgatcatttcaagattagtatcatacccaatgtacaatgccccgttttgagagtcaatgatgatcctatcattattaagctcggaggtattgttgacaataaagctcttgacagaggccatgaaagtgttaagctgagagctattaggggttttattggtcaattgaagagttgtttgacttgttgttccggtgttttgattattgatctggaaactataagtacctacaacccagtccttattgagaattttttgtgctagtatgttaccagcaagggtggtgtcgtcatttaatacaaatgtaccactatcaagtgtatatgtgttttgggcatataccatgttgtaagggacagtgttgttaactgccatctcaacagaacctgaactttttgtctttcctcgacgataaacaccccttcgggaaagaagttcgtcaagataaataccctcagcccccgcaagggtctgggcagaatagacggacgctgccagaaggataatctggtattctctctcgttaaagatggttgtcaacttgtcagcaattgtgttagcttgtgtgttgaaattttcgccgaaagttctaatgagggtctgttttgtatctgcgataaggtcatcaagagaggggatagtgaaaccgtaatcgctcaatccgtattgagttgccaattcgtcctcctttcaggaccatgattcttttgtatattttaccatacgtggcagtgttttgcaaataaacggaggtaaggtataaatgaaaaaaccaccccgaaggatggttagtcaccggacaaagaatattccaaagctgaaagtcgcttgtcaagatcctcttgcaccgctattgttgcccgtaatatccagaacagcaattcctcttttctaaaggcgtattcctcgcctgctggcctatcagcatctgcctcccacttatcgtagcagaatgctgaatatttggtccaatcgaggccatactttagcattaccctcatagcatcctgaacggtagggccagaatgaagtcttgcggcacctttctccaatgagtatttagccaaccattgccaaaccgaatctaatttcccaatctcataaaaagccttggtctctgcgagagagatctggcgaagattagttttctttttcttgttggaggtagagattacgctgtttactgcgtaaacttgactccaccttaggttagtagtaccattagatatcagattgtctgtttttggagagaatgcggctgaaggggcagatatttgaattccataagttctctgagaaggacttaaggaaagcgtggttacattagcaccaatctcattccctgaagaagagaaataataattaccagatacattttgtaaactgttcgaaagactgtcaagagcttgttgaacagttgcccctgagtgtgtccctacaacagaggcccctgaggaccctgttatctcacccctcttaaggataccaatatctgcgattaattttcctattgtagttttttcagtgtctgtggaggactggatgattagctcatcggtctccaacaccgaagatctgtcagaaagactttttatctttatcacagagagatccgttgttgccatattttaccctcatctccttagatatgactgtcgaagcacgacctgccccgagaaatactggtttcacacatagcagttttttcacgagagcagatcaatgctaattttagctatcaatgaccgggcatccccggcacggatttaaattatctcataaacatcggtagccacacgttgcaggagtggagttgtgcttccagcagacagggtagcgtcggcattcactgagcatgtcgccaggaatgtagctggcggcgttcctgtgaatgcgatataggttgtgtgcaagtatccagaaaattgcaccctaccctgcacgccaggcacaatgttttccagtgcaatccccgcgatagttgacctggaatcgctattagttgcccttctcccgttgatttttgagccattgaacgctaccgcggtgcccttcaaaataaccacgctactggtattcgttagcagcatttcccgatcctcctggaacaccggagcggcattattgtaaggcgttataacgctgaaagaacgacctgaagtatcattaagcagcgcgttcagcgccgacacaacagcatcgttggtcattgctgtgtaattggccgctaaagtcagcgtgaccggagttccgccatcaaacacgatcgtcagcgttttgttaaccgtcgtacagtctccaagccgctggccaatgagtccaccaggaatcgtccccttaactgaatgcgagctatacacgcgagccgggaacccagaaccgcctgcaataatgaccggattatagccaaacagcgccgggacagctgaaccactaactgcaacggaactggcagcgccgtcgatgctgattaactgcaaaacgcgagagtcattcgtcgatttaacagcaatgggtgtacagtttctgatatgaatctggaattcagagttacgattcccccaatcattaaccagtttttccgccttctgcgtgttgctatcaatgctggtaatgccttgcaacgtgacgccatcaataatgcaggtatttacctgaccacttcccatattctgtacagcaagagccgaaccaccatttttattttcaaacttacccccagtaactttaattttgcacggcaaatcaaagtccttattggtatgaaaataaaatggagacgtctggctgataaaattggtattaacagcgttaatctgttcacctgaatgcagtccgcaaccccacgcatgataagcagaccaaaccgtcacgccgcttccgatagaatcctgataagcctgcgccccagcattgccataatgctcaacatcacactcctcaacatcaagtaccgcgtttttgattgaggcgtcaggataagcaagagaatcgctgtgtacaggatagcgcatattctttgcagttattctcaggttacggatgcgagacgtatcattcatccagaatgtttgggttagagggatttccgccgggtccacagtatctggcagctctcctttaaaccagatattatccctctgaccaaaaccgataatatccacatacttaggtatgacagtgtttaagtctgtataaattccttcatatacagcatataaaatgcgtgatttatcagttgcccctccaccatgagcagcaattgctgttttcaatgacgtgtaatcgccagtaccatccggcttaatcgtgtaaatcgccgaatagctggcagatcctgataatgcagagataatatccgatttcagcacagattcgcgtaagctggacatctggtcgcccagcgtatctcccagcgtcacgacgtccaaaagatcggctcgcatgtctaccagcttaaagtagccagcactggttcgcaccgtggtggatttcaactggataaacggggcgaaggtggtttcattacccgtaagaacgtatgtaacctcaccacgcattaaatttgatgtaatttttgttacggtattaaatgcagccgcatagttagtcgtaccagatggcgtgataactcgcaggtttaccgtaggtgttgtttcggtagtaacatcgtccgatgtttcaaacaacatggtaaaccgtaccgttgacccaacaaatttagtcaaccccgggtatgaaagaaagaaaagcagatacgcattatagcttgaaaaacctgttggggtatttatggttctattggctacgtcaagcacggcgccatttaaaccttcaccgctgaccgatgaaaatctttccatcaatgtcccggaagttaccacagagttttttattacgcgtgatttatcaccttcagtttctccatcagagataaagaaaaactcagtcgctgttaactggaaacttctcgcagaccctgtaaaggtgttgtctttaacctgaaaataaacgctaaccagctctgatgcggttcccacgacaacataatccgccattatcataaatgacgtttcgtcaattgagatcagcttttctgagcctgcaacctgaacacctgaagactgaacgccattccgctgcgcaagcataccaatttgtgtagctgtcagtgtccgcaaaaatcctgatgagcaactatacttcgacaccaaccgaatagtttccccggctctggtcctgttgttatgaaccctctgaaatgccccgatgtatgagttgtaaccattttgcccagatggaatggttatagttgcagtggttgagtccagagtagccccgccaagcgcctcggcggacttaggcgataaataagctaaattatttacaggcgggatatactggctccggttgaaattagttaactcagatttaaacccattcgggtcttgcaggcgataatatgccgaccggttatgaaatgtcacatcactgctgagagcagtagtgtttctgtaacgcattgccagcattacagatgaatcacttgatgtgatctgccgttcaaatacaacaatagtatttgtatctgatatactaactatgctaagtgggatatttgtaatatccacaccattaatgcgcagcatgggaataaaaagcgacgcatccgatagttttcctgacaggtttgcagaatgagttatgtcaatgacaaaattcactgtcttgccattcagaaaggtcagctcggaggcactcagtataagttgcgcaaacacgtaggtgttaaatcctgtctgccctgctggtgctttccacccaccatatcgtgtaccagtaacaacttctgatccatcccagccaacagcaccgttaaacaactcaccagaataagtcattaatgctgttgacttaatacctagagacagagagagatcaacatccacacgagaggcattttttcttcctgtttttatcaaggttccagactgattcatatactcatctgagagagtattatcagcggtattaattacccaacaagttttaccattcgcgatatttccagaagcaacttctgcttgggcgtcagaaatagttgaatattctcttatggttgatgcgacggcagctatccctgggacagcagcaacttcctcggctgctccattattgtttttataagccctgaaagctacagaacttccacttccttgcggtacttgaaaatattgtccagaaacagtcgcagacaggccatcactgacatttgggtacaggtttccaaattcagaagcttgcaatgcataagcttgtgcctcatctcttgcctctatggtctcatccttaagactaaccatctcgtctatgatgcttaatccgccaactgtttgccatgttgttggtggaattcctcctgagctatcaggtgtggattttgcggggactatcttggggaatgtacctgcccatgtgtaacattgcgcccctgcaatatgccaaatagcatcggttgcataggttaatgttgcaccatcctcgaaagaaccttctaccaaagttagcccaagatcatgaagtgcttttctccataattctctctcatttgcacgggcagtgtcaagactttgttgaacatctgttccatcagaggtccctataagagaggcaccgcctggcgcagacaggtctcctttgttagccaagtccaagtcagagataacctgagagacagtggcctttttagttttatctggttgttctacaacaaggtagtcgtctccgaccacctgagctgcggaaggtaactccgcaattttaattgtttctaaggccatcttttatcctccaagaaattcgtctgagacagtatatggtgactgtcatataattgttaaggccttgcatggcgaaggtgggactattacatgcgccacgacagatttttcttcactaaccgttgcaggccgtagttggtatgaatagtgttgaatgccatagctattgatctctaatattacatgttcaaagacgcttccagtctttccagttttctgcgcatatatgcggcttctactgtcagacactcttctatggatttgcggcggcaagaccaccatcgggcagttcaacgatctcttcatctgcggaagtcgctccatctggcaacgggttgtgttctgcgatagtgatctcacccgtctccggatcctcgatgtgttccttcatgtagtcccactcaccgatattaatcactttaccttctttattgcgaataaccttcatcattttgccacccatcctgtatttccagaaccagtttctttgacgtaaaaacttgtattagctccaccgtcagttcgtctgtatgttgaacctactgatgcagtaatcacaccttcaggagaaccagaaccataaaaatcacctacagtcgatgtgtacattctcttaattgcataagaagcagtgaaacgataaccagactccccgcaggtagttgtattgtctgcattcggcctaaaggttccagcacccattgtcattccaccagcgtcggaaaaacttactgcggagcgaatagaaaacctgattgatgttgggtaaaaggcaactttcgtaccacctaaccctgagttatcagcataaccattgggattaccggtgtttcttccccagttataagacataaccatagggccgttggttagtccgctgaggtcatctgcatacattcgcatatatgcaccgctatatggatgtttccatgcggcaactgcaccaccctcggaagggatgcttttggcctcggtattccccgcctttggttgtggaataaaggaagtcgaacgtacaccagaatatgatacggaatcgccagacgacaatttcatggagccgccaagctctacaccattccctaaaaccacatctggtgatgagtaagtagtgaatgggatatcgagggcgataacaccgaagtttttctgtgtctgtttgccgacgcttatattgaccaggtgagcatcggtaagggagtcatcaaactgcatcccattttttgcaatattcatatcggagccaacggcaacaagctgatagccaccagccagaataccattgttccgaagctggttatgggaaacatcaactaccgaagagtctcgaagagagatcccactcgttccgttgtcgtgaaaattattccacccaatagcaaggttattaccctgaaccaccatcccagttgcccggtttttaaagctctcacaaccggacatgttcagatacttatcaaagtaagggccgttggcaccactagttaccgtagcgtggtcaaagccatcatagtagttaccccacgtcttacacccatgttgtataacatgtttacaaatgatgctttcttctgggtaggctgccgagtactgcccggtctgtacacccgattcagcgttgtcataagtgttaacgtctacgatatgcacgtagtcgctacctgtaacaaaaagtcccatctgacgagactcaaacaggtcacactgcatgaatttgtgattagcacctcgtccccatttgaaaggattcccatagatgtaactagaaccagcgttccaaccaaacccggctgtaatgggtagttggcaatcattgagaaccatgattccgccagccaaagcaccaccacgtattttacagtcactgaaatcagtgtttttgaaaccagctgctacgacggcagcatagctaccacgcacaccagatacagttaacccatcaagaacgccagaggtagaagaacgaaacaccagtgagcagcaaatttgctgataatagtgagaggaatcaacgtttgtgtcgtcctggtacggcatacgaccataacccaggtttccgctttcaacgatgttgaaatcttcgtcatagacaactgtccacggagttgttttgctgagtaagttgccgcctttccacactgaaccagcgccgtctattacgtcaatagcaatgccatcacagacaatttttgcatcaccagcatcaacgaaaacaggaccagtatgaacaatcgcgttcgccgtgatttggtatgtttttgctccatccaattttatttgttttgggctttgagagattgcccaagcgatcgcggcagtatcttcattttcattcccttgacctgtaggcccgaacatttctggcgtcacataatttatgccatcctggaccgtaccgccttgcaacaatcctgattttcctgcacctgtaggctgcgcaagaaccgccagtgtagactgttgaactgaatcttcaagatgatttaaaacttgaaataaagttgccttcttagtatcatctggttgatcaattacgatcaggtcatcttctgttagagtgtccacacttggcaactccgaaattttaacactctgtagcattgtaggcttacccctcttcttaacattagtacattttaccacaaagttcaaagatttaaaagaacaatggtctgccttaggggagcacagacctaaaagaaatcttgaattgtgataatttttattttatagtgtttatagccttatcgcctggtgtcactactggatcactttttctggtcagaagagttcctggtggtacagggtttgccatatcaccagcccaagtattccaccaagttgcatcaccagtcttaggtaatctgaagttgataagatagtataacttattcccccagggtatccaaccctcatctccgcaaagggttgttgtttcagggtttggcgtcgggtagtagtaatcatccccgcccacgaaggctattcttacaatctcctgctcttttgttaagacttcaaaaaaagcagaatagcttcttgttgtatggtccattacagactggaaatctgcaatttctaaaacatccggttcaagacgggttatttcctttatcttattatcaaggaccgtcttcataacttttttacttatgtaggttctatatgggaagccaaaggtctcatcaaaataccaatctcctgcccacacattaaaccttagccacaagcgctgtcgtagacttacttggttggagtctatcaactggagacctgtagaaacatcaagatctcctgtcacagggtccatcaagaagtcagaataaagagttgccatctattcccctcatgcatttggaacatcggtattgttctgaccaccatcatctgtccaagtatagtgatgtgtatggcgaataaaataatcataaaaatcattcatgtttacaccacgcgctgtaataatattaccatcaggggtaacttgagcgccattcatcttaatcgtaccaccagattctgctgtcaggtttgccgccctattatcgaacttgaaattcccagattggtcaactactaatttacctactggcgtctccagcgtgaaatcacccgcaggtgtcattgagaaatgcaccttgtcgttccaaagttcaacattatctgggtcgatggtcatggcattcccatcactgtgaacaccaattattgcccatcctgggaacatattatgagttgtctggtcattattatcattctcgtttctttctgagaaactcagtcccacaatatcaccaggcttcacaggaagcgttaggcgggctttccctccattagctgaaggcattgataggggaacatcaaaaacagagccataggcatccacagtcccatctgggaagtttgtactcgcaaggggctgaactgttgcagacgggatgctatagtccacatcaactaccgttgcccttagccctgtgtgaatatctctggcctgttttgcaaaccactgattaagtgctgcatccatacgagttattgctgccattagccctccacaattccaccacgggtttctgcaagtcctaactctgtgatccaatcccccccttcgagctggcctttgtgagttaagtatacaaccttgtaaaaacctgtatatttgtggctctttaaaaataccgttgattctggtatgatagcgccattcatttctgttaccaccaccaacccagcgtcttcttttatctctgcggaagtaggtacgtgaggcttagaggattttctcttagacttagcttttttttcctgtctcctctttgcaggctcagggttctgcggtgttggggaatcatgcataccagattcagcgctgatctcaaaaactgccctttgaaatcttttcccttgcgtggtccaatatacagccccatcttgaacactgaaagtagaccctgtattcttggctaatctctctaggttatttgcggcgagacccgtaaaggacatagagtgctgaagcgtctggtctccaaacttgacgattttaccaacagggagcttcatatcagaagcgagatcactaattaccgtgtctattggcgtacctttcttataagagcgagaggtctttgccgttttaatatttactgttgcatccccgaggatcatctttgtctgacgggtattgccgtcccacttatcctgaacaaactctacggtcccagaaaagatagtctgattctcaccatcaaacccggcctcaagaacgatagcaatggactctcgttggttagcatcgaggtagctcaccgtctcatcggagaggttgtagatggtaacataccctttattaggctccttcgagttgtcttttttgacctcgaactcgatatttgcggcaccagtttcattactgatataatacgcatctttggcattctgattagtgtaatctgagatattggtaggcttttcaccaacatacactggtttgcctatcgttagcttataggttcttgttctgtaagcaggcattgtttactcctcagcagtcgttacctcatcatcaggagacgagtaaagtagttgcaagtctgacaaaaatccaatattgtatctccctacacgtttagttgattgagtaaaagaaaatactctcaactgaccatcgggaatattgtcaagatatttgaaaggcgcgaatatatcgaaaattgtagtcaatttgaaagatattgtaggatcagaaccaacatccccgaaatagacgagccaagactcgtctctctcgttccattgaaaacgcatttcataagtttgactgtccagaaccacacgcatcgtctgatcagcaaagccgtctatgtcccaagaaaatgtgatcgctgccattagttacctaccgctttattatagtcgagggtatttccatttagatccttgagtttaccgtccggcgtcagtgttcccaccacttgatcttgcttggtataatcaccaatacccatttcatctgcaaccttttgccaaccatcttgattaggcccagcgaacttggttctccttgcggtcacttccacttcattatctgtggcagaagactgaacagaacctttctgctttgtcttaccacctgattttttagggtcggtatagactgtagctaaggccgtcttcccaagggtaaaagtacggaattctgtgaattctaactgaaataccaacgcagcaccatcagaattgctacggcttgcctccagggaggtcaagatgtagttttcgatgatacggtcttcagtaacaatggtgacgatttggcggtcagtgataagcctttctagtacctccagtgccttttctgggcgacgggattctaccgggttgttagggtcggtatctttatcgatgtagttattctcaatcaggtataggggcgagctattgattctcgcactgaaagagaatttaccatcctcaataacgccgtggtcactgtattttactttgttttcaacagcgtaggacgtcttatcgactgttctggtataagagtggtcttcaacaacatcaaaaaggattgcgatattgtcggtatagtttttattctttagttcaacgtttctaccaccgttattaaggccgctcgcaaacaatgtatattgaacttcaccactggcattctgagccgtagagaccttttgctcaacgtttgctgtagctttaccttgttgcggcttggactggttgcttgatacaactgccataaaacctcctcaataagcttgttatgattttatcataaatcttcaactaaaacaacgaaaaaggggccgaagccccttgtcttattccgggacaccaaggatgaggttgatgtttcccatgtttgaagcatcgattcgttggtcgatcatgttcttcagctctccggcatccagtttgatagttatttcaccagccacaggttcagtagggataaccatcggaggggtagcagaagacttaccattcgccccaggcatctgattgttcagataatccagggttgccttatcaggcccccagaggttagagaaccatcctcctgttttgccactaacaatactgtcatgaacattggagaaaactttaccacgctcttcgttgaagtcactgtaggggttatatctgtcgttaagttcagaccctaaggtgaacagagacagcagtccacctaaagaacccgctcctttaaagaacttacctatacgagagaatctgccacccctggcaggacctgacccgccgccaccttcccctccgcccggtggagcgccctcgcctttaccaaaaacagccccaattcccttgatcgcaccagcaagacctgcaatcttagcaaggatattgaatacacggaccagcgatgttgcgaagaagagagcgccaatgccccagccaacccagttccatgtcttagaaatatcttccccattctttctgaatatggggatatatctctccaagatcgcattgaccatagtaaaggcattatacagggcataaggtatcttcatgaagccatcaataaaccctgccacaaactgacctaccgcagccgcaagaggaccattagagtcaagaatcttggcaaggttattaaatgtctctgtcatcttatcaccaaaaccagattcgaagatcttgttctggaagttcatccaagtctgaccaagacgttgcatagcaacccggttaccttgtaaagctttctgtagtgcccctcccttgttagcagcttcagcatagtatttagcaacgaacggaagcactttagcagctttcagttccccatccttcatcatatccatcaacttctccacgttgatggaggagtcgttaaaagcttcttgcgatgccttcacgaacacctgtaatgatccggggataccctcggcaagctgttgcttaagttcttcagacatgatctgtcctttgcccatcatctgttgaatagctgtaataccgcgttggtattttacagggtcaacctgaagagcagttgcatactcagagaatgacttgaagagttcgtcgttttgtgatttagtaagcacaccgtttgctgcgatagacatttgtgtgtaaccctgcgcagctaccttaaggtcgagacctaaacgatacgcctggtttctcacaaattcaatacgcttaccagcctctgcggagtcatcggacaccatcagcattgttgcttccataccctggaagaactgtccagttttcagaacgcttgcagcggcattgaatgctccgtatgctgctgttacgctgattaatgtactacgtagatttctcaggccatcattcagagaaagagtattggcattagctttacggagtccagtttccatagcagcaagctctgcacggaagtttgatgccttcatgttcccgctcttcatatagcggttgactaaagaatcataaccaggcagttgccttgcatatttatcaccatacttggcacgaagacgaatattggcgttagagattgtacttatctttgcttcacgcgctcttgctcttctccccgcttcccgctctgcatcgcgggccattttctctctggtcttattgtctgccttatcctgctttatttgctcacgacgcatacgtgcatggtcacgctccattgccttacgttgttgctctgcaagacgaggatcgtgaggtgttgcattaggattcaggattgaggatccgccgctccccgcgcccttatttttcaggcttgcttcatatgctgccatacgtgcagcagaaatggaagggttagttccataattgccgttcttagcagcaagtttttcttgttgacggagctgtgcctttagggcattatagtttgcctgcgattctggagatcgcccagcagttagcctagcgacagcagccttacgacgtgccttttcaatcttatcgatggcttcacgagcacgagcttctttctttgccattgcaatattgtgagctgtggtcttcgccgcctctgcacgttcagtttgattgagtcgcttattgaccattctcgcctgcatagcagaacgtttcagggccgcagcggggtcggctttagcagaagaaaaagccttcccggtcttttcccattcggagcgaatttgctttacagctttcaaggcacgtccaaaggacgttttgtcaacgtcccatgttaccttgttaactgtagaagtcactataatatttgccataatttcctcaataaaaaagccaggctcctgaaaaggaacctggcttgagattaacctcttctgcctttgcttcggggtttagctgcttcggcgtctgctctcgatttctcttctttctcattaacatcgttgatgaaatcttcgatatcgagatactcatttagcttaagcaaatattccatatcggcagactcaagggagatataagattcccccttaaagttcttcagagcacggcaccagagatagtcgaaccacgtcagggaactattttttcttgcatagtcaatagctctttggacgactttagaaattttggacggtgttactccgctgccacttccgtcggttcctgatccaccgtcgctacttggtgaaccatcccgaagttgcccagaagtccctgaaggtctgcgaaaccgtctttcgtgaaaaaacagccgtagttaatcctcagaacctccgctaccaatttgatcagatccaacatcttgtcctggaaaattgtatcaatatcaatcttgccagccatgccgttcacagatacatcctcaagaatgagttcgaataatttttcgatatcatcttgctccatctgctcaaacaggtatagaattgcagtaggtagtgcttcagagaggttagcgcctccggtaaataatgcgccactaatggtagccattggaactgcgatataacgaccaatcttcggaaggtttttcataaccttggacggagaccagtgtgtgattacaaagttcttaccagccagatcaatttctgtggtaggtctaaaattcatcatgtgtacgctcctgcgtcttttaaggttgttatatccatgcgtgtttgaaaaggccacatccttgtggcacacgaaacgatattagacgatacctgcaagtccagccagaccgaagcctgtagaggacagggtatccgggcttaaccatgcgtccaggattccgatctcccaatccatctggcccacttcagtgccgtaggtcagatcaggctgtttctgaatccaaccaactgtgctcagacccatgccctgagagccttcaagaaggacagggaagaagaccagcccagtaatggatgcttgtttctgccagttagctaagtacccgttccataccgaagtgttctgtagagagacagtcaggacaccagattggttacgagacagtgctgctgacagctcaccatcaacccccatatgggggatgatgttatcttcgttgcgagcaacgacgatcttggtatccgctgcgaacccggttactcgctgagtcatcatatagagacgcgctttctgtgggtcgtaagcatacggggttaaaattctagtatccatttattacactcctgctgttacttgtccgctggaagaagtagacccagttttgtctaacagaacagagatgcggatcttgacgaaatgcaatgaactgttgtagactagctctaccttaacattgttaagggtacgagatgcaaggtcgttagatgggatgtttgcacgaagcggaattgttacaaccgggtcgtagaacaccttgttgacggaatcatatccggtcaaaatagaaccattagtgataccgacgttcagaggactgttcatcaggactgatttcaggttcggcatatcctcatcactcatcttcatggaaagaccaagattagaacggcgagacatatatgcgaagatgctctcttcacttctgaacttcagccagtgtccgaaacgaactacgtcaacatactcaccggaagcacacttaccttcccagaatgcaccaacaccattaatcatacggtagaagttcaggttctgtccccagatagctggacgatcagaagaactaagggtcggagcaacaacacccggcattgtcttcaggtggatagagtcaccataggatgggtcattagatgccattgcaccgatgataccaccttcagggaatgcgctatctgcaagcgggtcatacataccgatgctgttatcatactggagtgctttcagttgattagcaatggaatctgcgtcaacgacttttgacagcgggtcggatgtggaatagacgtgcagcttatagttcgcagcagcataagcagcagctcccaggattgcagaagaaacgtgttgttctgtgctcaggaagtaccagttgctatttgcagtttcaatcaccggaagagttccgctaactgtttccgtagaagcatttgtaagtgtgcaattcccagaatcaataccgatgctgaatggctcgccgataacatcagaagatgttgccataatgccctggtcagactcggttgtaaccacctcgtcattgttagtagccagcagagacccatcgcctttcggggtgatggttacaacaccagcggtagctactgcaccgacaattacattaagcgtggtatcggagttgattgcagatgccagggctgttgcaatactctctggtgtagatgcggtagtaacaggaataacgatgcttttagtatacgcacctgctgcaacgttgaaacttaccggattattaggatctacgttagtctgccctgtgaaatcgataactgttgattcccatgcttgtcttccgatcataagcgcttgggggcggaaagtcccagcaaaggcttttgtcgcaaaagtatacgcaggggaacctacagcgaaaccatcagcagcgagttcatccagatctgtatatgtacgtactcgttctgggaaaacgttgtgaattgcgataaatagaggggtttcaaaccctacggtgtcgattggttgtgtcccgagaacaaccgttacgtcaacaaccttatcattataagccattgatttcctcttcttctatttctttcataaagttattgttgatcatctggagccggatagtaataaaccatctctgcattcaccctctcgatatcctcgaaagctcctgtatctgtcactccaacgcagacgttaaaagtgataagtacagttgcacggttttcgaaggtttgcatgttcaacggaactctctggcgcgataccgttgaggaagaagaatatgcaaatggggaattggttggaaaatacttgtcgcagatgtaggggaggctcaaggcctgtagaatccgagttaatgcatttgatgcttttcctcgaaatgctgtcaggttgtaaaccacctcgtagttgtgagttattacagcgttaccgctctcatctacccactcgttcgcagcccagtccatctggtcagcggtaacttggttgagcatgatgaactcaccctctaccttggatatgacgtctccgtccccgtcaattatttttctccccgtgacttctttgcaaaatctggcgagcgtaactgcgagggcgtcaaaaatatcatcggagtttgttacgaagtctgccatcataggcctccttctgtccccgcaggcgtagagatcacatacgctctgtaacggctaacccctgtcgtctgatacggatcagacttgataacagtaaaccattccatttccccacgggaattcatgagctggatttggtctgctagcaggaaagaaccttcgacaggacctttaagaagagttgacgaatatacagtgaatgaatcatactgtctgccgccagcctcggtcaactgagaagtgtagtctcttgctgccttgcctgtcagaggctgaacaacgcattccaagacatcaaactcttcatactgaatagcgatctcttggttttcgaatggattgcttgggtctggctgggaaaaagtacgatgtctcccgatgaaagtctttctcggaatcagcttattcctgcctattaatctgtagcctggtgtcatttagtccccttcccagtggaaatcttataggttgcagatgacttcaggtcgccgtagtggaacatggcctctttaaatcctttgacatcagcccatgcatcagatacgatgttattagggaacagaccaccttcgatgacataccgaatcttgtctgcacctgcttgaccgatttgtttcaggactggagtcgggtcttgcgctccagcagccaattgaccaaagaggtcgatctgaaattttttaagttctttctggaaaagaacacccgcgctggtcatgaaagtacgagccgggaggttattccaaccctcttgatgaatcgctgcaagagttgcagtattcaggccggaatagtgaggatcgtcgaaaaagccatagcttacctgacgataatccagcttcttaaccacattaaagaagttcatcagctggctaagatcttgcgtacttgtgaaatttggtctcatgactgcatccgtttaggtattttaccacattatcttagcaaaatcaacgataaaggtttggatagttagcaaggccaacggcgagggtatcgacgaggaattcctggaacaccagtctgtggaattatacctccaacatcgaaaggtccacgggagtttctgtcgtatttaacacggttgaactcgtcttcacgaactcccccaacgataacaaggcctctgaccgcacttaagcaatcattgacatagtcagggttttcaagcagccagtcgaggaagtctttccaattctgataaggagatccacctttgatctggatagtttcatcaccaatcttttcaaggcgatccgtgatcgatgcctctcctgtgttcacttcctgaagaatcaaccaacgtaccacgtcaacaagagtattgtaaataacgtagtaaacagtgcatggcgtgttatcatcaccggggtaattagcctttgatttctctattgccaaaaaggcaaggataatctcgtcgggtaagacttccagggaaatggacccaaggagcaggcggatataagcaacaatttcttggtctgtcattttcgctccttcaagctcttctatttatcaatatcttatcatagaacgtcgattttgtcatcaaaaacacttgacatcatgtgacaggatgctattctcaaagaaaattattgaggagaatcccatgaaagcagtaatagcaggtgttatcacagccatcgttgtctcgggtggacttatctactttatgaaaaccaaccccaatatgaacaaattcgacgatgtttcttcaagctggttgtcggctgaagaaaaaacagaggccattcatcggattgctgggatgaaatgcgatacagaattcagaaaggcattcattcccggcactctgacgacgcagacaggtatgttagatgagatggaagaacaagaagatagtttccaagtaatgagaaatatggggatagtgaacggtactgttcttgcaacaggaacttacatctgtaaatattataaggatggccgacagccttatcttcaggtatctttgaaaccagaggcgagaccgctactaaaaaaataaggccccggagggcctttatattacgccataatgccagcagccttcagcttggaaagaagggcattaaagtcggtaaccagtccagctacgtcagtcgcaaccgtattggcctgtgttgacgccattttaacaccgccaaccacagaagtggttgcagctacgggagcaaaagtggtaggcttaccagtaatatcggcccatgccacagatccgccactgccagcggcagcaataacatcagcgaaggaaataactccgccagttgcaatgtcaatcagttttgtaccgtagaccagtccagctacaccagatgttgccattttaaatctcctaagattattacttcagtgcggattcgaagtcagctaacatattttcaaatgtcttgctcttcgacagggtaacacccttgtttgctgcgaattcagcaagtttgtctttactaccttttttgtcggcttcatcaagcagtgcagatgcttcagcaagaagtgcctttacgtccacagagtctgtctcaatgatttctgtattatcttctacaacctgttcaacaacggtttcttccgcttttggtctaaccgtaacaggtttaacttcagacggaggtgtaatgtccccgttaaagaacacgatgaagttgcccatcctcagagtagaggtcttggcgtctacaggaagaccggacaggtctgcaagttcctggaaaaactccatgaaagaacgaaaagccttcatttgcttaccaaggacgaagccatttaggggtaagcggcttgaagcgctaatgttcaattcgggaatgtatgccccaaagaacttgaaaagctctaccttgttcgggaaaatgcgataattttgatttgccatagaatctcctttggtcctcataaacctcttgacatataagatcaccatgctaatcttaaaatgaaaaaagggagaggtgattaacacctccccctcttagaggtagctttaagctatattacgcgaaagtaccagtcagtttaacaaccagctctgggcggcagttaactgtcaggaaggaggtttcagattcaaccttctcttcacgcaggtaagcagaagatttgtaccacaggtacagttcttgtgccggagtgttcgcttcacgaacatcgtctgctggcgcgtagtggatctggaacatgttgtcgataccgcgtggcagcatgtaagcttcaccgtccgggatgtagccggagatatcttcgatgtacagaacgttcttatgaacgaaggaacggttgttagcgttctcttgtccgtcaccaagacgacggcgcagcggttcttgagtggaactgtagtattggtatgcgttcatgatcagcgggtgacctacgaaagcagagaaccatttacgagaagccaggactacgatgtcgtagttgtttccgttgtcaccagcgttgtcgatgatgaatgcacgaccatcgttttcgagcaggtcagacgggtcaactgcaacgtcagtgaaatctacgttaacaacttcctgggtaacaccccattcggtgaagtagttatactgagcggtcgggtcctgcggtgcccaagatttacccatgattgcctgaagcattgctttttctttaagctgttcatgagaaatacggatacgacgaacaacacgttcaactacatcctgtacagatttaggagcgtccgcagtgaaatatttacggaagttctgtacgtctgccggagtgatctgacgatccagcgggaagaacgggatgttgaagtttttcagttgggccttttcagtaccaacgtagttacgttcaccctgacgacgacgagctgggaagtcggttacaacttcgtcaacacgctcgatctgggcgatagtagagacaccgtgataagcctcgaaaaggttcatgttggtgatcatacggtactgacgaggtacaatttccagagttgcgcctaggtcaacgatctggaaatcattagtgcgtactactgccattattttctccttggtgtagattagatagacgttactgggatctcaacggagccgtcgtaatatttatcagtgatcttcagacctttggcctcaagagcagcgatagcagcagcgttgatagcagtagtaccgtcagcaaagaacagtttggatttgttcagggtcagaccacgaacagcaaccacgaaattgtatttttgaccaactacgaaaggacgtggcatggtgtaagaagaagtcaccaggtcgcggtcggtgattacaccaaatgcgcttgcagcgtcggcagttgcagccagagtaccatcagacttaacgatcataccggccttcagccctgcggaataagtgatttccatttccaggaagctgtagccctgatcagaagaatcaactttacccaggacgatgtcagagtagaacccttgaatcggattagccatttatattatctcctcgatattaggcagttttgcgagcgcgagcagcttctagagctttctgcacgttagctttaagaacatcttcggcggacttagctaggtcttcagtaacaacctcttggttgataccattttcctgagtaccgaactctttcttcacagtttcaacttctgtttccagttcgctaatacgagcttgggctttttccagaagagctaccactggggcgttagctttttcaatgatgaagtcagcaagagattcatggtcttcttcagcggcaaaagtaaaacctttggcttttgtaagagcatttttcttttctgcttcaacagcagccttgataatcagttctgcttgggcattttttgcattagcttcttcaagctttttaaccaggtccaggtactcctgggatttggttacatcaacagtatcggacacagaggtctccttgttttcaattgtattttgaacaggtacgtctggtttagcagcgtccttgatgacctcagtctcctgagtgtctttggcatcaaaaatgacaccgtgctctgcaacacccttctcaaacatctgttggagtttgattagttcatattgcttcacaaggtccagctcttcacctgcatttgcagctttggcgatagagatggactccatcttcgattctaaccattcttggttatcatcattccaacgttgcagccattcatcatcaggattttcagcagcagcgttttccagttctgtttcgaagcccaaaagtttggcaaggagttcagcatcactactccacatatcgaagaagcgacgaaggaattcttcaaagctcatatcgacagtaacttggcgaagtgccttaaccacgtctttggtaatctgttcaggtgcaaggtcagacttcatcagaagactaaccggacgcatatttgcagaataaccttgactctcgtggcagagtgcgatacccttatccttaatagttttggccttgactacgagtgcgctcattcgttttcctcggcaatctcaatcccgaaatcgagtccggtgatttcaccagtctccttgtctgtgtagccagagcattgaatgctcagtccaccgacagcgttggcctttttcaagagccacagttcaggatcattgtatttaaccttagctacccaggtgccagctttaatgatttgctcgctaccgataaccacgacatcaaactcttcttgaatccaagtcttctcgatggtaaaggcatcagtctcgacaatgtggaacaggttctctttaacaagaccagccgctcgcgcagcatcgaaactttccttacctttgacgattgtctctggagacatccattcaccgtgggcatccctagtgtttggttcataaatgacttcgtaagaaatcatttgttctccagcatctttgacaacagatacaggcttggcattcttttgaattgctgtcttcttcagccctacatggagtacatctttagatgctttctcaatagcggcttcaggagataggcctgaatcaatcaggccatttgcgagaaccagcaccttgctcttctgaatgagagacagattcgatactgatgcaggaaggtcagcaatacttgagtatttcatcattttccccgttgatagttattttaacaccgtttattttcttttgcaagttatttcagtgagttgcttagttatccaagttagagacagaattatctcttactttagacgtcccattaccagaagtaccttgcttcattccatcaccggagcgactggtatcttccccaaggatcttgagtagttcctcttgagatgtgttttcaggaatctcttcatcaaacccaccaacctcaaggatcttgttgataactgtaggtgtcttcggcagataaccaacagcaccaattctctgaacaaatttggagaagctttccatatcaacttcctggatagctccaggcttaagtcttggcatgtcttcatcagacaaacggatattattaagagcgagtagttgaggaatcaagttcttgttgaatgattcacaaataatatcgatatctcgttgaacaaaatgtccgtggattgtttgttttgattccgacaggttgtaagacccttgaccatcattccctaagttgatgaatcccgcaccaaatctgtccaagatcgccttcttacgctcttgtattaggtccttggtactgtactgtttaccaaccccatcgattcccttaagggtcatcttatactgctcaccgcccttatcattcatatctgaaggtaagatgaagtaagattgttcacctgaatgtgcgtttgcagcgtcagccatcaggccacgaaccatatctgcttcaggtgatctcgggtccatagatgccttattcagaattgaagaagggatctttaattcaatgataccgccgaggtccttagatgcccctataacttcgaggttttcgatcaggattttttcacggaatgcacggtaacaaccaacaagaggtgatacacctgtagggtttgattctgtcccaccaagagacattatcatcaacttattcacaggaatgaatttctcatccgcacttcctgacagatttgtgacgagactcatggccccagcaatctggttcatcccgttctggaaattagcaaaagctagtgcgctttgataaacacctgtgattgtccttccatcatcgctgaagacaaaaggttttgtacgagagaggcttgactgaggacggaaagcaattttgtcgatcgtcatatagcctgcgtacttagatggcgcggattctgttctgtagaccttttcgaatacagagaaaccatactcgttaaatgtcgcagcacttctcgccacatcgcgaagcgtctgttggttagcaagattcttcagagcatactcgacgaaatctgccgcttttttagactcttcactatctcggttgaaaagaattttaaaatcattgaaagccttggtgacaaaaacatatttcgtatccagcgctgtggcaacagtatggtcttgcttcatggaatccactgttgcgaggaacataggccagcggagttcttcaaccttcataatctcagattcagcacgaatctgagacaatgctccactacccagttctccagtacggacacgactcacagcaaggttttcattccctgcttttgccaccgcattctttctttttctgtttctgcgatttgacacgagtcatcccctctattataatcgtgtatacatagtcggagcaacaatccttgggattacgacaggtctgatgatctccgttttctccaggaagttaatacctgaagagatggcgtcaacccagtcgtccttacgggacacagtgcttcgctcgccattaaatttctcaagttcattcatgagggcttcatatgtctttgcgtcaaaactgttacggacaatacgaacaaagccttgttgtgcaagctgggcaaagggtgcgaaacgagtaagtttcgacttgttgcctggcgtagggtctttctcaaccacataaccatccgcgagcaatgctcttgagctggtgaggaattcgcttataccagcttggcctgggtcaactgagaaaataatcgttacatcatcaccatcatgttctgcttgttttttgataattgcatcacgttcgccagccttcttacagaagcggccttgagttcctgtggaatagagaccatcatcaacgaactcggcacaataatcaccggataaatagtaaaaaccctcggtgtctttactcactttcacggaggctgtaaagtcaggatgtctgttaccagatgtcctttcagttcctgccttatcgtatggccttacagatgtgcaacctaaaggtagacatgccacctctttcaaataggatctttgaaaatagtttgcaccctcagggcgagcattccagttaccataaagtaactgtgccttttcaacttcaggaagccctttcaggaatgccagatattctttgttattctccagcatcggagggttatcataaatgttagcggagatgaaggaaaatgtcagagcatcgtcggcgtcatcaccataaagctctctcagttcttcttgagactcaccccagacaaagttaccatcttgacggaggaaccaacggatgacaccgtcacgctcagggattggatatccatcatcgtcaagataccaatcgataagttcttttattttgtgatccgggtccgggttacaagaaattaccatgcgacttgggtatttagattcagaacgtagacgagagattaggtagtcgatctgctcccattcgaactggcatccttcatcgaaaccaacaaaagtgtactgaagaccctggtggttaagtttgtccttcacatattccatgtgagaccattttacctttgcgccaggacgaccctttttgaatgtctgtgtctccgcgtcaaagtatgggaatattgcctcaagctctttctctctaaagcgtggtttccatgcatcaggtagttcattataaatgctttgtgctgtatcaaataaaccaccctggcctttcaactgaggtgtggttctacggaacatgatacagttcgattttggatcatcgatatatgctaaaggcattaattgtaacagatacgatttacctgaccccgcagcgcccccaatgatcaggatttgcgccttattttccaggatcattttctgcttagggctggcgggtccaaaagtcttactcaaaggacctccattattatatgctataggaggattttaccacgaaagatcataaaaataaagcccttatcacgaaataagggccttgtcaatcacttttgaggtgtaaatatgttacgaatgtatgcctgaaggataagtaacttgctacgtgtatccgctgcttcaagattatttttcttaacaatagcactgtttttagcgttatcagcaccataaggaagtggtgttgggtcagtaggtgggatcatagcgtaagcagggggcttagaaagcacctcagagggattaaacttctcaaccactggaactaccttctgtggagactcgcatccaaccagcatgattacagagaggaatatggcaagcaaactctttctcatttaacccccaagctttcattatagatatcaacaaaatcgttatccagcccaaactttttacctgcttcagatttgttatatgcctcttgtttttcatcgaggcgagacctaagcagttcattcttagctttctcttctgcaagctgacgacttagttcatccgaaaagtcttgctgcccatttttaaaatcttgatttgcatctttgttgtttctcatttgcagatcccatttgttatccgtatcattaactccacggctataggcctgctgtatttggtaatcataccaccccttaacttcaaaagcgccccacagtagcgccagagaaaggacagtaatgataaccagtttggtatgtcccttgataaaggtcaaaaccatactgataaaatccatcatgagagatccccatcacaatctaataattcaacaatggtcactttatttcgaggcgctttatcttctcggtttacagatactctaccatcaccctcgtattcaagggcaagtgggtcttccacgtcaactttaaagaggcaagctccaggttctatcgctcctgcgtgccaactaccctgaaccccattcttgcataagagcttgtacctctcttgtgcagcatcaagatcaaaataaatcctgatcttatctagcatctctggattgtcgatgctattgctgttaagaccgaatacgtgtttttcggtatgcgcctgcatcatgtaaaaatgcacagcactagatacagcccagaattccttgaaatacaggcgatcggtgtttttacgcaggcgttggaaaacattgaagatatctttagcttcgagattaaaacgccgttggcctttacgcttgtcggtgatagtggcaatcgtgctgatagcaatatcacctgcattatccagtttatcaaataatccctcaaatgaaaacggctcttttgtatcgaagagttcttcaacgtttgtcccatacataccgctaagatgctttttggcatcttcccagctttccattttgagacttgcgacggcaacacccaacttcattatttctcgacgggagattgtatacccacgggcctcgtactttgacgctcggagcatactgatgatcgggtagtctgtcgctggattaagaaccaacactttctgtgcagcatgtttaaggaaacgactgtcaaacacccatgtttcatcactaaatgagaaggcacccatgttgatggtgtagtcaaacttatcaaagatctgcccagcgttctcaaataccgagaatgcaatgcattgcatcaccggattagaaccatctgaaaacataatgcttttgtctgtcatgccgatattacgaacatatgagactttcttctttctactttcgagcagtttttcaataccatcccaagtcgattcagagatatcagacagatcaaaagggcagtcactggcaaacttatcttccatctccaagatctcttgcttagacactttctgagaaagaaccttgaatcttggcgcacgggattcccatacctctttcccattgtctaaaatgaagaaatcacgataaacacgtttctcttcattgtatcccatcgttttaggtgacaggtcatgttcaccttttcgtaggtctatatccatcatgtaagtaatgaagatctccaagtcatcccatgaacggaagtacaggtcgagatcattaacttcccggttggtaaagagagccgtgatagcgccacctgcgattataacatcgaggctacgaaggatatggtaaatatcctcagagaaaaaactttttagtaaacggtattctcgaagatgctcattcttctcgtaagtgtggatcattctggtctcctttagtaagctacttttagtagtgtaccagaaaaagaaaagccccgcaagagcggggcgaggcaaaggagaggagatataataatttattgttattagaatttggatgcgtgagtgggaatcgaacccacaatcttcggcttatgaggccaacgtgatctatatatccgtttcactaccacgcaattgaatttgccgtcccaggtcaaacggcgtcgttgtgttccagcctggcgtttaaaatatggtgggggcggctggattcgaaccagcgaccatctgttcttcaaacaggcactctaccaactgagttacaccccctaaatgtggtgggcaaggagagactcgaactctcacgccataggacgccagaacctaaatctggtgcgtctaccaattccgccacttgcccttatcgatccttcgggagaatgccaccctcggacagttaccatgatgagcatttataggcaatatactcatcaatccttgctccgtcctgataatcgttaccgtccgaggacgcattgcgaacctatcaacagccgaagacttcaccttatcgttgtacaccgagtcaggcttccgctatattggtgcaagcacagggattcaaaccccgacctttcgccttcgtatgacgaagctctattcagttaagctatgctcgcattatttaccatgtctccggtatttttcacggcgacgtgcttgttgttcttctttcgtaagagaatcccaagcgagtttctttctgaccctatccttttccttgaactcttctttggtaaagaatttctgatggggttttcttgcagcagagatattgcacctgagatgactgtatgagatattattaatatcaaagaacaaccccttaggatctgcactgtctagccagggggttttatgttctatggaaaaattatctcgctccataggagcgccacagtgatggcagtaattggagtcagtctttacaataaagtcccataagagatcttttaccaatctaccactcgctgtgcttgcattcattcctaactgcaacgctttcttgtctttcatcgactatccttagatgtctaattatagaattggtcagtgcggtaggatttgaacccacgacccagagcatccaaggctcccacgctaccagactgcgctacgcactgaaggtgtagattttaattatcccaggtctctacaaaactggtatcgctggctagctaatatcatgccccgtgagggtacaattggtttgatacgtcgaactcattttgagtgccttccggcaatttacatcaacatatcaaattggcgggaaattcctgaatctaacaggagacgccctcagcaccagaggccattatcacacttaactaatttcccaatatggcgaggataacgggattcgaacccgtgactccggcgtgacaggccagtatgtttgccgctaataccatatccccataatttggcggaaagggggagtttcgaaatcccgacccctcgcttaacaggcgagcgctctgcctctgagctaccaatccatttaaatactttatcagtgaaaacaaccttttgcaagagttattttaaccaatttaatttggtgggccgcgaaggattcgaaccttcagtcctctcgttaaaagcgagatgccttatccagtttagctagcgacccataactgtcctgactgtaatgttgtcgacttctcggcagacagtgagcacccaagagcacataggcaacaatacagctactaattggaggagagcaacagaatcgaactgtcaccgtatcgctacggtgggaccgggttcaaaccggagtctgcgccatgcagcctgctctccggaggaagatgtcagactcgaactgacacacccctttcggagctactgtctctttagcaaagagatcccttacctgattagggttaatcttccaattgttctttaatttctttacgaagatctgctttttctttcgcacgtgtaatagggacggattgaatttcttctgcaacaccacagttactgccgtggagcctacagcgtccaaacactttcttgcaacgcaaaagtttctgcataaatcctccataaagtggcggtggaagtaggattcgaacctacggaccccttttgggggcctacacctttccaaggtgctgtcttaaacctctcgaccattccaccaaattcgcggcagatatcgtacaacgaaaatctcgactagaacacatgacgtgggaagatagagataatcacgtatctgcaaattggggtgacctgtgggtatcgctcccacttcctcaacgtcacaggttgaacatcatctgataaatgcttaggccacgcatgagtattctcaaaagaaaacactcaaacttggcagggagatcaggacttgaacctgaactacggatttcaaagacccgtgtgctaaccaattacaccatctccctacaatcggtgagggcgcctgaaaccgagccaggctaagtatcggactgcaatcctcagcttattttgttgccgccatgcttacttatgaccgacaagatttcccgttgcagcggtagatcatagtcattttcaacatccggtcgcccccattatctggcatgaaggtgaggagtcgaaccccttacgactggctttggagaccagcttgctcccggagcaattaagttacccgcacattgtttggtgggtatcagtccgattcgaacgaacctcagcaagtatgccagtgagctacaaggtgcgcacccacttcaccgggcgttttccaattcgccttagatacccattatttggtactcccaccgaggatcgaactcggatttccagattgaaagtctgacggcctgtccatttagccgataggagcatttgtttgttgcccctgggtatctgaactattgagtgggtgtttccagccgcgcagacgttcatcagtttaggggcgtatttggagcgttatatcggattcgaaccgatgcttccgacttggaaggacggagtgctggaccgctaacactaataacgctttaaatcgatcccgtcatagtatcttactagttcccagtaccttgattatgcaatccgaaacgtcaggatgcggtactatgacggagaatggtgggagtagcaggctttgctcctgcgacctctcgattatcggtcgagcgctctactgactgagctatactcccattaattggtggcccaccctggactcgaaccaggaaccccgaagggcacggatttacaatccgctgcaatagccattctgccaacgagccaattaaccttgtttgaactgaacaatatctgttgtgaatggcttactcataggagtagatttcttatcatcaacattagttgtttcagcttcttcattctcttcatcgaagtaatcagaaagcatttgttcacctttctcaattacaaatcgagcaatattttccctgatattgtcctttgttgtggcacttgtcataagatctttcaataccttatgagcatcaggaatcatagcaatcatattggtcttaaggtcaaggatattcttctcaagctgaatagcattagactcttctttaaggggtctaccttttcctctacgacgctttgtaagttgttgttttactgccataataaccccacttattaatgttatcagatttaaatttatctgtcaagggccattttatcattttttataaaaatattcaacaacttggagcacggtaggtgaatcgaacacctgacatttggtttgcagccgaagctgttgccactccagcaaccgtgcttttgggggacccgattatttcaattcgctcccacacattcgggtcaagacgtgtcctatagtctttcgacgcttccacagctcggagtaaacccgtcccggctgtcctgtgaatttggcgaaggcggcaggattcgaacccgcatactccaattactcgattaacgacgggttagaagcccgttgagatacgccctcttaaactgatgcgccctcccggactcgaaccgggaaccctgggagcttaacacccatgcctctgccagattggaccaaggacgcaaaacatttatgtgctgcgactctctcaaaacacttgtcgggagaaggtcaagaaatatccgcgaaatacccctatcgccccaccctatgcaatgtctgtcgtttcggtttgcaacccttgcgacttctattccaaatggagaaagcccagccataaatgttttgtggagcagggtggtggaatctaaccacctatgtattctccaccgcacgtatgtagcggggatattttcaggtctggatggacctcgcggttgacaaaccgcctaccctgcattggcttctcgaacaggaatcgaacctgtaccgtccctatcgtgggaccgctctaaccaaagtaagctatcgagaaattgtttggtgctcgcagtaggacttgaacccacgaccttctccttacaagggagttgctctaccaactgagctatacgagcaagaaatgctgtttccgattaacagcctggaggagtcagttagccatatcttgtgagctaagatcctatatccaggatttaagtaatcaaagaaattttagctttatggtttagaagtttcaagtttaaacattaagctttgaacgataatctttgaatgttgaatgttgaagtctttcgaattcgcgattcgacaatttcgatcaaaccgcatcattgtgcggactgacggaaacatacgtttaagtatcatcctgtacgattatgttcggagcagtttaacctccggccccggtagaggcaagatgtttctgacttcgctaaccaaaaacagcatttaaaaaactttaccagctatccgcaggaattacaagatgttaatcaagaattcctgcaaatattttagattgatccttcaatctctacttcagtccgtgcatttgactcggaaagaacaaagtcaacgttagacttgaagtcttcaatctctgcttccagagaacgaatgcgatctgccagacccagtgggtcgacaatggaaggagttcccatgctacgaactggcgcttctactacagccaactgtgcagcgtctggcgctttatcacgttggacatatggagcacgagcagcttcaagcttcgcttcgaattcctgtgtatcacggttcaggcgaacctgagcatgattatactgagacttcagttttccaagcagaagctctttgaaaacgatggtgcgtttacgttcaatcgcctgagctacggtcatagactcgccagcgatctcaacttttgttacagcgtttgactgaacaactttcgccttcaggtcgtcgcgaacagccagaagatcctgaacaccctggaagtctgcctgagcagatttctcgaagtcctcaacgctctggatagagcctgggatctgacggtttgcgtcagtgcctttcgcgatgtgaatcgtgttcagcgcttcgatacgcttctgaatcttttcctcaaccttggtcaggatagccagagcgcgggttacagacatcttagtagacatagaattctcctctcatgaaatttaaaatttgagttacttcaaacatttgccgacatccgtgtcggcactacgcattagtttttgccagtgttgacaacaacgccctggcggttagcatcagcttttgcgatttccagacgggtttcgcgttcagccttcagatcaccacgcgctgcttcaagctgttctgtcagcattgcaatacggtcatccttagccttgctattcgcagtaagttctgcaattgcaaccttgtgagcagattccagatttgccttaaccgcattcagttcgattgcagcgctacgtttaacgtcggcaactgcgctttctacagcttcagcattgttctgctgagagatcgctagctctgcactaaggtcttcaacaacacccggttctacagctacaaggccgcgagctttcaggatagaattcagaacggaatcttcgttttccagaactttgatcttcagcttggatttttcttctgccagtttttcgttgaactgaacttcaatttgtcccagttcctgctgcttaaactgaatttcctgactgatcttttcagacccttctgccagagattgcagttcagcgactactttagtcagaccagtagcggcagtggttactgctttagtggcacgttcagttacggaaattacagttttagaatcagtcattaagttctcctttgcgttaaattaggtttaaatactacacttacagattgtgtttgtcaagcgaatctttgattatttcttcggtggtagggttgttttcaaaccatgaccaataataccaaagaacaagcaggaaagagatcactgacatgatgataaagataacaccgccactcatcgtacaacgtccttaatggagtcacaaacttcaccaacgacgtctgcggtaggtgatacgataatctcatcagcggcgtcaagaacttctgcggccacatctacaaaaggttctgcaacagttgccgtaacaacaacagcagtaccaacaatatcgccagccatacgtaacagggatccgaacatttcgttctccttttggtttagatttgaaacgagagcactttcgtccatttaagctatcgccctgtgccactacgcgagccgggccagcaagaacgggagtcgaacccgtatctccctcatttcaaacttggtggggcatgaaggattcgaaccttcgaccttcggcttaagaggccgctacactaaccgctgtgttaataccccgaaaacatacccgtgtttttaaagacgttcacggaatcgtcattccccatgccggagaaattactttttcttcttactcttcggggctacggtttcaacaaccttagtttcctttaccttaccagcacgttcacgcttggtcttgcctgtgcggatgcggtaagaagcagagataatctgaccaccttcaatccgggtttcggatttatactcgcctttacggcgatcgaaaactgatacggttttctctacaccaccgagacgcacatcgtgcggcgcagaatgagtctgagtagacttcgactcaaactggaaaggctgtttgatagcatcgatggcggatactttcttagcagtatttttcttagtcataattttctcctttgcattttatttgggaatttgtcccgtttatgttcatgaggatactaactcaatcagatatcctcgtcaacatttttaattggtggcccccggaggattcgaacctgcctacctctcgattatgagtcgattgctcatacctaatgagcttgagggccttatcgttcagagtggaattgaaccactgaccttgtccgtatgaagaacctgctctaccaactgagctactgaacgcttgatgtggtagatattatagatcacctgtttcattgtcaacgtcttttttactattactgcaaataaaacagaaaatttctcttttaggacctatgtactccttcccgcagttagtacaggctgaatgataatacataccccgcagactttcactaggccagtctctttcagagaatgcgatgcagtgattagaggtcaggtcgttcatcagtgtatacctctgggaacaattgtcttgccctagccttaatttcaacaatgatgtcattcagtctaagactgaggctatgcattctttctaaagtttccatataatgcctctcagaagtctgggtgctcgtcagaagaaatcccctctccgaaaccaacgaaaacatctacgtcttcagattgacgaatcccttcgccgtaaccaataaagccgtcaaattcatctttcatcgttttgctccttttcgttttgaacgaatgatcgccgcttcagcacgacgttgttttcgatttttaaattgttcggaagattcggagagcgtatttgattgtgagatcttcatcattggggtagaaatagtataatccaccttcttcaccgaaggaggcaacgtatttccaggcttcaattccaaaaccagttgtagaaaaagcgatctcatccgcttcatcagtggcttcatccagttccctatgattcgattcgtgttcaatatactctccgttgtcagttttgtaaacgagttttagtttaaacatagtgtcctaccgtgtaagttgttaagagtcaagttattttgataacttaatcttaccagcggacaccttttttgtcaatccatgatacctgagtcgttgacaccacgccggtattctgctatagaaagtgctctgatacgttctatgaactcatcatcagtttcccattcacagtcatcatcgtaatattcatcaagaccatcttcaatctcaggaacccaagacttcttttggtcttcatgaacagatgccctgttaaaatcatgtttcgagactaaattacgcactgaaatcagaccccttaatctgttttgcggtttcaacgagatctacatttcccgttttcgtgtttacccagcgggtttcggtctttattgcgtgcattgtatgtccacaaccaaaggaaatgatgcaaacacctggtccatgagcctcaagatcggcttcaaactcctgtttacagactttacattccatcattacgggtccaaacattttaggctccttaatataatacgggtttgtcggtgtattattacatgtcaggcaatcatgtaccgggacttcatgccacttgcatggattttccatagtgtacctatcagaaaagcccccgaaggggcttattgattacagttgagctgctgcgcgttcacgaatcgttgtcagatcttcatcgacaataagtttaccgttgtagaacacacgacgcagttcgttatcgtcagactgtacatcttcaagctgacaattgtcaatcagttctaactgaccgaacatgttgcgaacaactttgaggaaacctttcgcagatttcttaccgaggtcagtcttaggctctttgacaaccatgatctgctgaccatcaatcacagcgccagttgctttcacagccatacccagtgaatcacgggttgtgtactgggtggtaaaggaaccaacaccgtacacgatattgctggatgcaaagcctttatctttcagacgttcaaagatgtcttttgcacgagcaacagtgatggaatcaccatagatcagacctacatgactgtccagaactttgtaacccttggagttaacttcaccaccaaagatttcccacagacactgaattgcacccttaacttcatgctcttcaagacctgaaggttggaagtcgaagtaggcattatcttcatcgtcaacaagaatccggtagtatttaccttcaatcttggcaacttctgaatttgaatcttcctgtagtgctgagtgtgcatcagaccagtcatcaaactcaccgaggctacgatagcctgcaatgatatgttcaggaatgccggagtcaggacggaaaacaacacgaccatcacgggccatgatgtcctgtttcaggatcgctgctgctttggtgataatcgcccagaagtcataactgtctgccacgtaggaaacaaaacctttagggaaaatttccgtaatgtagcgtttcatgaattcaacttcagccaagaaacgtgcttcgtccagagtcaggtccgggttttcaccttgtaaacgaccaacaatgaaaccgatgttcgtggttgcaacagagtgttcagatgcaggaatagaaccagcaacgaacttacctttcatgttgtaataacggcgagcatacagaatcgctgggatagtgtctgtacccattgagttgatcagttgaccgaactcgctctgtgcagcatcgtgagtaccagcttcaccgcgatatgcgaagcagtggttctggaatgcaacatggtcgttgttatcacaggtctcagcagcccatttttcagacagcttgcgatactgccagaacgtcgttgcagttgtgatagttttccaggtttctgcggagatcacactttccaggaagttaggcaaccagtaaaaatccgggtgcgtattctggattgtaaacattgggacctgaaccggagaaagcgttccttctggaagagcacggatttccagaggaagataaccgagatcatgaagagcctcaaagccccaggtttctaccatgccaatgccgatgctggagtcgcaaacctcacgataatcagcaaccgcttcttctttcgggaggttgaagaagttattgttgaacatgtcgataaggaaccacttaataaatccctgaagtccagcaaacatgacacgctggtcgttatcggcgaagtggatgaagtgcttcgcattacgaggggtcatgttatcctgaacaatttcagaacgtttatcatacatggagatgtgtgaaggtttgtaaaagtcagcgaacaggataggactttcttgattaagcatgttttgtttctcctttgtttgtttaatagggcgattgtacgcccacttattcatttgtcaattaaaagttttcggtccagtcgtggtacgcgtagatttcatcaacgccgccttcgtagataacttctttaccgaaggaaaagataccgtgagttacgtaaagaataacacgttttgctccttttgccttcaatgcttgtgccagggcgatgaatgtgcgaccaccatcgcagatatcatcgacaataacacactcacgtccttcaacatcaccgaaaacagcagtcccggtaatttcatttgtcttcaggtcgcgcacttttccagcttccaccagaggaaggcgaagtcgatcggaaactttctgagcttttttacgtgctccggcgtcaggggcaacgataacaacatcttttccggcaagaccttcatggaattccgcaataagagcgtcctgaccacggattttaacgttgttaagcaacgcggcggagacatcgctgtgcggatcatcgacaatgaccttgtcaaacccaagagagttgacgatatttgcgaaaactttgatggataacgcttcaccaggttgcattacgcggtcctgacgtgcatatgggatatatggcaagtgcaaagtgaactgtgcagtatgatggaggccttcaaggcgagaacatgcatccaccaacatggcaagtgccataacatcagtagaatttttaattttcgcagtgatgtctacgaaaccaataccacctttcggagtatgcgccatatcgattctaacctgttcttcaccacctttgaacgtaaagtgatcgacaggaactaccagtttgttcagacgaagttctaaactcatttcatttctcctctttccaagaatgtacttcataaattgttttgttgtgacccatcttggtacgcgtcgtatgttttgtcaaccattttaatttctcaaggttgcttacacaccttgttgtggtcgcccgtgataggccaactgcatcagctatgctatccagcgattcgtggtactccttccgcatcgatttgaagtaatggaactgatgccgcatatataggtacactatcttatcattggaagaggcacaggtcaccgacagtagcttcagttcgaagttgccgtagatgtgcttacctgttgcaatgtaccccatgtcactcctccatagcctgtgctcattttgatactaagcctatgctcaatttgagcacgtaaataaatactatataaaataaataaaacaatactctttaaaaaaaaaacaataaaacataagatctaaaacaagatcttttactacagagtataaatattctatatcatagagtcggtgactcgatgagttggattatcgtatgaagaaaagatgatgtcaagtgttgacatgaactttttaacgtgtagaatctagggaatgttaaaggagattgttatgttttcaagtaaagaaacaaaaattatcggtgaaatggtctgtggtaagccacgacgtaaaccggagcagaccgatgaagagaagaccaagttgatgatgatacgtgaagtgtatcatgaatgtggtgaagatcaaaatgtgtgcgtggtattaccggatggtatacctgttgacaaggtcttcgataacttctatgcttcaataaagtcgagactagctcgacgtaatgtgtgtgtaacatattcaaaggacttgactgtggaacacatcgagaacaacaatgttgtggtggatctaagtgaaatccatgtaacgctctagaacgtgttataaagcgttttaatggtgtggtagtacacttgggttaccaacccatattaaattaaatacagggcctcccagaggctctgagaggtattgtggaggattattttggatatgaagagcattacccgtgatgactccatctataaaggtgcttatctagctctgagagacatcatgaagtctatggagaaaaagtatggtgtgaaactgtacttagatagccgggtagactggggaaagacatggatggatgcttcagtttacattcatggtgataggaatatcgttaacttggtgtgcatgaaacttattgtgtggcaacattaccagaaaatcagggatggaattctgttcgcctacccggctgaggatatgaaatgaagaaagatatcaggaaacctgtcaaggaaaagtttgatacctctgcatttgtgttcacaaccgatgtgggtgtgattaaagatgctctacagcgactgaatgaacaggaggcagatcctgaagcggaaccactgacaaaggatcagatctattggatgggttggtgggagcttaacatgccggaggttgatcgtcgcggattaacacgggtattgacatgtgctcaggaaaatgctgcactgggtctgtataagaaaactacgaagaggaagaaaaaatgagcagacttgcaaaactaaacagaagaaagaaaatgttgaaagaaaagcagaaaaacatcacggctactttccaagtatgccgagaggctatgaaggcaaatcggataacaccttcgcagagacagttgatccgtgatattcttcgtcctgtgctccatgaccttgaaggtgaagttcgtgatgttacacttcatattcaagaggaacttgtaaaaagatatcaggagaatacatgattgaccatgttacgtcagacactcactggtggcataccaacatccttggtttcccatcgtgtgataaattccgtaagaatctgtacggtcaaaaagaagaccgtgaaagtctgtatgccatgaatgcaggtatgattgaaatctggaataagcacgtcaaaccagatgatgtcgtagcacaccttggtgacttcgtgatcgcttacggtcgctacgttgagccacgcactcgtgatattctggaaaagatcaacggaaagatcattcttgttggtggtaaccatgacaaccgagatacgaaacgtatcttccgtgaattcggtcatgaagttgttgattataaagagattaacttcagtactggaaaagagaaggtgcatgtgtgtatgtctcactatccgttcgcatcgtggaacaaagcacaccacgggtcagttatgttgcacgggcatagccacggctcatatacagcccccggtggacgtattctcgatgtaggttgggatgttcatggtcgtcctctgacgatgcgtgaggccgtcctgatgtgcctcaaaaaaccaatctacactgctgaccacggagaataagatgcataacaaagaacgaaatttcatagcacgtaacacggcgaagtctttcttcgctactattcacattgccggggattatgctcaggccaagaatttgtgtcgccattgggttatgcaaggtgcttgtgtgcagattgctccatgcacctatgtttacacaggtggtgtcgaagatggtatgactgtgcggttgatgcagtatccacgtttccagcgtcaggagcatgagatattatcaatggctgtcgaacttggaaaatatcttgctcaggagatgtgccagataagcttcagtatcgaaaccccttataatacaacatattatcaggcggaaggttatgaaaaaagatcttgatcttatccataacgtggcctttttgattagcgagcttgaagaatatgttgacgaactagacctgagcatctatgatgactacagtgaaatgaaatcagcacaaaaggaagtgctcaaactattgaaaaatctcagacgaaggagagaacatgaaattcaacgtagacgatttggtcgctaaaaaactggtaaccaaaaagacttacaccgaaggcccgttcgcaggtctgtctgtgctgaagtataagaacaatgtgttctgggataacctgtggcatactgacccacgcctgcttgagtgccgtggcatggttgttgattcagaagacaacgtgattatctggcctttcactaagattttcaaccgcttcgagaatggaactgaccttcctcttgacaaaccggttatttgttcccgcaaggtcaatggttttatggctacagcggcaatacacaaagacaagcttctcgtttcaacaacagggacattggattctgagttttcagaattggctcgtaagtacctcgaaaaaatgaattttgatctgatttctttccgtgaagattacactttcattttcgaaatatgcgatagcagcgacccacatattgtggaagagaaagaaggtgcttatctgattggtgtccgtgacctcgctttaaacggtgttatggttgaagagcacaaacttgatcgcatcgctgaagtgatcggtgcaaaacgtcctcaatgggatgtccgtgcatttggcgatgtcgttgcagccagtcatgctgttagccacgaaggttttgttgtccgaaatatcgggacagatgacgaaaatagcgaactacttttgaaaatcaagtccccacattacctggcgaagaaattcctgatgcgtggaggtgataacaagtgggatatgatctgggataacccgaaagaggccaagaagcgtattgacgaagagtattacgagttgctagaccatattcgtgagtattactctaaagatgtttggtccgcgatggattctcaaaaacgacgtcaggttgttgaagattacttcgctatcgaagacatgtttgatcgtggtagtcgtttttatgttggggttccaaaatgattatctggcttgatgacctgagagatccaaaagactacgggtatcctgatgccttgtggttcaagacctctcagaaatttatggactttctggacaacaggtcaaagttctatcgttatgtcacagagtggcatttcgacaatgaccttggggaagggtcagaaatggagggctatgactgcctgttggccttggaagagaagcttgtgtatggaaaacttcctgtgcatgatgctaaactctatgtccatacgtctaacccttctgcggcacaaaagttcatgcttgcaaaagagagcttctcgaagtatcgtattacgatcttaagaaacaattactgaggagaagagatggaaaagactctgattatcttacgcggcgtgtctggtgctggtaagtctacagttgctgaaacaatcgcgggtaaagcatggcctgtgtttgaggccgataaataccattatcgggacggggtttacgactggaagcctgaaaacatggctgttgctcataagtggtgtcaagaacaggtacgtgaggctatggtgtgccgtattgcaaaaattatcgtatccaacacttcgacaacagagaaggaactaaaaccctacattgcccttgctgatgagcacggataccaagttattagcttggtggtcgagaataggcatggtaatgattctattcacaatgttccgcaggaaactcgtgatgctcaagagcttcgtctgcgtaactcattgaaattacagtaaggaaagatatgtataaaggaaataacctacgggaatcgttcgaaaattggtgggactctcttagcgatccttggtcaacaccagaagcaaaatctgctgcatgggaagcctggaagttttcaaatttacgagttcttaataaaattcgttatatgaaaggtattaccgagcggtgcaatggttataatgaggctatgaatgagataaataatgttataggggaaaatccatgagacgtcttatcgttataagtggtgctggcttctctgcggagagtggtgtacgtacattccgcacagatactgaatctggtaaagccctgtgggatgaatacgaccttgaggaggtttgtaacatacacgccttccgtggtaacttctaccataaaacgcacatgttttataacaagcgtcgtgcagagttaccaacggtacatccgaatgcggcgcatcttcgcgtggctgagtggtacagacgttatcctgggcaggttgttaacatgacaactaacgttgatgaccttctggaacgtgcgggtgtccctaaagaagatactctttacatccacgggtatctgaaagaaattcgatacaagctccatgaagattctgaagagcagttggttgacatcggttacgatgaggtagaccccgaccaatttcattggtgtaaaccaaacgtagttttctttggtgagaatgctccggcctatggccctatgaatgataccttggagtcattgacaaatcaggatcttgtaattgttgtaggctgttcaaatacagttattaacttcaactgggagttgttccctgcggttatgcgggggaccaaagttgttgttgttaatcctgctattaggtatgatgaacaaatgatgtatgagaatgcgggtgttcttgtatatcgtaccggagctgttgatgcctttaataatcccggccttatcaagatagttgagaatcaccttgaaggtaagacaccattgcaaagcaaggagaaataatgcaacaagtaaacagtacactgtacgcccttaataaagatggttctttccagtgttggaaggtgtttattgctggtaatcaggtagttgtagagtttggcaaggttggtggtaagaagcaacaaaaggttaccacctgtgaaccgaagaacgttggacgttctaacgaaaccaccgcagaacagcaggcattggctgaggcggtttccaaatgggagaaacaggttcgccttggatatcgtgacgatacaagcaagcttgagcaggaagagaacttctccccaatgctggcccatgatgcaactaaacgttcaaaatcaatagtttatcctgcatacgtgcagccaaagctcgatggtgtacgtgctctggttactcttgatgcagatggcttcccacaattcaatagccgtggtaacaaactgtatcctgtaccgcttgattctgagttgtctgaacaggttaaatccctttctgagcattcagggtttgacaaattcgatggggagctgtacattcatggtctgagtctgcaaaagattgtcgctcttgctaagaagtggcgtacaccagagcagatcgaggaagagattgaaaaggattatcagtctgacctgaagcgccatcagaaagctattgacaatggggaagacagttggaaagatttcgatggtgatgtttactctgttgcgatcgaaccagttaaagatgttgatcgttatggtgggtattctagtcttgatttggaataccatatctttgacatcccggtgaatgcaaataaaccttggtatgcagtggaacatacagaccaccgtaaagcggatctggatattgttgcatatatgatagaggaggcccttaatgttcctctcgtccgtgttgtttctggagaaatggtagcagatgaaaaatctgtaaagaattacatcggtatttatatgacaggtggtttcgagggtattatcatccgaaacttcaaaggcctgtatgaatttggacagcgttcctcagaccttctaaaatggaaattgttccaagatggcgaggctaaagtccttgattctgtagaagataagaacggtgagggtgtccttctttgtgaagagaaggatggtacacgtttcaactgtaaaatgaagggaacccacgtagagcgatctcaggaaagaatgctcatgctggtggataagtttattaacttcacgttccaggctagaactgatgatggtgttcctcagttccctgtgggccaaagcgttcgtgaactcgatacattaacatgggagcctgtatactaatgggattttatcgtaaaaaacctgtagaggttgaagcacataagtttgaagggtcgactacaagcgcaggtcagatccgcaaatggatggaaaccggtgtctggaaggattcagagatccatactcgcgacattaggaacttggagatagaaacccttgaaggggtgatgactgttcttcccggtgattatgtgatcaagggtgtagctggggaattctatccttgcaaatcagaaattttccatgcaatatatgaaccgctagaagaaactgatcgggaacctggcaactacccagcaaaggcagtccgtaagggtgacgagatcatgtattgcggtaaggtttataccgtaactaatactggggcgatgggagaggatgttatcctgactctaggcgatggttcccaaatccctgtgcgtcctgatactcaaattatcgtaacaaaggcacagtaatatgatctggtattggctagcgctactatgcgcatcatttgtaacaggaggcggcatttatgccgcttacagattccgaaaagataagcttgatgacttctttgactgggtgtctggaaaggttaaacgtctgcttgtaatttgggctgtggtattgtgcctggtaacgctggcccttaccaaaccgttgtggaatactatgacctgtcagtttgatggcatagctgcgaacacggagaccagctattcatggtacaaatcaacctgcctgtacaagagtaagacaggggcatggttacctttaggtatcagtcgcgatcaaccacaaggtgatggagatccatcccattagaattatttaggagatttaatgaaagaagcttacgaaactctcaactcaatgctgcgtccaacctcacttgttaagtatgcaaaacatgttgtagattggaattctgtcgcagcctctgcaaagggcgaatttacaccattggaaaagcagtgggagtttgttggagaggagttagaagaaactattaaggcattgagcgaaaatgaccgcaaggaagtcattgatggggcatgtgacttatttgtcgtggcgtcatatgcttattggttgagtaataactattcactgtccttaacttacactcctgatcttaagttttctccgggtaaagctttggatgcttttgcgaatgaagattacgaggagatgcttaaattgagcacggctttattgtttggtcttgatatgcagttggataagaacatgagtagcgttcttgagtctaacgactctaaatacccaacacttagtgaagttcagtctttgcataaagaccttgacttgttaaaagcccttgaggcagaatgcacttgtatcgaacagcgtaacggtggacgttatgaaggtgttcatttctccattgttgatgggaatatgaaggaagaacctcgtgtcgtattcttcgacaagggcggtaaaatcatgaagccaggaactttcaaaaaaccaaacattattgtttgacaatcgcatcggggtctgtataatgaccccatcaagacaaaaggagaactaagtggaagaaaatattgattactctgaaattaatgccttggctaaacgccttaaaatgacaatcgtgaatcgcggagcatcttcccgtcctgttatccgcttcaccatgaagcgtcgctggggcggagtaaagaaatacgcttatgaatgcacactcggcactctggtcgcgcatgtaaaccagatcgagagaatgggcggaaaaattgttggaatcgacaattaaggtttgacaaataaaactgaacggttatactgaccacactaaactaaacaaaggagcaatatatgccacgtatgccaaaaatcaaaatcgaactgatcacctctcttccgtctgacccagttcagcgtaaacgcctgaaagatagcgtaactgaagtggttgatctccagcgtcagatcgctgatctgaaagaccagatcaaagatattcgctctgttgagaaagaaacgcataatatctctccaaaattcttcaatagtctggtgaagcgcgagtatgatgttcgcttcgaagccgaaaagaaaactgctgcattagaggctgaaaaagaagtcttcactgaggcagacattctgtttggtcgtggaaccccaaatgttgcacagactgaagccgatgatggtgctgaggacactgaataatgaaatactaccttaatggtgttggcctatttgtcttcatctgcgtcgtattcgggtttggtgttccaactctggtttctgccaaagatacaatcagtgttattggcgggtttgccttagtcttcactgccccggttgtcgtgtggtactggttgcgtaaggtcttcattccgaagacaagcgctgaaggagatcgataatgttgctaaatctgaaggcggcaacttgggaaaagttgcagcacttggcaaagtccaaaggtaagtctgcggcatcttatgttgcaaaaatcgtagatgaccacgttgatgataacgtaaagactgagtataaaatcaaagaggagaaacaaactaatgcttaagaatatcaaacgcgtagtatttgctggcctgatcgccctgggtgcaattggtctgactggttgtgaacgtgcaactgttccggcgggttatgtgggtgttaaggttgacctgtatggtgatgagaaaggcgttcagcagcaagaagtgggcgttggtaagtattggttaacctggaacgaagagatctatcagttcccgacgttcaaccagttgaacaactacgaacaaccgtttaacttccagaccaaagattctatgacggttactgcgaagatcggtgttgagtattacgttgaccgctctaaggttaccaagatcttccagacctaccgtaaaggcgtccaagagattaccgatgtcaacattcgtcagaatatctctgatgcgttgatcaaggaagcgggtacaatggacattggtacactggctggtgatggcaaatctcagcttctagaccgagtgaccaagaccctgaagcagaaacttgacccggtaggtatcgttattgtgaaactgtcttacactgatgaccttggttatcctcctcaggtaactgcgtccatcaacgctaagatcgaagcgactcagaaagcgctgctgcgtgaaaacgaaatccagcagaccaaggctgaagctcagaaacagatcgaagccgctcgcggtgaagctgaatctaagcgactgcaagctcagggtgaagcagatgctaaagtagcactggcaaaaggcgaagcagaatctatccaactacgtggtgattctctccgaaaaaacccagaaattatgcaactggaagcgatcaataagtggaacggtgtgaccccagtctacatgaccagtggttctcagaccccattcgttaccttaccagcaggtaagtaagagttgacaaaaggcccggtgatagactatcatcgggtctcaacttaagaaaggagatacaaaatgatccgcacaaaaattcttttagtagtagcgctgatctctccccaggcattcgccacagtcaacacactttctttggtggatgaatacactgatggaagctccaaagtctgcatctacagcgacggtaatcgtacagagagtgttgtgaaagaaggtgctggctcatgcccgtctaaaaagactttccactaaggagcatatgatgtctgaaaagatgattcaagtacctgcctccattatcgcagaactcgtgccgtatattaacagcggactacgatcaactgctgatgagatgggaaaggctggacataccccatccgaagtaatgtctgaggattatgaccgttttaactcccttcgtaggattctgagagaaaacggagtcagctatgcgagtaactgataaatacgtcttcttcttcacttaccgggatatgttcagtaatcactaccgccaagttattcctattcgttgtggtggttatgagtttttcactgtagaacattacatgatgttccagaaggcaatgctcttcgatgacaaagaaattgcttcccgcatcgctacggttgataacccgaatgaggccaaagctcttggtcgtcaggtaaaaggtttcgacaacaacgtctgggaagagaataggatggatattgtgacttcaggccttgtattgaaaatgaaggccaacagatctgtcctcgaagcggcgcttgggcatcgagatgcagggcgtaagtttgtggaagcctctccttatgatgccatctggggtgttaaattaaacgaatatgatacacgtatcgatgatcctgccaattggcgtggtttgaatcttctcggtgagtgctgggaacgggctattgatattgttgttgctgcaacgtggaggtgacttgaaattagagatcgaactggttccaaagacagcgtggtttactaatcttcgatctcatctcaccaaagcccagtgggatgttgtcagaaagaaatgttatgcaaaagccaattattgttgtgaaatttgtggtggtaaagggactaaacaccctgttgagtgtcacgagatttggtcatatgccgacagtaccattaccttaacgggtctgattgcgctatgcccctcttgtcatgaagtcaagcatattggtttggcagggatccgtgggcgtggtgaaattgcccttcgtcactttatgagagtgaatgaagttagtcgccatgtggcagagaaatatgttaaggaagcgtttgatttgtatcatgaacgaagcaagcgcgaaaagtgggaattggatgtccggtatttggacgagtatttgagtaaagattgagagggctagtgggatatccgtatgataaagattggaaaaataaagtcacaaaagactgcgtattagctttggatctcgaccagacatgctttgtgtcagccgctggtgctgaaaagcgtacaattgaggtcactcacattgagtctggaagaacaaagattttcaaaaacaggactgagttttggggatcgacaaagaaagttgtcggtggatggatcaaagaccaaaacatgaacatggaggcgaaggcaaaggccgaaggccgagtgtttgtaccgtggggtagggatgacttcacgattaaagacattcaggaaccggaacctgtagaaaactgccttcatatcctgaagacaaagatcaatgctatctttgaacaccttgagatggaaagcaatacagggatgggtgtacttggtggtgagggtaacttccgccttatgctcccagctccagagcgttacaagggtaatcgtgaggatacattacgcccactccttcttcaggaaacaagggattatgttacccggaagtataacgctaaggtgatcaatggtgttgaagcagatgactatctgtctgttcttgcttatatggggtgggagaattaccagaagaccgggaagttcaactacatcgtggcatcgtttgataaagaccagaaaggaaaccctgggcttatcttcgatactatgcgcgattcagaagagaagacatggaagcacccgatccctatgttgatcgacgattcgatgggtgagatctggatggaaggtagcaaggtcaagggatgggggcgtaagttcttcggttaccagatgctttgcggtgacagttcagataacatcaagccttaccagtgtttcgatatcgctggacgtttcggtgatacggcggcattcaatctgatcggacaccttcaggatgagaaatccatgtggcaagcgatcattaaccagtataaaacctggttcccgaacggtgttgagtttacttcgtgggacggcacacaacggaaaatgagtgcaggccagtgggcatctatcatcttccagatggtctacatgaaacgttctgcaaatgataagacaaccctttcaagcgagttacgccgtgtgggggttatatgattgataacttaatcatgcaggcagttatgagggatgctgaggcgctggctgttcccagcgtcaagggtaaattcttagtcgccacagggttgtggcgcatggttgagtctggtgatgattgctatgtgattttcactgatgactatactgatccgaatgttgcattcaccgtattgcttctggatgattgcgagctggtagaaggtgagaagctgttgatgttaacaagcgttttgctagacactcaagaattctcgcttgttgtctttaaggaccaaaatgactcggaggtaaccgatgaagctgatgtcggttgatcagagtcttagccattgtgctgttgtcatattcgatgacggagtgcctgtttaccgggaaatgatcagaacaggctcaaacaatagcaagagcaagaaaaacaaggatgttatttattttgacaatgttcatgaacagattaggttcattgttggcagaatccttactttggctgaagaacatcggattgacaaatatgttatggaggcccttagccttagttctatcggcagcgccactcgggatttggctggtctgttctactgtattgtgtacgggttgtatcagtcagcaattttggggtatcaagcaatccatactgtagcccctacctctgtgaaggcttatgccagagcacttttgcctgaatcagaacgcacagtcgttaaagaaaaggttgacaaaaagaccgggaaaaaggtatactcaacaggtcaggttaaaatggaaaaatcgcacatggtgagagcagtggattgtgattttcccggttggcttgatggaatgactcttgccgccggaaaggctgactacgcagatgcatatttgatagggaagaagttcttggaggatatatccgtaggaaaagaataaagagtcgagcatccaaaccaaaagcaaggaagaagccagtagttgtgccattaacaccggaactttgggtgaaagatgcaaagcagattgctgctttcagaaacaaattgattctggagcagcaagggttagatcctatactcggcgagccacttcgcaagccgtgcttggatcatgaccatttcgaaggtaaatgcagaggtgtccttagtcagtgcgtgaatacttttgagggatatgtcctgaaggcttggatgaagtacgtttcagagaatactcagacgtcgttatccaccgctcttagaaatttggcagattacttagagcaagacttcagtggctatccgcttcacggcgggtttaagaacgatatgttgaagtttttgagaagatgcaccaacgagaagataattgaaagagctaaggcggaccttggcataattatccccgaaggtactcagaaacaagacagcctcttgctataccttacagagttcgtcaagcagacggaggaaaaacatgccaaagaaaccacttaaattcttttacagaaattggcgaggtaagtgcggatatcgtactgtagaagaacccgtcatgtggtatgggtctacccagtatcacaagaactctcaatggtttattagaggttatgatctagataaacaagactttagagatttcgctgtgaatgatatcattgaattcgtccgagaggtgtaatgctacctgtagataaaaagattatagaacttcatgaaagcggaatgagtaaccgtgaaattgctcgcacattccttggaaaagagtcgagagagtcatacatccgtttggttcttaagcgtcatagcgcagagtctacgcctttaacaaaggccttagtatcggactataagaaagccaagatcctgttcttagatatcgagactgcaccgctgaaggggcatctctggagtctatggcagaatggaattgggcttaaccagatggtttctgactggtacatgctatctttcgtagccaaatgggctgaccaggacgaggtcatttatcgcgatatccgtgataactacgataaggaaagtgatgcatctatccttcaagacctgtgggacttgcttgatgaagcggattttgttgttgggcataatgtccgtaagttcgacattaagaaggtcaatgctcgtttcctattgaatggaatggataagccatcaaccttccgtattatcgataccatgcttatcgccaaagccctgtttggattcacctccaacaagctggaatatctgaccgatcgcctgtgtacgaaatacaagaagtctaagcacaccaaattcccaggacacctactgtgggatgagtgcttgaaaggtaaccccgaggcttgggatgagatggaagagtataacaagttcgacgttttatcgaaccaagagttgtacgaaatcttcatgccttgggattctcgtctgcctaacttcgatctgtatgttgatggtgttctggatatgagcgagtggatagaggatggtttccattacaccaatcttggcaagtaccaacgttaccgtcacaaggtcaccgggcaacagcgccgtgggagaacaaaccttctctcgaaagagaaacgagcgcaactgctgtcaaatattttggtttaactttaagggcttcggccctttgcaaaggagatcctatgggaagagaaattgttgttaaagttcctgatgccgcagatgatgattggctgcgagagcagatcgaatccttacgtgtaaggatcgaggctgttgtagaggttgaggataacgaagaaagctttgataagttaggtgcttgtcttgacatcattgatgcactccaacagtatacggggtactaatggatattattgttctgaatgctccaccacagagcggtaaagatgagatttctgcgtacctttgtaaaggtaacccaaacatcaaccacgaagaggtgaaggaactcctttttgaggtcgctattcgaagtgcaggtatctctcgcgagctatgggactctctgtacacgcgccgctacaaagagaaaccaacaccttacctgatgatagacggcttctttgtttctccccgcgaatggatgatccattgctctgagaaggtaatcaagccgttgttcggaaagtcagcattcggtaaagctgctgtggaaaagctgaagcagacctatgccaacgacgaggtgattgtattctcagatggtggctttgctgaggaaatcaaagagttgtcagattatgcatactcgactggtggtgaattcttccttgcacgtatccaccgaaaaggttatgattgggggaatgacagtcgtaactggttataccttgatggtatccgaggtcatgaacgtgactttgataacaaagagggcgctatgatcgattgtgcagaagagatccttgagtgggctaggtcaattagctatggagaagatgatgcgtaaaccgatgaatataggtattgatgtcgatctaacttttgtagattctggtactccttggcttcattggttggaactgatgtatggcgttaaggcggactgtagtttgccacccccgaacccacaggggaagacttactataatctttctaaatattttccacccgcgaaggtgaatcaattacctccgtatgagttctgggaagatccttatttgtacgataggctgaaaccacgccctggcgctgttgaagcagtggccgcatttgctgaagctggtcacttcaaccaatttgtatcatactgcaaaaagggacacttttcgtctaaggtacgcttcttgaaacgtgagacagaagagttcttcagccttgagccgggttctggtcatggtttttatgcgacgaagaacaaagcaggtcttaagcttgacgtcattattgatgatcgcaatgaattcctgaatcagttcggagatgacgtacttaagattaagttctggactccgtatgaccaatctgaggagttgaaagtctcgattgaccttgagacatccgactggagtcatattcaggactttattctggacttctcctgatgaaaagggatagatgcgagggcggtgatttcatcgcccgtcagggtaagtggtacgaagtattcgatgagaaggataatttcgtgtactcattcaaagcgacaagcgacatgtgcaagaatgtgcttaaccgctacttggtgttcaaggcagaccttgatccaaatgttaactacaaaattaagagggttggaaaatgacaaaggatgaaatggcggaacacatccgtacacaagcaacggctcgtgtgaatcgtgttattgaaggtatgttcccaggcacaggactgactgcggatatcatggggattgatgcggattttaataaaggtcttttttatgacgtctatctgaacttattctctctccgcgagctggaagagattattaccccccagatcaaatacaaagaccgtcttgctgaacttgacctgttagttgaaactgccgtcgccgctcgtatggctgaaaaccaagacaagattattgagaaattaggagcaatgagtgagtaatttgatttccgtaaaaattgtagctgacagcatttcaccttctggttctcggatcacaactttcgagcttgaatatccacgaattattcacagtgagttgatgactcaccgactgttaagtcggaatgcgatgagcagtcgtgctattccgattaagaaaatgatcgagcaggttcagcaaaatcctgcaatgcctgtgaagtttggtaagaaccaacctggaatgcaggatgccggggagcactcagcacagcttggtgatgggtactcggcagaagaatggtggaaactcgcaggacttagtgcagcccggtttgcagcagaatttgcagatgctggttatcacaagcagattgcaaaccgccttctggaaccataccaaagaatgaagacagttgtcaccgctacagactggaataatttcttctggctgcgggttgaccaggatgctgacccgacgatctatgaactagctaaggcaatgaaagaggctagcgataattctatcccagaccctcttgaaccgggacagtggcatacaccatacgttgatcacgtttatggctttgaagatatcgatgacaaagagtgtgcagtatttgaaggctattgcgttcttgacgaagagaacaagcctgtaatgctgaccctagaagaggctttggctatttccgcatcttgttgtgctcaggtgtcttatcgtgttctgaatacgagcaaagaaaaggctctggatatctatgagaagttggtgagtggtaacaaggttcatgcctctccattcgaacatcaggctacacctatggcagaatacagggaaattgagaactctgattatttaactatcggacatattaactttccccgtgatccaagctcttgggaagaaggtatcacacacgcagatcgtcaagggcaactctggtccggtaacctgcgtgggtggcgacaacatcgccagttagtgcctgacaatgcaatttcaggttgacaaagatatcgttaattcgtatcttagaagcatattaattaggggcgattttgccccttgtcaggcagaatggagattacatgagtaaagaaaaacgcaagccaccccaacacatttcggtcaccattgacttcctgagaacggtcccagggtttgatgtccagaaagataatgacctccgcgctgccttatacgcactcggttttcaggttaccgataaagatgggaatcctaaacacgtaactgtgttccaaaacaaaaatgtaagatgtgccaacatgccatcgacgtatcgtaagacaatgatttttgtaggagaaatgcgacccgattataaatacgcgaagatatacaacggtgttgaaatccttgatgtaggggtttattcaggcagtgatatggaatttgttttagatcttccttacgacatccctgtaattgaaaaagttaacacccgcaagtataccaagcgaggtgatcgaccagagacatttgaaatcactttcgatattgaagacgaagctcgtctgggcgatgtatttggcctggaggacgaatgagtaaagaaaaaacgaaatggaaagaccgtggcttcgatgataagcatcattatgccgggtggctctacttcaacgatttaaccgatgacagtaaaatgtacgacgatgtttactatgatgagttttctggtaaaatagttaacatcgttgcgccagatcaaaacgagaaagacgatcaggatgttgacgaggcagatgcgtttttgtctcaatttgaagaagaataaggggaaagtttgatcaatacagttgtgaagagtgatggtagtgtggttccatttgaaccagaacgtctaaacaaggccgctatctttggtgatgacggtaatggtaactggtcgtatatctcaatggatgcatataagcgactgtatgacggctgcaccactcgtgaagttaaccaggcattgatcgacgcctgtgtgagtcgtaaagacgaagcccattcacggatggctgggcgcgtcctgattggacaaatctacaaggaagcttttggcggatttaagaaaatcccaagccttaccgagttttaccaggacatggtgatgcgtgggtactgggaagaaatgggctatactggacctgagctgttaaactttgatcaagtcattgaccacagtaaggacctgagttatgggtatgcggttctgaaacagttccgggataagtatggtatcaaagataacatcaatgatatcctgttcgaatccccacagatgatgttcatgggtattgctatggctgttatgaagaatatgccattatcccgtaggaagaatgacgtcatcagactgtatacgtatctctctgatcttaaaatcaatgcaccaacgccgtacctgaatgggttgcgtactggtaaaactggatatgcatcctgttgcattatcaaagcagacgatacagctaaaagtattggtgttgcccgtgaagtggcgtacactatgacggtagcacaggcagggatcggttattacctgtcctcccgctctatcggcgatggtgttcgtgacaatacgatcaagcacatgggtaaactcccgtattaccgtggaattgatgttggtgttaaggaaaatcgtcaacaatcccgtggtggttctgcaacggtgtctttccttgcattagacccgcaagttgaagaactgatgcgcctgcgtaatccgatgacggttacctcaaagcgtatcaacacgatggactattcaattggtgtcaatcactcgttcatgaatcgcgtagctaagaatctggactggatgttggtgtcatataaggatgttcctcagttacatgagggtatgttccgaatgacaatgcaggagtttgatgctgaggttgcccgtgtagcagcagatactaagattccaaagacttgggtgaaggcgcgtgatctggcaatggagctgatcactcaacgtgcagaaactggtcgtctttatgtttactggcctgacgaaatgaaccgtcatacgccatttcttgagacaatctattcatctaacttgtgtcaagaaatctgtctgccaacaaaagggtatacagatatgaggaacattttcaacccggctgtcgatgatggtgaagttgcattgtgctttatcgcctctcttgttgctggtcgtatttctgaagaagagtacgaggatgttgcttactacaccgtcctgatgatcgacaacgttatggatatcatggattatccgtatgagaacatgaagtacacagccgaatctcgtcgttcgattggtgttggcctgaccaaccttgcacactacatcgcgaaacacaaagtcgcgtatggttctcctgagagcaaacagttagttcacgatctggcagaactgcatagcttcagtctgcatagggcaagtctgcgactggctaaagagcgtggtgttgctccgtggatgaataagactaagtacccgcagggttggttgcctatcgatacctataataaggcagttgatagtgtcgtgaagaatcctagcctgaagcaggactgggaaactttgcgccaggaaatcatcgaaaatggtggtattcgtaacagtgttctggaagcttatatgccgaacgaaagttcatcattggctaccaacacaacaaatggcctgtatccagtacgtgaccatgtgatcttcaagaaatcccctcaaggctctgtgctgtttatcgtgcctgagtatgaagagctgaaggaatattacacatcggcttgggatatcgatacgaatgacttgattgatatctatgcaatcattcagaagttcgcagggcaagcaattagtgcggatctttacatcgactatacccagttgccggatggtaagatttccatgaaacaacaacttgggtatctgattcgcgccacgaagatgggaatgaagacatggtattacctgaactccaaggttggggcgggagactccctcactgaggaacttcatgctaaagcaaaagctgaggaagagacaagggctgttgcaccacttatcgccggggatactgaagatcctta

SEQ ID NO: 24 - DNA, 167017 bp, unidentified
  source 1..167017: mol_type = genomic DNA
aaaacagcttatagcagaattaatggatgattattttcatgaccatcctgtcgagtatcgtccttatatatttcttaaagtatttttgtcaagtattggtaaaactaaaataccagtcagaatgaagtgcccaaaatgcggaaaatataagcagtatctttttaatcttaatcagcctccgttgacaaatccgaaagtagaggttgcaggattaacgcttaagttcaaaaaacctatagaaataattgatgatacaggtaaaatgattttagacaacattatatctgtgaaggattcatctggggaataccagtggaatgaattaagcgatagtaataaattgacagttatcgatgctatagatgttgaaaccttggaaaagattttatcgcagatgaagccgtttaactttgagctaaagacgtcatgctgtgataccacgacagtattaaaatatgataacattgttgatatctttaagttattgctacatcctgacgagattttcacattttaccaaattaaccatagattggtttctcaaggtaaatacgatttgaattctataatgaaaatgctgcctattgagcgtggcataaccttatcgcttattgaaaaggaccttaaatcatgacaacacaaagattaggatatcctaatataagcataaaattatattctggatatgatgcatggctagctaatagatttgttgaattagctgctacatttattacattaacaatgagggattcattacgcgggactaatgaaggattgcttcaattttatgacgcaaaaaacatgcacacgcgtatgaacggtgatgaactagttcaaatatctgttgcaaacagtaacacatcgagaacacaaacccgaatttatgggattaaacactttacggttggtgttgatgataaaggcgatagcattatcacccttcagcttggaacgctgcatgacataatgaatcttaagttcagtagagcgttttttagttctgcgtatgaaactataaaggaaatgataggcgcgatgtatgttgaccaaccattgattgctcctcctatcaacggaattaacgcttacgtcccacgggttccctggactagtaccctcaaagattacttacgatatgttagaaacgtaggcatttctactgataacgaccaatttatttttgcctgggaagatatcactgggattaacatgatggattatgaatcaatgatatcccaggatccaaatgtattcatgttcggggctcctcaaacaataggtcagtttgctgcaggattaaaatatccattagcatgggattttgaatggcttgttaaatcaaatagatataatagaaatcccatgaaaaatgcaacgttttatgcacactcatttgttgataaagatgttacccgaattattaatggagaaggccaaaacagcgtattcattaatagatcaggcggatattctgacatgatttttaggaatggctatgaagaagccttacgcatttctacgatggctcaatatgacgggtatgctcaaactaagtgttacggtaattttgaactaactccaggaatgaaaatcaactttgttgatttaaaggaccagttcagaactgacttttatatagatgaagttatccatgaaatatcaaataacacatctataactaacttatatatgttcacaaacggctctgcccttgaacctgtagatttgattaaggtgaaaaatgaacttaaacgtgattcttcctattaagaaaatagtaataaatgaaaagacgatatcaattccaaaactggggttaaagcaccataatctgatgaaagatgttaagggtccagatgaaaacatgaatcttcttttggattcaatttgtccaggattaacagcagccgaatctgatattgttgtattacatttattagcatttaacaacagaataaaagaaactgttgttaaagatgattttacctacgatttgaataaggtttacatttgccagcgattaactcaacggttagatggtaaagaattcaaattcagagctcctcctcgttattccaaactaggttcagtagattcaattttgagcgaatttcttgaatcagtagatggaaaaccaatggatataaactttatgaagcttccagcttttgtaacaaagtgggctgatgacttagtaaacactatagccattgatggacctgaaggaccaatcaaaggcatgcttaacgtaatggaaatatttgaatgactaagaaatcagaaatgaattcaatgcgtagaagagttattgctgactcggctccacagaaaaaggctgagtctcaagctgatgctcagattaatacgctagaagatattggtcgtcgcttagacgaccaacaagcatctactgatttgatttcggatgtaatagaaactaaatcaaacgaaattatcaaatcagtagaagatgtttcagctggtgttgaattaactgccgaagcttcagaacgcacaacagatgctgtctcgaaattaaatgatactgcatcattaattaatgataaactcacgaagcttgctgacttgttatctaaaaagcatgatgttcagcaagatgtccaaaagactggcactggaacatcattagaaacgataacagaacaagtcccggatgctcctactcagcagccattggaggaattacttgaaaggcttattcctcctcaggatgacagaagacctgatgcagatttctttcctaacacagaagagcaagaggaaagaaaagaacctaacaaagaaactgaggacaagaataaaaagtttcttgacttgaaatttggagaattaattaaaagcgttaaatctggttttggaaaaaccatttcattaacagataaaattagcagtatgctgtttagttatactgttagcgctttggcccaaatggcgaaaactgccgccatggttttgggtgtgataatgcttatagatttaattaaagttcattttaattattggactaaactgttcgaaaagaactttgttgaatttaacaagcaagccaaagaatggggtccgctattaactgcaataagcgagatgtcgaatgaaatagtaaaatcattcgtcaaaggagattggggtggattagcaaaagccattggctcgggtttggttgatgtaattgataagctcggagaaaccattatgctcggaatgagtaagcttcttgctggaatgttacgcgcattaggattcaatgattcggccgataacattgaaggcgctgctttagacagatttcaaactgttactggggcagaactcgatgaagaagatgctaaaatgagagcaaaatatgttgaccgtcaagaaagagaatatgacgaacaacctgaatggaaaagaaagctttctgctaagttccaaaaattcaccggtcagattgatgacgatgaatataacaaactgctgagcggagagaaaaagcagtcagcgtatgcagacttgccagaagacgaacgcctcaaaatcatcacagctcgtaataatgctgaggcagaactcaagcgtacaaaagcatatgttgaaaaaactgacgcatctgattccactcgattagactctgctaaggatgcagtacaaagcacaaccactagatataaagaactagagaagttatccccagaggttgcaaaagatttaaaggttgaattagaccaattgcaaaagcttcttgattctaaaatatcagaacctgctccaactgccgaagctatacctgcagcagaacaacctgaggttaaacagtctgcttctattaaagccgccgcggatagtcgtgaaactgctcgtacacgtgaatctaatacacagtcacaacctatccaggttaatactgctgtaaataagaatagcacatacgtttatagaacgcctccacagacttcaacagctgctcctggaatgcaaggcgctatgaaaacctcttaaggaaaaacaatgatttttgaagaactggccgatggccttgaaaacatcaaaaaatcaggaactcgaatttcccaaggtaaatctaaactgacgaatgcgccaaccactaaggtggcgcagttcccagctgaacgttcagctgggaatgattccgcccaagatatgagagtacatgacttatatcgcaacgggttattattcacagcatatgattttaaaggaagaactactcctgatttgcgttcatttagacgagatgtaatgttatcgtctgtattcgattcaccaatgtcagcattggctaattcatcaagctctaccactagtactgcaccagtagctaatattctattaccgcggtctaagtcagacgttgattcagttagccataaatttaatgatgttggggattctcttgttacgcgcggcggtactgctactggcgtattaagcaacgtggcttctactgcggtgtttgggtcgatagaatctttaacacagggattaatggccgataatggtgagcaaatttataacactgcccgtagtatgtatgccgggcctgataatagaacgaaagtgtttacttgggatttaactcctaggtctgcagatgaccttatacaaattattcgcatctatgaaatttttaactactattcttacggtgtgactggaaattcatcatacgcgaaagaagttaaagctgctattgatgaatggtataaaggaactcttaaatccgcagctccagatggggctaaagtagaaaacacagtgtttgagcaaataacatcgtttttaagtaatgttattgtagtttctaacccaactatttggactgttcgtaattttggatattctacatcaatggatggtagagaggatatatttggtccatgccaaattcagagtatccgttttgataaaacgccgaacggacatttcaatggtttagcaattgctcctaaccttccaagcacatttacgcttgaaattactatgcgtgaaatacttactcttaatagaggaaacgtttatatcggaggtattgaataatgtttactctcgaagaatttaagagtcaagctgctgatatcgatttccagagaactaacatgttctctgttgtattcgctactgtaccctctagtaaaacccaggctcttctaaacgactttggtggagagctgtataataatatgggtttagatggaaattggcttggattgacaccaggtgaattcaatcagggtataacaactatagtgacacaaggaactcgacaagttgttcgtaaatcaggtgtgaatacatttatgattggcgcaatgactcaacgtgtggtgcagtcattattaggagaatttacggtaggtacttatctgcttgatttctttaacatggcatttccgacagcaggattgatggtttattctgctaaaataccagagaatagactgtcatatgaaatggataagttccataacgctcctaatataaaaatcactggaagagatatggagccgttggttctttcatttaggatggacccagaagcaagcaactatagagcaatgcaagattgggtaaatgctgttgaagacccagtgactggtctgcgaggattgccacaagacgtagaatgtgatatccaagttaaccttcatgctagaaatggattaccacatactgtatgcctgttctcaggggctatgcctgtagcatgtggagctcctgaatttacatatgatggagaaaatactatagcagtgtttgatgtcacgtttgcttatcgcagcatgcaaacaggttcagtcggaaaacaagccgcaatggactggttagaagataaaactattcagaaaattgagacgattaatccaaatcagggcttgagtgcgtctgcttcaagattgtctcgtttaggcggggctggtggtggaatttctaatatcactactacgacaagtagaataatttaggggccgtaaggcccctttgttttatacaatgcagccaataaaccctggctcagtgcgaagaagtttcatttctttagtagtccaaactactttaacaggaatgataccttctgctttaccgtttagaaccgcttcgacaaacgatggttcagttggcttacggaagatatcttgaataagaaccgtcggagtaccttcgttaaacccttcaagcatgataagaacttcttcgttgaacttctctgcgtctttaacatcagcagaccattcaataccattaaagcggaatacgtgtttcatatcaatttcctcattggtttgtgtaagtctatagtatcacgtccttgtgataagtaaacaactttatgcaagtttttctgggataccatccaggttgatagcaccagccagtagctccatggtacgtgtgtagctaaccttatctgtagaacggtctggagagaaataaatctcgtttaaaaagcctttgaacttgctttcttcaagaggttccactttgccttgttccatcaagatgtcaccatcatagagatgaaccgattcatcgatttgctctggcggaactaccgtcatttctaccatgaatgtcttgttattcgctacaccaactccatttctaaaaggagttccccatactttgttgactttcattgccaacccgcgaggaagaataacttcagcctcatcactaaaacttgataagacacccgggataactaccttaactttatcagccccatgaataatgaacccaaacttaaactcatcagcataggcaacttcctcgcctctatcaactctttccaagttgtctgttccaataacagaagatactgcatcgatagttgtttctttgttttctaaatcagaactaggtgcgtctggcattaatgaatcaccagcatttgaataagcaccaaagataattggacttaacgaagtagaaacatagttctggaaataaaacattttagactcaatgttatctttaaagtcttcatattttcctcgctgaccacgatacaaaagagtgcctggttcaagacgcaagcctttttcaaatgcagaatcgagcggacgaattttcttgtcaataattggatcgcctaagctttccataccaataagataattattaacaaatgaataaccagaaccgcagtaatggtgtattgcatctctttcttcttcgcttaaacgagattgcatttcacggttatattcaattgctttggatatagaatcgccaacaattgacacataagcggatatcatataattgacaagattttggtattgacgtaaagctccgaaatcgtcagctggaggcatatcaaatccacgagtagctacttcaacgattttacgcattgtttccatagatgccggatttttagcttgagcaataacgtcagcaacgtctgaaattcgttgctcagcgattttcattttgtctgaacccgaaggaatgaaaaccttccagtcgtcatgcattctcgacatttggcctacaaataatctctcaactgcatcgccaaaattacttccatatccgccacgaacacgatagtgcttgatatcatcaacataaaaaggaattgatttttctaatccggctttgatatctttttggaggtctaccgtatcgccttctgcgtttagtactggagtgttagtagttaattcgtaccagcgttcacgtttattttctggccaatcttcatcaacatatgaaacaaatttgccgtactgtgctcggattaaatcttttcgagacactttcattttactcattacagcgagttcagatttcttgtcttctttttcgccaatggaattagccaatgcttcggctttggtaacgttttcgccggtttctttagacacataaacttcacctactttggaatctactttggtataaagttcttctgaaatttcaggaattccttcaatctcttcaagcttcttacctttgcgaaccataatggaataagcatacttacctttgtagtaagccatatctttcattagattgaaacgaccgccggtgcgagtagtaatcaaccgagcaagaatgcgttgaatggctttatcttgtccttgcattttcttcggattaaagcggaacattaccgcatcagctttaatttgcttaactactttgttgacggtctcaaaaatggtattgatagcaccaatcgggtcttggcctaaaccacctttaagcgcaccgatgttacctttttccgacacagagaacacgtagacctggatgaatttatcacccatcttgatgttcttaactgcatcaccttgacctgacccttgtactaaccgaatcattaaattgttattacccggcaccttaatcaaaaagacctgtggtaccttaagttttggcttaacgttctcgacaggatagattttactattctcttcatcgaaaacttcatttaaaagttccatgacatatcctcgtttgtttattctatttatacgaaaaaaggcccgaaggccttaattaattattgttactgtacgccaaacctgtaatccatttactgattcatacgcttcgatgttttctttgaagtttcttaatgtgttaatgttattaaactcaagaacttctgtgtgaacagaaatacccccacgtccgtcagaagatttagcaattacttcatatagaactttcattttattcctgttgcctctgtaaagttaacgccaaatgcggcttcgaatgtattagccacttctttatcatatctgcgctgtttaatgataggcaagaacaatcctaccgtaccatcatcacggccttcagcagttacccaaccattacattcaagttcccagatagttcctggaagagaatctctaattttccatagatgagtacggtcaagctcgtgcagttcttcgggcttatctttaagacctgacccagcgttaacacgaatacgaccacattctgatacgaacattaacccacccattttaccgggttgtttcctatgctcatatgaaccaacacacttcaaatcgacagtgataacctctttaaatttaacgaggttcttagaacgcttatcttcccaataagcaccgatatttttaaggatgataccttcgagaccttggtctacgtatgttttgtagatggctctagcttcatggatgttatgtacgacatggttttcaattagaataaccttgtcatagcctttgctcatcatttccagtgcacggaagcgtacatcataagcaaatccaggaactttaccttcggaatatactacatcaagcggaacataatcccaaacttggaatctcataccttccgcttcttcagcagagattgttcctttaatggccttattagccaatccgtttgattccgtgcgagccgtctgttggaattccttagctttacttaactcaggaagctcaggctctttaaacatgtcaaacaggtcgtttgtttcttctttcacttcgacatgatacaccaactcgccatcaatcatcacaccattaggatggcgttcgcgggcttctttggtcatctcgataagttggcgcttgagtttatctagacctaggtattcattaccagaacgagtaagaagagttacatcatctaaatcatctccgcggatttcagcgaagcatcgggctccatcagctttaagttgtgcgaatgcagggaacttaatatatgacagcgctttctcagaataggctgacgccaacatctgtggcatctcaggaattaatttcttccataccttattagcaatagaacccgaagcgccgcaacgcatatccttaagaaggacacggactagtacactagcatcaccctcgttcatcttagagagcaaatctactagcccctggattgccatattaccagtaagtactcgtgctgccagaatgtcttggaggtaatctagaccatctgaaaacgtctttgaaggaacatttggatatttaacgggagtatattctggaactttcttaataaaaaatttaaatcgcccggaatacgccagcagataagctcgctttaaatcaacgttatctttattgtcaatgagaatttgggttttggctttagaacccttagcatcttcaattgctttgatgatatcaaaaatcattattcacctaattcttttgaaagttcgcttacactacgatgataagttaatccatcaatataaacaaacccgttattgatgcattcattccaaatcgggcacgactttgcttcacgccaaattggattccaacgataaaactgattaacatgaccataatcacatgataaccagcgtttacctaccttagtatgaactacaaacatatttcctcctagggtatggctattataccatacccagtgtgttagcaattaatttgatggttatcacatgtaatacgaccgttattccaccagtcgtttccaggaggaacatgtggaccaggtctaaacggaatgataggttgtttccaccaatctcctggaacttgttgtggaggccaattaaaaggatgttgctctttacgaatttggtctttgatagcttcttcccacaatccagaaagagacttctgcggtttcttaacggatttcagagattccaggcaagttacaatttgatgccaatcttcaaccataattccaggagcagtcactgagccttctcgctcaccacgaggcatatagaacacacgggtttcagtgtcttcaaagactttgctagccgcagcaatatgtttaggcaaatcgtcaacataacacacaatgcgatcgccgtattttactttagccttttccagtaaagcatctttagattcatcataatcgcagaccatgatttctgtaaatgcatctgggaataatgcgttcagattgaaacgacgattaaggttagcatctactgagttgccaagagccgtgatagcgacaaaatcgtatttttctttgagcttattaactgtagctaaagcatcagcatacggagcaagataacgaataaaatcgctgttgttatacttcagaagcagcttaacagccagttcttcttcacaatcaaacagctcagcgggtttaataaatttttcagtagtcatcatatcaaggatatgctctaccggaaggttatatttttgggcaaagtaaggcagaccactttgccacttaacgatgattccatcaacgtcggttgcgattacaggttttgacattcggggaaattcctcaatgcttgtttaaatttggcgacgctatttgcggcaccggtgaaattgaaccagattaaccctggagtgtccgagggttctatatcaattaattctatattataatactcagcagtctttagcatttccctggtgatacgtcgggcaaccatatgaccgaaatgaggattaatagacatcgtcgttagcagcccttaactgagtaattggataaagctcagattccgcatgaattgaacgattgccatcaacccaattaacttcataccacggttcaactgagtaggctttaatggctggagccgtgtcacatacaactccaggaattccatttgctaatcttactgtactgaagatatgatatttcatgcatcaagtctcactgcccattcaggcaattcaaagaaatccggagcatcaatttcatactcaacggtgtgttgtttaacatcagctgacatgatatcaaccattgggtggtttttcaaactgcaagaaaaaataccagctttagatttaggcacggatacaatcatgatgatttcctcaaaatttagttatgaatttttctttcggcattttggcatttgagccatcactgtcagaatacccaattggcatagttgcattaatgaattcaattttagcatttataacattaatgctcagagaatctacgccatcaaccatacgaaattcaggagggcaatacttatcaatgtatgctttcacgccatttttattagcaggtgtaccatcgcgagtatcgctgataatggtttcaacttttttctttcgtgaatcatagaaagctgatacaatcatttcaatttcctcttaaaacggacgaatattaacgtgaaccacagggacagcaaaaggttgcatgattacaacttttgtgtctttagttgcattcaggcgttgtacttttgcaagattaacagcttcttcctttgtcaatccacctttgtaggtatcatttcctttatttgaggtccaaacaccccaatcattgcttccatcatcgtcggtcttcggttcaggttcaggttctttgtagatggtttcttcaaaataatgttgaaattcttgattagtaagaatacaccacatgtgagaaaagcggggttcatctactataactcgttcgcgctctccaccaggcttaatgatttcaaactcaattaatccaatgttttccgcatatttaaaggttctggtaattttaatcggattattaccgatttgctcaaaaacacccttgataagagcgcctggagacaagattggagtctttttaagtttatagaatttacctttttccattatcatttcctcaatagtggggccgaagccccgagttagttaaaacttgatttcgtttgaaacgatatcccagattgcttcacgttgttcttcagttgttttacgaccgaggatgtggcgcagataaattttaacaagcagctgacgatttgtgttccaagacggatgtgaagataaatcacgtttacgaacttcatcatggaatccaactttgatttcagaaccattgaactgaatatccagagtaggaccgttttcaaagctgaagaatacgtagttatcttcccagtacatatcaatttgagctactgtgccattgttgtgttcccaaagcaaagtagtagatacgtcccaagcattgttctgtacgtatttgcggttgaagttagtgaagttcatttttattctccgtagtttgtttatctgtttgggtggtacaggtctatagtaacccagaccacccaagaagtaaacaacttttattcaaaaactacatttatttcttgtttttctgctcgagcagtagaatgcagtttaaaaatctggaacgtatagtctgggtcatgcttgataactttcgttacatatttcttggctttttcaagagtgaacaagtttgaattgtaatcaccacgaacaataccaaattcgctctctttctttccgccgacgatgatgtattgcgcgctgccgtcatcgttaacttctaccattccgcttcggagctcgtacttagtaaacatgatgcaattactaaatcctagcatatccgcgtctatgatttcacctgtactttccagtttaattgatttaacattaccatgttccgttaacgtatgaactgaccatggcatgcattcaactctttcagcaataagcttgttaacgttactactggttgaaagatactcgttctttgcagcttcggtcaaacggtagcttttattcatttcaaaaacttcagacatttttcacctctacagttttaacagtttttacttctgcaaatccgatgcttttaaacagttcatacttggtagtttcggggacgatatcggttagttcaaggatgatttcttttgcttcttttaaagtgaagacgctacgcccatctttaaccactggagtaggtttaacgaacgttgatgggatttcaaaaactgcatagcgatcatcagagctttgattttcaaacgctcctatttgcacaacacgtccttcttctaactcatgagaagaaaataagcatgacagagaccggtcatattcatctcctatggtttttgccgaaatgattttaccggtttcggttttaatcttaacgacccgtcccagcgaatcaagttctaacggcgtccagccttgaactccgacaacggtggcaatgagatagttaattgtgttcttagcgtctttccatctacggtaagtttctggggaaatgcaatatactcggtttttgctgtaattcattttgatatcctcaaagatggggccgaagccccagtcaagattactgtttagtccagttatccatgtttaatttaccgacctttttcatttgctcaattaaagcatcggcacgattacgaccattttcataccaggttacatcttctgagtaaccgtcttcttcatctgtgtaagtttcagaacgaatacgaccaacaactggagtgttcagaacatatacagaacctgtgaaccaattagttagcgtgatatgccagcagaaatcatctgacggtccgtccggtgtcatgcatggaacgatatcaccttgaactttagacaaaatccacattttctcatggacagtctgagctttgtaaccgtcatggtctttagtcttgatagttgcgttcaggttgatggtattcattttattctccgttgtccgtttgggtggtacaggtctatagtaaccttgttgagcctagaagtaaacaacttttttcattctgtggaaaataaaaaagggactcccgaaggagtccctgaacttatgctttcggcttaccaaaacgagaagcatcatcgcgaagaaccgcacgagcccgacgcatgattttctcaaccgtctgattgatacgcttgttcgacccacgcttgtagccagcgcgtttagaggtaccaacaacttcttttactgcagtttttgctttagcttgtttagccattttatcatcttccattttggagaaatacatgggagcacgttcttccgaggttcaacttctttcgacagttctttcggttgtagctcccgcaagcccctaagggtacgtttaaactcttatctgttgcacaccgttagcttaaaggttccgggtctgatttctcagggataagatatacaccgatggatgtataggccttgaggcgtactcccgattggccatcgcctcggggtagcatgcacttgccgtttatttctagctgcactttggtagcaaatcaccggtggtttcggatgttttacgtggggataaccaacaacgtccacatcatacgttacccatgcgtacacatggtgggcgtacaaattacttcagcgttaccacaaagtggcgaacagctttgcgagcagcagaaccaagatgcttagcatacttcagttcatccatcgcttctaaagtatcacgaaattcagcttgagctgggttcagatgtttaaaacctttcagaacttccagtgcttctgcatagatatcgattgaagcaccgtagttttcgtgaccggaattccatgcattacgttggagttccagagctttagtaagttgtttgttcattgaaacattcctcaaatgaggttaaaatttggtggacggtaaccgaggtttagctcgggcatccaccgcttagaattgctcgggtaactaatttccgacgcccaattcatattattatttatatacgcacgccagggacttataatgacaagtcacaaacttctgccggatttctttaggtttcttcacacctgcagctaccaatggatgcggtacatttctaatattaccaacaggcagtggagtcaaatcaccgacttcaacaaaacctttcggtacatcatcaccgatagaatagatttcacacatatccggcagttgtccttgttcttcttttccaagaataataccggaaggagaaacaatttcatcaccttgctgtgcaggttcagacacgagaattacatactcgcctagagctttaattggaagttccatgtgttacctttattgtttgaccatgtagttatattaacatggtcagtttaaagcaaattacttaccgatcatctgcagcagatgctcaactttcataccatttaccgagatcagtttatcaaaggtaaatgagcgccaaccttctttctcggtatcatataccggaagtgaagtagtgctttctgctcgggcagatttagtagtactttctaccaaatcagatggaataatatctttatcacgagtacagcgcagagtacgaatagtgccatcagctttttcaaacacaatctgggattcgcccatgctcagcacagccttcagagtttcacgaatatggatgttttgttcagtagtcagtttcattttgatgtctctttaatagttttgataattacagatttgcgcttggataattcttttaataatcgaactgcttgatcttcaaatttaaatgttgctaatggtttccatttaaaccaacaccggcgttctactgagtatgatataacaacatcaccgcttaggttaagtttattaatttcaacaattctaagtttcattattcaattccacagaattctttaatgttataccaattcaacttatccaaattacgttttggaacattgaacacctcgattccagcagaacgaagaatatcgtcccaaccgggttcgttcttgtcgtatgtttcgcagtatactaattttttaataccagactgagcgatggcttttgcgcaatctggacatggagacagtgtgacatacattgttgctccatcaatactactgccgttcctggcagcaaaaagaatagcattaagctcagcatggatttcattgactttagaccatgcagagtgggctgctcgatgttctttgagcaatccgacctttttgacttggaatccatcttgacgcaatcccgtagatttgtaaggaatttcaccaatccaaccttgttctgccgcatggtcacaacagttcacaccaccagaaggtgaaccgttatagccagtagaaataattcgtccattcttttcaattactgcgccgactttccacgagcagcattttgactcttgagatacgagatacgcaatttgtagtactgtcgacgctttcatttaaatcaccagataagttgtgttatttgttttaaccaattttaactcgtcggtaggagaagcaaaactctctactcgagaagtacgaatgcctgtaccatctggaaacggatggtttcctcgttcaagaacatcggaaaagacatagccataaagaggttggccttccttaacatcaacgttactgtacaaaatagcatcatattcttcgcgtggaattgaccaaacaccttggtcagaaccaataacagcattaattagacgaataccattttggctaatttctgctttaatgccacgagcatgttcaattaaaagagcttctacagcctcacgtaaagtcattagatatgtcctaaaatgttagtcatttcaacttggcctgttccggttaaagccaattgagtgtgttgattgctctttccattattaactgtaatgatataagcatcaacatagttaaaggatgactctcgtcggagagtcactttacttccaggaacccggtttgctacttcctgtgcgaagattttaaccttcgaaataaattcatcatgtgaaaatttagcgtcagacaacataagtcataacctgttgggtttcaaaattagcaataattccaacgataaaccaatcatgttcaccttcgccacaagaaattttaacttcagatgaaccgcctgaccggtcaatagaaaatttaataacttcgccgtttggaataagtgcattcatggcagataaaaactctgcatgcattttggctacttcagatggagtaaactcatctgttaaatgattagcaacaacttgcgtaaatgatacttttactacttcggaatactttggaaacattatactttcctctaaaaatcaccgtgggctacttgccagcattcaacaccaatacgacgccacatttcaactacctgcgccctgtcatctactgcaagtttgacattataacgatcagcaattcggtcccagaagatttcttcttttaccacatcgtctttgcgtgaatcgccttgcttacgttggaagtgttcgcctgtttcgccaacatggtccaacagccatttcttcgtaatgcgttgataaacagtagggtcttctttagtaccagactctctgccggaaacagtaagaattttatatcctttgttacgaagcattttaagaaattcaattaccatttcctttggatggtctttaccgcatttggccaagtcataaggagaacgatgattgttatctgctaacgtgccgtcaaggtcaaagataactgcttttggcagtgattcgtctggaatgtacaaatcatatgggtgcatcttagaatagaagctacgaagcacttcaataggaactgcattcgcgccacgatagaggttacgattaagcaattcagtccaaggaacgtcaaagcgtttaatttcccacttgacaccatcaatttcatatgccaactcttgccacttcttgatagtcgttggattaaggttagtatcagcaatgatgacacctttagtggtttccatctcgagtagagtcttcgccatagaaaactgacatacagatacggacttctcacgaagcttagaatatttgtaatcattacgtttatcaaggccaaagatgccttcacgcaaatcatcacgagacaaaacataccaaccaggattagctgctacgtattcgttagcccaggttgttttaccagagcctggagccccttgtgtcaaaaccaattttttcattatacatccttaagagtgtcaataaaatcatgaagagccttagacttttcaccccaattagcacgatatttttctttaattgcttgcaatggcttattcattgacagtatatcatttttgtcataattttcagccgcgcgtccaaacacgatgcacgctaattcattttcagcaattaaccctttaagtgtttcatactgctctcggttcattataataccatcacttaacacaacgaggttctttaaggtcagaacgataataacatatcattccgttagcatctttagtataacgtaaaatgtcattcatccagatgcgatactcttgcgactcttcaaatggcataccaacccaggctttaccgtcaattacttttacttcccaatgtccttcccatttttgaattgggtctggccactcaggatgcaaaaccgggacatccggtgcactagaagagcatccagcaagtaagctgataatacccatggctaatagacttcgtttcatctggtagcctcctggatatcttctgcaaacttattgaagcttgcattaatctgtttttcaactaacccaggtttagctgcaactacgtttccacgcttagaatctttattcattttagcgttggaagtatcacgcgccgctcgattttcctgatagcctttatatgttgtctgcagattttttatagaaacaccgatattttctatttcttttgcttggcgatcagattcgtcttggacgactttgaggtcagctttaagattttctacccgccaggaaagatatttcaatcctccagcggataatgctaacactccaatcatcaaccaagttgtgtttattttgagcatagtttaaggataacctctacgatatcatcacgggataatcccgaaatgaggatgtgacgatcagaactttccgaaggagaacacttgaagcaagcttctacgtattctgccatttcagaataattcagctcgcgatgcataatgccaagacgatgcttgccataaatcgggtcaacgattacataacatttgcatccgttagcatgaacgtttggctgggtgatgttcttgaacacctctgcaccatacttcgcgagatgattatctaggaaatcaatcatttcatctacggcttcaggcaaagcttcggcacgctgctcgttcacacgattagtgtactctttttgcttcttacgagcagcttccttgcgcgccatgtgcgtccgtaggtcagtgacaaatcccactttcttggtaccattccacacaaaaatcccatcagaatgagtaccatatttgttaacaaccatatctaaagtaattgcttgcatatccatttcaatatcctcatcagttgatataagtctatagtatcacactctgatgaggatgtaaacaactattcttcagaaatttcaatttctttttcgtactcttttggaacatatcctgcccagtacttcaagaacaccctttcgaggtctttaagcagtttatctacatctacagttccttcgtacatgttcatgataacaccaaaaagatgacgctgattaaccgttgctttctgagcagcaatagcgtagtctttacgagcacggcctctgtactcatcataaaatgactggcatagttcaagtgactttccgaggtaatctagataagcttgctcaaacgcagaaattttcttaattgcgtattcatctccagcaaaaagagaacgcaagtcatcagagtttgcagatacaacagacgcaaacaatctttcatttgacgttattgagtctttagtgtgatgaagagccgagtaccattctgttttaaccttaaatcgctgcccagtgtttagaactgcaatgtatccttctacgccttcaagcgcacgaactccttcaacccaggtagtagggtcagaaattccgtaagcattaattaaataaggacgaatcttagcattagcgtacaaatcatcatatttaatatactcaccagttgtgttattacggacgtttaacacaaacagctgtggctcctgatatgctaaaacaacacgattattaggtgaaacaaattccatgtttaccgtataaccatctagcgctagctcaagaataacctgatgaagcgaagaatattcttcactgttaagcaaagctgaagcttgtcttgcctggtcactgtagagagatgtttttgacttaaggtatagatacccatcatcaacataagatgacactagagagccatcagccttatccataatgtattctacatcgctaatatcaattcccatcgtcattgggttttcattcaagttaaagaatttttccattggacgagaagcaattcgaattggagtatcaccatccatttcaaacatgatgccccggcactcaagagcatctggttttaaccactcactgtagcttgcgtagtgatatgaaaacactctgaacttgccatccataggaccagtaaaatctttataaaagaattttgcaacttctgagctttcacacagattcattaaatttttatatagctctaacatttctttaccttatgttgtgtgttccatggaggattgaactttttaataaacatcggttcttccaagtccatagtggatattgacatctcgccaagttcattattaatcaaaagattaaaacactgacgagcatagaactctacttttttgccagccattagtgcttcaaaaatcttggcagatttagccgaatcagaggtttggtctttccgattaatagcagttctataataatttatacgtttacgaagatttttagtcttaccaatgtaaactagttcatcatcaactgcgatggcataaactacattcaacttgtttgctatcaaaattggtttgatggtaaaatctggttctaactcaagttgaacatattttataaaagaaaactcgttagcaatatcattcataataaagaggggccgaagcccctttccttataagtactttttaaatccaattagaacatcatcagtgacatcattgtcaatctgagctaccagataagaacttatctcaacttcctgaggagcagattggactgcatcagagttaagatattcacgaatccaaggaataggatgtcgagttggtgcatcagtaataggacaaggaagaccacaactacgcatgcgagatacagtcagatagtcaatgaagtcatgaagaattttaacgttcagtcccggaagaccaccgttgcggaaaagatggatagcccaatctttttcttggcggttaacttccatgaagattttaattgcttcttgttcacactctttagcaatctcaacccattcttcgccatcagtgccagtttgaagttgacgcagaatgtactgtgtgcccttcaaatgaagttgttcatcacgagcaatgaacttcatgattttagcattaccttccatgatttccatatttttatggaagttgaaggtacatgcaaaactaacatagaaacgaatagcttctaatgcgttaataacatgtaagcaaagataaagagatttcattaaatcacgtttagcttctttaatttcgatattatcttgattaaagcagcgatttttggcattttcccatgcgcgagtcttcgctataacatcatcatagtaaacaccgattgactcagcgcgtttcatgattgcttcgtcaagaacgatttcatcaaagattttagctgggtctacatataggttacgcatgatatgcgtgtacgaacggctgtgaatagtttcactgaacgtccaagtctggttccaagtatctaggcttgggtcagaaataagtgcagataaaactgctgctggagctcgtccttgaattgaatcaagaagagattggtacttcaagttatcagtgaagatattacgctgatgttctgggagtttttcaaactgaccacggtccatcataacgttaacttcttcaggacgccaaaagaaactcaattgcttctcaatgagttcctcgaatactttatgacgctgaatatcatagcgtgcaattcctagaccagaaccaaagaacatcggttcggtcatgatatctacttgcttggtattaaaaactgtactcattctatttcctattctgtggtgttaaccatccgtggtctaattataattcccttttattaaagcttacaggccgcgcagtcagcagagtcttgaatcatatcatcgttaccggaaccgtcacgggtgttatgatagtaaagagtcttaccaccaaagtaccagaaataaagcaagtcgtccatcattaccgacatttcaacttttcctttagggaaattcgccgggtcgtaataagtattagcagagatgctttggtctacaaatttctgcataatcagaacctggttcagataaggcttattaccctgtttcgcgagctgccaggcataatcataaagggaagcattgtgttcaacatttggaacgacttggttgaagcttccttcttttgattctttaactgacactggtccacgtggtggttcaatgccgttggtagagtttgatacctggctagacgattcgcatggcataagtgcagataacgttgaatttcggatgccgtatcgcttgaggtcttctcgcaggagttcccagtcacagacatagtttggagctgcgagttggtcaattctttcgttgtaccagtcaataggcagttcaccacgtccgtatcgtgtttctttgtaaagcgtgcatggacctttttcgctagcaagtttaacagaggctttgatgagtgcatattgaatacgttccatcatttcgtgagtaatatcattagcatctgcgtatgaagcaaagttgcttgctaaccaagctgcatagttagtaatgccaacacctagtgctcgacggtctttagcttttaacgctttgtctacaggatagtcttggtaatccaaaaggttatccaaagcccttaccattacttctgcgatttcgttaacttcttcttggtcttgccagttgaagttgtcgagtacgaatgctgcgagtgtgcatagcgcgatttcgccatcttcttggccaacatccgaagttggtaacgcaatttcgaggcagaggtttgattgcttaaccgtagccacatcacgaataaaaggaccatattcaccaacgttatctaccatgtacgggtaaattcgagcagtaccagcacgttcagtaaggaacaactcaaacagttcacgagctttaatacgtttctttcttatatctgggttcttttccagttcttcatataatgtacggaacgcttgagcatcacggaagtattctgtgtacagcacgccaagacatacatcgggactaaacagagtgatgtaatcattcttaatcaaacgttcaatcatcaggttattaatctgaacaccataatctaaatgacgaatacggttttcatctacacctttgttgttcttaagtacgaggaggttttcaacttccaagtgccagattggatagtacagtgtcgccgcgccaccacggactccaccttgggagcaggatttaactgctgtttggaagtgtttccagaaaggaataactccagtatgtttgacttcaccgaatccaatttttgaaccctctgcgcgaatcattccagcattaataccaatacctgcacgcttactgatgtattttgtaattgacgcagcagcttcattaattgaattaagactgtcaccgccttcaataaccacacatgaactaaactggcgtgtcggagtacgaacaccagacataattggagttggcaatgaaatctttttagtagaaactgcatcatagaaacgaataacgtttgctaaacgattttcgccatcatcttggtgcaagcacataccgatcaacataaaggcaaactgcggtgtttcatacaattcaccagtgtgacggtcttttacgagatacttctcgataagctgcattgttcctgcgtaagtcatagtgaaatcacgctcatgcttaatataagaatcaagcaaagcaatttcttctgctgaccatttactcagaatttctttatcatacttatttgcattaacacaccgggaaatgtggtcaataaaggcaggtggttcaaactgcccataaacacgtttacggatttcaaacatagctgcattagaagccacatattggtaatccggttcatcaatagaaatgctattcgccgctaccttaacgatagtcttttggatatctgcagtgctcatgccatcacgtagatgggatttaataatttcatataactcgtatgggtctacttttgttccttcgcatgcccattcgaggactttaatgattttctgcatgtcaaattcttgactaacgcctgagctcttaattacttgcataagtcctctaattcaaatgtatctttaaaaagtttattcactacaagagctattatatcaccatggcaaggaagcggtttgcaggtgcatcctaatctcattcctcttaaagtttctaagtgctctcgctttatttctccgttccgaatcttagcaataaaatcgtccttaaacgcagcaatagcatcaggacgattatcgcaatctttaccgacgtaatttccccacattgttcctcgttggatatttacatcgaagtcggaatggtatttattaaccacccgacatatcttcatgttatatcaacttcaaaccaacagattaattgtgttttgcctatagaccattcatatgatttaacaatagacagaaccctttgttcgatcccgtcaaaaactatcttgtcattaacttcaggcaaatcgctagagaatgcatcacacatctcgcctaatattgtttgtcctttacgaataaatcgaatattcatacagccattttccccttaattgttgggtgagattcatatccaactaattcaaagtggtgtggacgtgcaaactgctctaaccaacgaacctgagaaccagtctgccatgtttcatacgtatccggaaatgctattttaagttcgcataactctttaggttctcggcggagaatttctttgcattgctcaatgtgattcatgtaaatgtgagtattaccaccagtgaataccaaatgaccaggtttaagattggtcattttagcaataacatgaatcaatgcagcatacgaagcaatgttaaatggaagacccaagaacacatcaacagaacgctgataccactgaaggtctaaatatccattgcgaacgttgaactgatacatcatatgacacggtggcaatgccatccggttcaaatcaattgggttccaagcagtcacaatctgacgacgatcagttggcaattgcttaatacggtcaataaccaatttcaattggtcaacacccatgaaatctcgccactgtttgccatacacagggcctagttcaccaccagaatatcccatgtcttttgcctggttttcatagttgtcgtcccagacagttttaccttctagcaatgaaccatgctgaataagacgcaattcatgaacattagtagaaccacgcaagaaccaaatcagctctgcaatgcatgctttccatgcaagacgcttagtagttacagcaggaaatcctttttgtaaatcaaaccgaagctgggtaccaaactttgcgatagtaccggtaccagtacggtcatcagtctcgtatccattttcaaaaatatctttaattaattcttggtattcacgcattaaatttttcctgaagaggtgtaaagaaaagctggtctccacgcttttcaaatcgtccaataatagacactacatcatctttgaccatcacattgccatgtgacattccgatgaacatcttcttataatcacgttcaatttcaataggtatatttccacttcggttatatactgtagttgaaccgttataagtgctaagaccattataactgaaaactagaagatgaataccatgcttaaatggaaatcttttccacctcttttggactttgtcttctgatagctgagtgatatcatagtttgcgctcatagaccacctctgaaatgttagtcacttcatcaatatgataccagtgattttctttagtaatgaatcctgattctggccaagtaggagccaccacaaacgcaataggcagagtgacatcagaattcactctatgactttttctgatgattgtttggataaccttatctgcgtatggatatgccttctggatgattccggcaccacctatgatagaataattaaggtctctattaaaagtgatagtactgttgtaagaagtatgagcggccataatgtcaccacccaagaaaccgataaattcttcttcactaacatacgcgtcagcaaaaaatccgtttttagcagttgccaacgcacgactcatgtcttggacaacgattgtcttacgaccaggaagaggtttaggaaaactcatgaaagtctttgctccgcaaatcaagatagtatctcgagtacgattagcaaagtttttcatatcctgggaaatatgtttccaaggaagaccatcgcctaaaccaaaagcattttcgtttttgccatctacagtttttgtaggagcaaaggcataaactatttgaatcatttaaacctcagcaaaattcaactcgttcaacactgccgtcttcccacttctgttgaagctcttgaaggcgtttaattgcactgtcgacattggacattgcgcagatagttacccattcacggccgtcccaccaaatcaaatcatcgtaatcatctactgcgaaattttccattaaccttgcctcattccacacttaaaacaccggccacctaattgccataggctaccaccacagtacttacaatcccagtcagttaaaatccacatgacttgtacccactagctttaatcatgctctgaagagttttaaatccttcttttatggcttctgaaatttcctcaaatacttcctttttcagaatgtacaacgaacccgcttgattgccagaaagagctgaaataatcacctggtcattaattaaaaactcgccatatgctgaatcaattttacctgaaatttgattgcctcgggaatgagggtcaaatacgagctcaatatgagttactccagggatttcatcaaattggcaacgaatgttaacacgtggatatccaattacactaattttaggcatataaaaataatcctaatataataccgctaataaaagcggcagtaacagaaattaacaaaactactaattcagcctcaatcatttcttggccttagcgagtttaaatgcttttttgaattcttcaacatcttcaacgggaatccagaagcctgagccatacccatcttcatagcatgggcagttatcacagtaatcattccaatagacagtttcaccacccatagtgaatggagcttccatttggcacagtacttcttcaacacgctctaattcttctgggtttttatcgcaaatgcagaaattccatttaccacgatattcagaaccaagtttgatgctttgacgttgaagtttcatttttattctccagtagattatggagctatactatcacaagcatagctccttgtaaactactttttgaaaacttttttgatcaagtcaatcatttcttctgcattttctggggtaacgatcaagtccaagcgagtaggaccaggttggattgcactaccaatttcatatactggttcgaagtatttgaattcataatcagatatttcaaagtatgcatctccaaatccttcagcgtcagcagttgttccatctttaaattttacttctgtgatgaaactattatcttcgtcgagcattttagtaggaaagaacgaaccaccatgttcttcaatcatcaagcgcatccggcgatttccgctagatgaaaggtcccactcggcagcaagacttgggataatgcgatattctgtgttcagtttcataatttacccactgaaagtagttaatgtatcttcacggcattcatcatccatgccagggaaatattcttgttcaagccataaccatagggtaggagtatcaccttctacggtaatttcatttcctccccaaggcgcaggcttattatcaatttcagttagaccatatttttcaatgatttctttgaaaaattcataatcataaatttctacagtaacttgtgccattatcttttcctcaaagtagggacccgaaggtcccgatgataattactcttcccagtcttccatcatccaatcaatatcttcccattcatttgcttctaaccaagcacgaactgcttctttagaaccgcggaggtcaatatttggccaaccgccaccagggccttctttgataactaaatcaaaatcaataccatggtcagtgtcataaaaacgtgaaccatcttcaaacagaaggtcaatacaaacgttattgttaaagactggagttgctacgatatcaatgtttaatttacccatgatgttttcctctactcgttttgtttcgatgtagatatagtatcactcatcaactggcttgtaaacaattttgtgaaaatattttttggagggataaagaaaaagggacccgaaggtccctttatattagaggtcgttcagaatatcattcagatcgtcatcgccaacactgtcaccagcatcgcccatgatatcgtctgcggaacgagaagaggtcggtttggattcaaaatcagacaggtctttgtcaaaggaatccaggtcatcaccaattttatcggcttgagctgctgctttcgccgcggcaccaccaagagctgctgtacccataatctgtttaaatttggcttcgttaacttcaaacgatttaaactgagatggagcaacaatttcgctgaggtcagccatattttcggtcaggaatttctgagtttcttcatcattgatgtttgcaatctcggactgaccaaggaatttacattcatcatagttctggaaaccaccgactttcttaactttcatgacgaagtttgcaccttcatacacacaagttacatcaaccggagtttcacccatatcaacatcgacttcaaccatcgcgttgattttgtccataattttctgaccgaaacggaatttgaatactttaccttcgttttctgggttagccgggtctttaataaccaggatgttagaccagaaagaggttttacgtttcagaagcttatattcagccgggttgctgttataagaatcatttttactcagatgagcacaaaccgggcaagaatcaaaatcaccgtgagtagaagtacaattttcgatgtaccatttaccgccgtgtttgaaaccgtgattgattagttttacaaacggcagagagttttcatctttaccaggcaggaagcgaattactgcttgaccgttaccagcattatcggtcttcagtttccattcgtttttatcttcattagagaaagaagaaccacctttcagaccggccagttgctgttgaagttgagcaggattttttcttttgaacatgatttattttaccttgattttatttagacagttgtttgtgtgacgcgctattgcatttacagaaatacttttcccgcacactggacagttttttctgggcattgttttacctttcatgccacaaggatgaggttgtgtttgatgtcgtttcttagcaccatcactccaagtttttagaacttgtttacctcttgtattatttattctatcaccattttcataatagcgatgcaatccatttgaaattaatttcttatgctcttctgtctttggaacatctgttaagagttctgatattcttttacaatgatgttcagaatttttctttccaaatctaggagcattttcaccagaaccaccaaatttaccggaagcagtagataaattataaaacagttctgatttagcaacatcataatgtttatgataaaattcttcttcgtcaagagcgttatcacatacatgtagtattttaacatcgggtttttgaagcgaaattgcgttcaaaaatctttcttgttcacatgacgaccaatactcaatatttctgttgtcaaaaataacaccattgacaaaagtgcaatcatgttttgacccaatgtaataataaggtggagttttattctttaccctatcagtaaaggtaaaccaatatacgatattcattggataattatatactaatttctttacaagatttgattatgctaataaagagtttcttagcttcagcaccgtcaacgtttaaaagttttttataagcttttaatttagtagagtaattactccaaactaagttatccgttgcagtatcatgtgtatttattatatctaaaaacgagtcaagcatgatgaatgtctcgaaagatataacgtttgactgcagaagtttgaacacataagatgttccgactttctcattatattcaaaaatatcatgaagcttatctacattaactttcttagcaaagtagtaaatgttctttacatcttccgagaacgttgttttaatctgcttcaatttacctatatattcacgataaaacacgagggcatcagcatcactaatatcgccaatccatgcatcttggttagctacgaggttactcatgaatatcagtgttaactcttttaatgtatatttctcagcgagtttctcaaagaaatatttgtctctacgcttttgataagctttatcagagacccgcataacccagttatacttaacaacgtcatatcgaccggcaaagtgttgtttgagcattaaatataaaagataaacgctcttaccgttaacgtatctgttattatttccaggcatgcggagacgaatcataataaaaaatccagactattcgttttgtgtgtttgactaaatgatggacgaagcatattttcttccaatgcttctgacataattttttctatgattgcaggtggaatatatctattgaagtttccctcaggaatagaattttcttctaaccactgggttgttgcttcaagatatcccattccaagttctgttaccatagactcaatagtaaatccgttagcttgcttatctaacagctgattaatggattcagagggggaggtatccccctcgtctttaagcgaaaatagagtcataagcttctaccacttcatctttttcagtttcaaaacgatcgcgtgtgcctttatggaacagagcaagcagttgattaaacagtttgccttctacgccaagttctttcttggcgcggtctttaatgtctttgttaagttcaagatagctttctgctttcaacttattacctgaggcttccttaatcatatctcgcagagcctgtccatgtaccgcttcatcaaatactacttgctctttttctttcttagccattatattcaccttaaaagttgttaatttctttcattaatttagacagaccggatttaacaaagtagctataaattttaccacgacccggtagttgatagttattataacaatctaaaatgttagcaacaatgtcttcgcggatgtaatcaaaatcgattaacacacggttttctaagaaacgcttatactgttcttcagtaagcaaatctttaatgttttcgccagcatcaagacattcttcaacaaatgtcattttcgttgaaggagtacgctcaccatcaacatgggtgtaccaaaaatctgaacgaactttaatagaagcgacgttatctttcttgtcacctttaataattttaaccatgcaatctaaagcaggagagccggttttagatttcactaatttcttctgcattggtgaccattgcttaacattaggatacttatgcaattgagtaaagtcaccatcagaagaaacaatcataacaggatgaccttcgagactgaactttttggtcagtacagcaatactatcatcggcttcagctttatcaatatcaatgacgtaataaggcatatactgcttaaattcatcaattacagtacgaagaccttcaaagtaaccttcccagtcccaattggattcttcacgggctttagcacggttctttttataataatatgctacatcccggcgccagtatccgttgattgcattatcaacacaaatgacaatttttgtgtatccatctttcttccacttaaaagcattaaattttaaagtagaaagaataagatgacgaaccataggagtggttagtttatcgccttctttatacgtatgaagaattgtcgccattgcgatttgcgacaagtcaatcagaatgacaccttcttttacttggtcttcttcggcgaataagcaatttaaatcagacatttgaacctcgttcaattagttagtacagccattataaatacttctataatgaagcataaccccataggagactctatgagcgatttactgaaacaacatttccgtgcaacgaacggcttggacgcaggcggaaataaagttataaatgtggcactagctgaccgcaacgttaaaaccgacggcgtctccgtcgagtacgttattcaagaaaacactatccaaaaatatgacccgacacgtgggtatctcactgattttgctgtgacttatggacgtcgtatctggattgcaaataaagatattccaaagcctgctggagattttaaccaggcgaattggacttctttacgtgttgacccgaactggatttataccgtccgtaaaggagagtttgaaattcaatctggtcagttcatcaacgttgactctaacgctgcaggtaatgctacattactgcttccgttagcaccagatgaaggcgataccatcgtagttcgtgatattggcggccgtcctggctataacggaatcttaattaaagcacaagatactggtgcatctatcgtatttggtgaatcgcgtctgcgtgaggtaagacttacacgtccgtattcacaaattatgcttacgtttagtaatggtgcatggcgtgcaagtttaaccgattttggcgatactgctaaaatggtagttccgaacgggattgttccgacgcaagttcaggcaggtgataacgtagttcgtcgttatacttccaactcagagatttttattactctgccgttgttcgctaattcaaacgatatcatcaattttactgaccttgacggtacatcgccaattaaccatatgactgtgcgtacgtttgacccaactatctcaattgggactcctggacaaacagaggttcaagtacgtacttcaggtaatgggtttttggtatatgactcgattgacaaaatctggcgtatttttgaaaatgatttacgcacccgagtaagaataattacttctgacgttactttaatgcctaatgagcatatttctgtatttggcgcagataacaataccgttaaaacaattaacgttactttgcctacagacgtagctgttggggatactgtcaaaatcgcaatgaattatatgcgtaaaggacagactgtagtaattaaagcttctgatggtgataccatcgcgagtaatttgaatttactgcaatttccaaaacgttcagagtatccacctgatgcagcatgggtgcaatcaagctcgattacctttaacggaaccacgtcatatgttccagtacttgaacttgcttatattgaagaaaaagcaactggaaaaagttattggattgtaactgaatctgaccctaccgtagaacgtgttgatgctaaagacaatactaccagagcacgattaggtgttattgctcttgctacacaggctcaagctaatgcggagtcaaacccagaaaaagaattagcaattacgccagaaaccttaaacggacgtcgttctactgaaacccaaactggtatagcaagaattgcaacttccagcgaagttaatcagtcaacaactgcttcttacttggataatgtaatcgttactcctaaaaagcttaacgaaagagctgctactgaaactcgtagaggtttagcagagattgcgactaatgctaaaatggacgcaggtgaagacgattttacaattgttactcctaagaagttgctttatcgcactacatcggattcacggttaggtgttattcaattagtaaaaactggcggtgctcctaacacaactgctgaccgttcttctcttggcaccggtatattcgatcattctgattacaaaaatgcagttactccaaaaactcttcgtgagtataaagctactgtaaatcagtcaggaatagtttggttagcaagtgatagtgaagttagaaacggaactccttctgcttcaaatattcctacggttgttacaccggaagctttgcataaaaaagttgctactgatggagaaattggattaatccaaatagcttcacagacagaagttaatgctggcggagtgactaataaagcagttacacctaaaacattaaatgaccgtacagcaactaacgatcgtactggtattgctcgcttcgcgacacctggtgcccagggtgaatttgaagctggtacttcgagtacattaatggtaaaccctaaattactgttcgataaatttgctaatactgatcgtatccaagttaatactggttctggcttaactattactgggaacctctgggaccattataccatcaacatacaggaagcaagtacttctcaaagaggtacaaccactcttgctactgctgctgaggttagagctggaactgatgctaagaaaatagttactgctgccacgctacatgctaaaacagcaactgaaggagatattggtctcgctcagtatgctacacagtcacaagttgatgcaggcgcattaagcgatagaattgttcctcctgcttacttgaaacagactattcaggtaacagagtcatggcaagctacagacagcgttagagggaccgtgaggctatctacaggcgatggaacgtggaaaggtaatgataccgatggctcaactcttccggataacgggtatgactctaagggcgtcgcagtgtctccatatgaattgaacctcacgttgaaacattacttacctcgtcttggtaaagcctatgacaccggaatgctaggtggtcaaaccccagacaaatatgctcgtcgcgatatagcgcagactatttctggagcttggtcatttagtcaagacacttcatttagcaataatatttctgtccagaatattatatatgctaatggtggtgaagttaaaatttcaccaactgctgacaccggaaacgtgcatgttcgttttcaaaatagagatggaagcgagcgtggtataatttatgctgagccgcaaactgcttcagctggaactttaaaaattcgtgtcaaaaacggaacaggaactactgctgcaagccagacctacacatttggtggaaacggtacactagatgctcctaatgaagtatcaactaaaactctgaggtcttctggaaatgcaatagttggcggaactgttatggttaaggacgttcagatgcttgctgtcgagggattgaattcaatattcggcgcccaatcacagtccgcatttatttgttcccgtgacgctgatacacaaatttttgcacaggattcaactggatcgtatccaattttaactaccaaaaactatgcaagactagctgatggccgttatgttaataaagctggcgataccatgactggtaatcttaacttaagcggttctgctatcgtcattacaggttctgaatcatggtatgttccaacgaatgaaactgtactgagacaaggttcttggaccgctgaaattaaagacgctactaaactaaaaggtcttcgcggttatatggttccaatcagaacaccgattgaccctgctaacccaagcactttagtagtgaccggatatgaagaaaaaactgcagctggtggtgttttaactcaggttggtgtaactacaaacaatacttatcaactttggacgccttatcctccgacaaccgaaactgccgataagcgtttcgcgcatactgtgtggatgaggatttataatccaaaccttaataagtttgatgattggatgcgagtgttcacgtctgctactcctccgactgcagctgatattggtgctccgagctcagtatcaactcaggttaaaacccttgaagtcctggaatggattaagcttggcccagttaaaatctggccagaccgtccaaaccaaactctcaaatttgaatgggtaggtgattaatggctgaaccaattttaatggcagcctttggcgaggatttcgtggaaacacgaatcctctctgaggcaaactctgtgaagtattggctaaaagcttatgctacgcattctaatgctgttcctaataagccagaattgaatattaatggtgcctttgatatgacctcctccttacggagggggattaatgttgttcaagttaatggtgacagttttattaactttaaaacttttgatgttaccactgatgataacaacgctaataacaaagcgtttgtagaatatgcaaatggattaacttcaggattgtatattataatgacacatgaacgatttcaatccagcccgttaatagacagatggtttaaaaacaagtggtctgcttcttggccaggttctgacttttccaaatcatttccaaactctgcctatgttggagtgctcggagcagcaaaaggacgtatattaattgagtcattttacggaaatgatggtgtagttaaagaagattccagagctaaagtagatactgtatatgataacgttggcgatgtaggatatacaggctgcccttatcgttccattgaagacactaatgagtactcggattctactggatatgaatataagcgatatccagttcaaaatgaatctataagcaaaatcgctgattatggattatctcccggggattcggtgtttttagtgtgtgatatgtatgcatctaaaagccttcttgacgctggttctactactagggctaacttgagatggttcaaaggtacatctttattatcttcaagcgtatcattagaaattccacaaaatggagctgatagatggctaagatttgaaagatttaccgctgttcctacagacgctgatggatttactattgtggtatcacgatatccaaaaacgtccgtagttggtgattctaaaatcaaaaaccttgtatttgttcaaaccgcacacagcgaaaaacttaacagtgttgttcaagaatttggcgtgaatggcgtaagaatgaataaaggcgttgaaggaggaaccactatgattatggaacttccaaattcaaaagtcgatccgagcggtgttattccagttcaatcgttcagagaaacatcagactaaggaagcctttgggcttccttttttcgtataaatagaaaatatataagaggataaactatggccgatttaaaagcaggttcaacagttggtggaaatcctatttggcacgcaggtacttttcctcttgtgccggcaggaaactccctaacttatagaggtgtaaaggtttatactgagatagataaacctcaagcaaatgataatgatttcgtatctaaagctaatggtggcacaggttctcaaggtttccaaaaggaagtcgaatttaaagaaggcgtaaaagtttctgcgaccttcagtggcggcaacagtttaaacgggctttattctggtaatggagactcagcatctctaacaacagcgaacattgacattgtttcatggtacggtgtcggtattcgtacttcactggagggtagagaacggacagtagtttggaacgctagaaccggggaccaaataaacaaaggaagtataacagcttctattcttagttctaataatgctcctacagccgctcagcatttaacgcgtaaagattatgtcgatggacgaataaatactgttagcaacgtagctaacgcagcagttagaaaagccggcgataccatgacaggtgtacttagagccgaagctggcgtagttatagtaaacacagcaacatccggtgaatatgctcctagattagatcaggttatttcacgcggggtaacaatagattttggcacatactaagaggtagccatggccgatcaaaacttaaaacaaatacaatttaaaagaactagcacagagaataaagcaccaggtgcagatatcgtagcccgtggcgaaatcgctttgaatacacatgggcgtactcttgccatttatactaaagatgaaaatgatgccgtagtacagctcgccggtaaaggggttcctttcttagatacatctggaactcttagcgttgatggaactactacattaaaagacaacgttactatttctccgaataaagcgatcagttttgaaactactgatttgagtggtgaaataactcgtcatatcgttggcaaatgtgctactaatgatggctggtacattggtgccggtggtacaagcaataacgggattcttgaaatcggtactattgatgatggcgttgaaactattcaattcgtacagcgcggagctggcaacgtcgaagcccgaaaacttgtcttacttgatggttctggtaatactactcttcctggcgatttaagattatctaccaataaagccattaaaatttacaatggaagcactagcgtccttgaaatgggcgtaggagctaatgatgtctatattaaaaaccaaaaaggcacaggtgttcttcaattaaccaatgatagtaatctgtcgttcagaaattatcaggtttattacgccatgaacggaagaggtcctggtaaatccggcactcttctgacgaatgtagaaaacaaccgtcaggcatggcaatacgtaatttctgctgcaactgcgtcaactgctcgctgggtaaaagtagctacaataaagcatccaggaatgggttcttcgcaactggatttaatgattagcggtggtattgattctgagcacgatagacattacgttgattttatcacgttatcaggacgaaatttaacatcatggagcaccaacaatttagataaatgggttgaatggcgccgaattggttctccgtctaaaacaaacgttccagagtattacgttgttaaaaatgatgctgctacagattcagaggcttcatttgatttttatgctaaagttcctcgttatggcaatggcctttatgttacagtgctaaacacatctggatacaacggccaagattcaggtacagtaattatctatgaaaccaatcaggacactggtgatactggaccgtccggaagtattcttgtttcaatgaaacagatttttgatagtttagcaaaaccagatttcggtgataccacaggtactcttccggttaaccgtggtggtacaggtgctactaacgtaggagacgctcgaaataacctgggtcttagaactgcggctgttcgtgatgtcggtgaatccagtggaaacgtgatggaagttggtgccttcggtattggtggtcacggaaaatcacttgtagatattacttctgacgttgatttaatgactcgccttaaggctcttggcggtacaacgtttagagccaacgtagcgagtggttataccggggctccttattattcacatggcgcaggtttcttttctagaactggcgatacaatgtctgcgcttaatatagattacgcaactggtaatgtcagagtatttgctataaacgatagcggtttagcaagtggaagagtgaatgctaatgttctttacggaactgcaaataaaccatctaaagctgacgttggacttgataatctgacaaacgatacccaagttaagaaagccggcgacaccatgacaggcgatttaactgctcctaacttccacgcttctgggccgggaactgcatcagtatatgttaatgctggaaccggaaatgctcatgtatggtttagaaccgatggtaatgaacgcggcgtaatctgggcaactccgaatactacggatttaggtcagattaatattagtgcaaaaaccacagctggtgtttctgctggtgattttagcttccgttctgatggccgccttgatgttcctgtagcagttaaaattggtggagcagcaatgctaaccaaagacgggaacatcacctccggttcaatgtttggtggtaaccttaacaactatttgacttctattaaaaatgatatcaccactggcgatagtaagcaagtaagcaagactggtgataccatgaccggtaacttgactattaacgctaacttaaaagtcgaaaatcccaatggaacgatggttgatttaggttcagagaactcggacaagtacagtagattaacccttgctcgtaaagttggtagcggtgctaccgtagcaatgcttaaaattactcctgaaggatacgtgcaatttggttatcaaactgcggtttctaatccagctcctagtaaatatattctagttaaatctagcggccttgaggtagaaggggacttggtttttaaccagacatatcgtggtgctgaagacgcagttgatattactgataagactgttgaccttaatggtcttgtcattaaaggaaccgacccaggtactcgtcagatgtataaatgcttctcatatggtggtggttctaatatatcgaacaaacctacctctgacagcaactttgttcttgaagttctatctttgcgtaaaatttctgatactgattggacttgtaagcagacctttactacaaaaggtaatgttgaaggtacatatgttcgatactgccaaaacggcacatggtctgcatggaaagaggttgttgcaggggttcagccaattaatttaggtggtactggtgcaacttctgtagctgccgctcgtaataacctcggtgttggtgaatggcaatctgtggcatttggtgtattgaatgtcaacggcgttagtaatgcagacccggccatcacatttaaaaatggggctatggttcgtgaagcccaaggtggtagtctcggcgcgttaatcctgtcggcttctactgcatctccagacggcgcgaaatatattgcttttcgacccttcggtgattcgtctggtactgagattagagtaaaagccaacgggtcaagtgagtcactacttgaatggtcttatggcccaggtattcgttcaaattcatctggcgcttttgttatctacgcaaaaacaggtcaggcactccatttaagaccgaacggtgacagctcgaaccaagctacagttatcgatcagaacggtaaaatgacagtcggcggtgagttcgaggcgcagaactcgaaaatcacaggtaacttgaacgtctctgaagataacaggatgatcgttcttggcaaaaactccgatattggtttagtcaagaaaagtggtatgccaggaaaaatggctattagtaaatctaactcgtttactgttatggtatcaaccaataccaataaccaaattaatcctgctgatacgtttaacgatatattcaaggtagatgccgacggaaaccaaaccgtttacggaaatgcccaagttaacagacaattaactgtttctagttcagctactgttgcaggtgttattaatgctaacggcggtattattgttcctactaccaagtatgtgcaaattgccgatgctcctacacagaataaccaagccaccaacaagaaatatgttgatgataaggttgcttctgctattagtaatgctggtgatacttatcttccattagcaggtggtactgtaaccggaagattaataattacaggtgatcagttaaaaactacatcgctctggactaccggagacgctgctgttaacggtgctttaactgttgacggtaatgttgttagtaattacggtattggtagctttgttggtgctgtcgatgttaaggcccctgccgcagataatggtacaacccacctttggttccgacattccaatggtggtgagcgtggtgtgatttatatgccgcgtgacaataataccatgatgggtttaagagccggtggaagtgaatggcaattacatggctctgcaggccaaatggtagggccaggcgcacggtggagaattcattctgatggtaacctacagggtgatgtttacggtggttatatcactaactatatcaacgataggtttaaccaatgtgcacagtgggttcgtactggtgctcaacaagactttggtccaattggtcgtccagcacctggtaaaactgttcctggcggttgggtgcttgttggtcttaacggtaacagtaacgaagctaaccagaatatgcaacttatcggtggacgtttacaagtatggaaaccgggcgttcaatgggttgattctgctacttgataataaggggcttcggcccctttaaacttaaaggtaaaactaatgattattaaacaaatgaaaggtattcaatggcatcacaatttcgagggcggagcttattatcgagactgcaacgacaagtgctggtattcttttagaaattctctcgataaaaattctcatatcattatagttaatgctaaaaccaacaagataattaattactataatggcgaagaccccaccatgatcgggttatttgcagataaagaaatgattttggatgtataccaacttgactattttcctgttgattcatgggatgaattcacacaaagagaatttgaatttgtagacgaacaagttgtgatgactaaagacgtacaagttcctaaagaaagaactaaagatgacattatgaaagacttgatgaagcttaaagctgaattggaatcattgcaataaatagctctgtaaggagagcaatatggcaagcaaacaatcaataccattttttgatatgtttcttgggttgctcgagctattattcaaagatggagccacgggaagagttctcttttcccgtgttttcgttgtcgtacttttagcattgttggcgtttgctggatataagtctgatagtcttattaccgcttacgtcgacagtacttatgacaagtatgataaactggttcaaaaggatagagattcccgatttgataatacagcactcgaacaactccagatagtacatatctcaagcggtgcagatttttctgcggtctttacgttcagacctaaaaacttgaactacttcgtagacttaattgcttatgaggggactttacctagcacggtagattctaaaaacctgggaggatatccaatcgacaaaacaactgctgaatatagcacgcatttatcgggtagatatttttggacggataaggaatttgttttcttaccaacaaaaagaaaaccgcctgaaatatcgtatatgtttagctgtccatatttcaatttagacaatgtttatgctggaactgttgaaatgtactggtacaattccaaacctgcattatctaacgaaagactaacatcgatatgtggtcaggcggttagagctcttggaagagctaagtgattacttattactatgcatagccattgttcgatagatagactcaaatccctcgttgtattcttcaacgagaattctcttctcttcgtcagttaactcagaaaccattttacgaaagttgctctgatttaactgacgcccctgctcgttcttgattccgatttcattcaaaaacgcaatgaattcatctcgcttctccatgatatgttcagcattgaacttagtcagaatagaagcaacagtaacaatttcttggacaatttcaaacttagtcattatttttcctacaacataatggattatgtgattatagtatcatcttgataccgcgttgtaaaccagtttatgccaattcccaacgagaattcaaatcttccttggtagtgatatactcagcaccagaggacatccagagcccgtagcgaccatcttttactctagccgttaaataccattcctttccaattggacgaaccctacgattcatccagtgacatacgtcaattgcctcttgaaaggacaagtcaatcagacttccaagcgcgattttattcattaacgcttcgagatatctttgtgattcaacgacagattctaagttatgactcatgctaaaacaacctctccgcgattacctaaaatgctttcgatatactcaactccacttataatgtcacctctatccttggcttcgtcttctctgcgtaaagcttcagtattcatagataatctccaatgtcataagcatcaacacatttctgaaattgctcaataacttcttcaggttcaacgttagcaataatagctacagtaaaggtaccattattccaatcatgtaccatccagtccccatatccggcattctgaaggtcttccattagttcagaatggatatctgctactaatccagaatggtcccctaatttcttatggagagcttctaggtcatcacaaataatagttaaagtagtacatttggaattattcagaatgcgcattgtctttacctttatgtttttgcttgcgttttgattctttggcagcacgctttttatctttatgcgcgcctcctttgttaaagtcatgtttagctactagattttgcactttcaagttccttgatgtaatagtcaatatctttaatcatttcttctgtcattactttgtacatttcagcaagaaatggtttagcaccaccattaaatggatggctaaacgggcagatgtattctttatccatgagagttttcatgaatttgctgtctgccattttaaacccggcttcattggtatatgtaccccaattattgtccatcatttctaatgagcgctgaagcgatttacgttgaatttttaaaagcgtaatgttattctttaatgtactaatcattagtataaatcctctgagaataattcattggctggtcctgatttaggacgaactgtattaacttgacctgcatgtgtagcgatgattaatgcttcttcacgcgtgaagtactcaccccattggtcaacaaatccttgattgtctccatggacatgatcagaaaccaatttgtcgcgaaacatatctaaaacgttcgccatatcaacagaatagtggcgagtgcctggaactacaattgttccaccagttttcaattcaaaacggtttgctgcacaaacgatacgacgttgaagtaatcgtccatcccaccaatcagctactttaaagcagatttctggaatttcgctatttacattacacatttgaccaacttctcgttaaaggttttaataacttcacggccatggtctgcacctttcttacagtctgcaattgtccatgcttcaccgttttggtatttgtgaagagcccgggtattaatatctttcacaagattcataatcaaatcattaatttcttgttcagtcatttaaagaatcctttaattttctgccacaaacttttcttttcacgaataccgatttgacgaataacaggttcaccctgcattttctctaaccactccattgagttaacagcttccgccaatggaacaaatttagcaagggccttttggtaattatctacatccatgatatgtttaccatctgcattgtagatagcatagcattttgcgaatttcttatcaatgtatccgataaagtgcccacggaaccatacatcccaacaatcagttggcatgttaagatttaaattaaccttttcaacacagcgctgcagttcattcaatactttaaacttgttcattacagttccttaatagagcggatgatggtttcaatattttcagcagtacgagcgatatctaagtaagtattacctgttgcagctacacggcaagacattccgaggtcagtgaagtgtttctgatgctcttcagaaatcttgtaaccgaagatacggaaagtacctttgttgttaacttcaagactacgaataccgaatgtacgtttttccagaactgcgatatagttactacggtaaactgtaagctctttcagaggcaagatatcttccatctcgctaagaatgctcatcatcaagtctttatgttcattcatgtcttcagtcagaggacgagctttgcgggtgttacgttttttcagaagttcaggcttattttcttctgcatagataactgctgctttagagatgatgtcctgtgcttcaccagtgatgattagaccgtcaccagatttctcgataagacctttcttaatcagaacaccaatgtttgagtttacagaacttgcgttcatagtttcttcaaggatttcacgcagttcagcagaagtgatgaaatcttttttagctacctgaaccagaatagcagcagttttttcgttcagagcatcttcggaagctttgatgatgtaagttactttagacattgtgattctccatgatgttttattcaatttgtttggtatgagactataataacatctgctaaccagcttgtaaaccattttattctgctctctgaaaaattcttcaaagagcagtaaaaatgttatacgttaaagatcaagaatttatcgccattttcaagcttaagcacccagaaatcatcgtatacgcaaagaacgacttggtactcttcaccatcttcatagttacttgcttgaattacctgacgcataggatactcgcgattaacttcgaactcatcgagcaccacaatgttacctttgacatagtggctcagtcgagtgccatcagcttgagtagaaatataaagaatgtttttgatatcagattttaatgatgtaatcattttgttttactccgtgttgttttgatatggctataataccacagccatgtaagcatgtaaacaactttgtgaaaataatttggggcattctaaggagggattttggagggatatagatttatatggaaggacctggagatgacctccaggttccctagattaactgaggagcaataaaactaaaccaaatacagcaattacagaacctataattaaataaaattctatcatagttcttccaggtctttcagatactcggcttcaggcgttgtcttttcccagtacttaacctcttgtgctaggcgttttgcttcctgagcaagtttcttcgcttcatcatcagtgatgtgatagatattcattgaaacgagtttttcagaatggtctttgaatagttcattctgttcaatttctttagtcaactgcttacgagttttaccttggataacgatgttacctgcaataacctctttgataaattgagcttttgcctgagcaagattaaacgcctgcttagtttcagcgattttatgctcaattcgtttggcggtgaatgtcttacggacttctacaaaatgacgaatcagctcaccggaagttttgaacttgtcattcagcttaccattctcatcaatgaccacaatgtattgactcattttctcaatgagcttaaagtccttcatgattttagcatgacgctgctcagggtcatcgctcaaagcatagtctttacggaatttcaccttaaagccaaacccggtcttagaacagtcatcatcgtatgtgatgtatcctgcatcttccaatgggtcaagtactttttcaacataagaagcacgttcaaacttatatggaatttcactgatatagattgagttccgtgaagtttctttatacacgccgtgcagctcaacagaaccgtcttctgtttggacgatttttccgttaaatttaggaaactgtacttcaggttccatcatttcaccgcgaagtgctgctttagtgcattccaaaacagattcaaaactatgcggaagaatagaagttgaataacctgttgcaataccgcgaacaccattcagaagaacagttggaattaccggaagataataagcaggtggaacatgctctttatctttatgcaccggagcgatttctgtgtctttgtagattttacggaagttgtcagaaatccggcagaaaatataacgacttgccgcagcagattgaaccaaacgagaaccgaagttaccttgtccatctaacagaggatagttgttattccatgtgtttgccatcagtgcaccagcatcttgggcagacgtttcaccatgatgatatcctaaatcagccacaccaccggcgacagacgcaagcttatggaatttttctttattaccgcgagctaaatcaagagcccgagcaataacaaaccgttgtacaggtttaaacccatcaattaagttcggaatagcgcggttttctacagtgtaaatcgcatactcttttgcttcattatcaatgatagatttcaaatcgcgatgacgaagatttgacgccttagccaaatcatcaatagaacctgcttgttttaatagagtgtcaaaaatatccattgtacctaccagattagtgagccgatttgtactataacatcggaaatgaaaagcacaatataaatcattccgtaaatcattccatagtacataactaatagaaaggcggcagcaatagctgccacaattaggagtttcttaatcatttgtaaactcctacaattttacaaatgcgctcaaacataataaatgctgcggtgaacgcaatacttccgattactttagtggtaggcacaaggccataccacatgaatgttcctgagcaaatcattagggccatcagaaacacatagcccatcacgaagaaggttctcattagtatttctgcaaagtaaagatgaagttatcattcagaatacgattcagctcagagtaggtctgcgcgtcacttgaatgctgacgagtaaacgccagtgcaagttgacctttgccataaccagtggtgagtggtttcattttattagcaggaatccagaacacaccgtaggtcatgcaattcgagcgcagagtacgacccaactgagaacgtccagaacggatatgagaaagaacactttcaaatcctgcctttgaacgctgtttagctacaaagaaacgagcagatgcaccgatataacctgctttgccatcattgaacatcaaaaaataaaatccttcgcgctcagtaatttcacgagcaggaatacctgctacccaatcaccgttactaatagaaccgatcagttctgcgccagcattatcgagatcagcaaaagtcataatattacgcatgttaatttcctcagttgattaaagtttattctccgatgaggggccgaagccccttctactaccaaaaatatactactgccgttacaccaccaacccaaaacacaagaagacctaaagcaagcagacgatacacgatgtgtcgtttcatttttgaccttcccatacggtttctactaaggatttaaggccatcagtttgaataatatcaatcgcattaatggcaaaataaattccgaatccgaacacggtgacaattccaagcgctaccgcaacgataaaggacataacaacggttctcattaagttaaagcgacgatcaaaactactacgaatcattatattttcctcagatgaaagcattaatccaaacgttaactaaatcccatgcgaaaacaccaatgaaagtaacgataaggcagaatactacaaaggtgttcttcaaaatcgtaagtaactttttcattttgttctccagtttagctaacaggattatagtatcaccgaagaacaaaaaagtaaaccattaaatgcacaagttacgaattttttcttctaaagctttaactttatctatatgctcatcgcgagctgcagcggctccattgggatacaatccgccgtaagttgaatcgccattatcacaagcaatgatagtataatgccaattcatagattcgagaatcctatactctttcaaaagttcagctttaatagaagcatttccgcgtttagctcgaagtgattttagctctaagtaactcatgttttactcccgttcagtttgtaaggccatagtatcatggccaatcccggaagtaaactactttttaaaatttatgcatgatgtacccgccagctccaactcgtgaaggttttactacttccatgaggtgttcgatgccaccggcaaacattggtgtgtaccgtatgacattctgggacacttcttctgcaacgaatataattatacagtctgcgactttatgtttaaacatgggccctagatttattccacttccattagggaatagaccgtctttaccagtcgtaacattaatccatggcttatgatttgctcggtcatgaacaaagtgtgttttaacttcaactctaacaccttggtagtgtggatgagctaatacgtcccatgcccattcgtatggatcgttgttattatggtcaacaacttgatcgttcacgtatccatcgagaaaatctgctaccacatactctgccggtatagcaattctgcatcgtttaagaacgtcaattctatcttgagatggatcgatatctaagctatatctagcagtatcaatgatttttacttttgcttcaccccttagcttattcaaatctagggtaaatgtccgcaactggttcaatctctgcagggctttgttcatcaatgccataaattcctctgatatgcaattcaccaaaataaacacgatcgtcgtagttacatgtgtctggttccacaacaaaatcatcaccaagctcaacaagttcgtcacaatgcaaccaagcatagtgaacatcaccttcatgtttaactacatgatggcaaaacaccgtagccgcatgatgagtaccacgaagattaacaactttagaatgagatacattaaatggattaatcatgtttcacccataataaaagaggagcccgaaggctccttataattagcgaagttctgaaccccaacgatcagttacatcttctaatactacgtaaccacatgtacgcattttagcatcgttgtaatcaaccgggatagatactacatcacgcggatgaactttaactgaaacaatacggtcagaaccactaccgaagtgaccgatgtaagatttagagcagacatgcagacctgcggaacaagtacgctgatcgtcttcatctacctggttacgcggcattgtaacagttttacccggagagttatcaaatgtgtttgaagcacagtccatataagtggaacgaactactttccaaccaatgaagtgaccgtcatcagtgatgtcaatatcgtttgcattcaggaaatcaaacagacgataaactgcacgacgagatgggttcagcatcaggttttccaggaaaggcagataacgtttaaagtcttcgccatcttccatagctcgaacgatacgctcagtcagaccagatttcagctcgatatctttatagaacaaagtgccatcttcaattcggacgttaccctgaacgaattttttgatgccttgttccaggttaatgtggtcaatagcaccagcgatatcaccatctacaagtttctgcaatgcagatttaaatccaggatgttggctatcggcattataagtagtacggccttcagtaattgaaatgaatttggaacttgctgcccatttaaattcacgctcaactggagcttctactttagcaggaacagctgccgcggcagctcgagcttcgcgctctttaaacacacgccgaatagtgtcacgggaaacaccataattctcggcgagctctttcttagtgtacagaccgtttttgaagtttttaacgattgcatctttttggatttcagacagacaggtaacagccatttattcacctttattttcagaattttgagtagaagctccatcaaggagctccatgatttttacgatatcatcgacgagtttgctgtcagtccgccaagtatccaagacacttgcgatgacaggataatcatctttaaactgttcaatctttttatagaagattgtctcagcatcaccagacagtttattataaattttattacataaagctaaatcatcgttttcatctttgattttacttgtgcgacaaaccttagcgattttgtttaattttgtcaggaacggatttttcattccagacgctgtaaacttactcgacaagaaattcaatttatcgtaatgcgcaatatttccacagatacgatttccagtagcatttgatggcatgtactggtcataatctaccttatcaatacacttgatgtattggtcgataataaatcggtcaaatgaaagcaatccatcagcttttgccgcggctttcatagcacccggacgaattgcatagaatttcttaattccacacgcttctgccagagaccgcatgctcgcgatgttcatattccaccaccaaacattatctgggaaagtgtggatttcatcacgattacgaccgattgcataaccttcaagctcagcaatttcagatgatactaaagtctgacggtcttcttcccaatacccgtctttatcaatccaatgtaatgacacattaggagatttcggacgtttctcttttggaccagtgtcataatcaggaagagcttttctctgggcttcaagttcagacacacggaatactacaacttcatcagtatccatgattttcttcagctcatcaatgacatgcaattcatcttcattgtctttgattacggtaatgtgtgcccagattggaactaatccagatttacacagggctcgaacagtagcaatacgcttgcctgctttatcgtcaataagaacgaacgctttagttctatcaaccccgcaaatatcagaaatgtttacttggttatgacgatgccaagaactgcttgacactttacgacgagcaggttcatcacatgaaacataaactgatacttcgttatcaacataatatgaacgaattttatcaagattatacttcgcaactacctgtttaatatcgcggttcccaatggtaataccacggctctgaagaatagagcgttccttagaactcagcttattgaactcgcgcaggaattcacgatcagattcatacgcttcaaacgctttaatatctgcagtaattacctcttcttcaagagcattcacgcgcttctggatattggcaattgtttcttcatcaagagaaagctcttcacgagatggagtaatgtctaattcgccaagagtgaaatgaacataaaccttgccataacgattaagcagccaatctgccttaacatctacaccgctaatcggatatacgatttttccataaactgcatacagaccataactttcatacgaactattaacgctgaaccagtcagtcttatctacagggaaatattcaatttcacggcgaagagaatctacctttggaggtacagcaccaaaggtacgcaaaatatatgcgatttcataatgccaagtatcaatatcttctactttaaccggaactgtaatttcaagaccagtttcttcgtcttctttcatgtcatcaacgaacattggacgaatagtaggttcaccacggtttttcatgacagtataacctgtagctttaccatcatgataagacactacgttaaatgtactcgtgtagctcagtggagatttagaaccaagaccaagagcaccgatgaaatcattactattattctttgtggattcaaagaacgttttgtacatcgtcatcatgtcattatgattaagacctgggccataatcacgaattacaaagcgcgggtcaagacgagttggtgctttgatgtaaaatggacgattttcattaccattcagtttatgagcatcatcgcagttagtagaaagttcacgaacaacagcacgaactttatacttataaagtttatttgacaaaatgtcaaaagctttacctgaagctttaatggtaaacgttgaatcgtcagcgtcagaagaaccaataattacttcatcatcacatttaattttcattttattcctatcaattgtgtcgtttaatgatttctgctacttcaagtaactcttcagcagtagcggtgttagttgtaaaaattttattatggatttctttgaagcgttctttgaattcctcagctgcttggatgtcaaagaaccgctggatgatacgatattcacgatatatagcatcgttgaataattcttctgatgggatgtaactacgtttcataatattttcctcagtgatttaggggaaattatatcactataactttaagcaagaatcctagaatcatctccaagcacttcttgattaaagccatataaatccattcttataaagaaaaagggacccggaggtcccttagattaccacaccctactaactcgaccataaacctcatgtttagaaccatcaatgttttccacccagatagtaacccaagttccgggcagaggtttcttttcagcgaacagatatccatagtcgcctgagatcaaagtaatccaataacgttgcatgttaattccttctaagtaagggcaatagtacccttactatttattctttattcactcatccatgtcttacgtggagcagcatcgttacccatgattaattcaaaaagttctttccagttttcaggaagagtgactacatcataaaccgggtcttgaataacacgttcgtattcatcttcttcaagagaaccaagacctttaatataacgaagtttccaacctttgaaatcatctttatggtcttcatattcaccaagagaatagaaccaacgttgttctttacctttagtaagaataataacaggagttttcacaaagcggattcgaccttgttcaaataattctggccaattactaaagaacgccaaaagacttgggaaaattgaaccaacaccatcaacgtctgcatcagtcatgatggcaatatttcgatagttagtattttcagcgggttcaccgatagtcaaaccagtgattgcacaaatgtcaaatacttctttattcttcatcgcatccgcagcagacattccccatgtattcatgaacttaccacgcaaaggatatccgccatgaagttcacggtcacgagttgtaagtagataaccgatcgcagaatcaccttcggttaagaataaagttgtgtcagcatctttaccatatttgttggctttgatgtgcttagctactttggctttctgtgcctttttagcagctttagtttcagcagctttctctgcagcaagtttacgagctaacatcgcctcaataatcggcatatgaatatcttctgatttcataatagcgttagcaagcttcttgtaatcaatatcaatatgactacgaatttctccccaaggagaagtcagacgctctttagtctgagaatcaaatcgcatgttagacatatcacgaataaacatgatgacagtcaggcattctttaattcgggctttgttgacttcaagcttgtacttgcgtttcaatgcaggaataagctcattgctgagttcatcaagaactaaatcaacgtgcgtgccaccgtttttggtgtgaatgttattaacatatgaaagttgacggaacccgtcatccgaacgaccaatggcaatagcacaagtatcagaatcctgcactacagcattttcgtcatacatgtgggcgtaagctttaaacttgccttgaacccgtttacccatgaatttaaattcaatatcaggataaactactgctaatgtcatcagacggtcatgaatgatggattggtcaacatcagttaagccatcagattcaaagtgggtgaaatctgggataaatgacacgacagtaccagtcttgtctttaataaattctttatctttagctggatgttcttcccaagaaacattctctgcgccatttgaacagcagacaacgatttcattttttccatcacaggttgcacccacaaatgtcacagaaaaaatatttgttaacgcagaaccgacaccgttcataccaccagttttacgctcagaatcatcaccaaagttaccacccgcacgaggacgagtccatgcagctactggtcctggaatagtttctccttcaggtgttactacaggagcctgcggaagaccacgaccgttatctgttacaataattttgttgcctttaatgtcaactgaaatcttgttcgcatgtttgaaattagtacgaatagcttcatcaacagagttatcaatgatttcatcaatcagtttgataataccaggaacatactttactgattggaatttaccaaaaagaaaacggtcatgcgcttcaaacgcagaactaccaatgtacattccgctacgcttaatgatatgttctcggtcactcagaattttaatttcgttcttaatcattacatttcctcggttagtgaaggaattatatcaactattaattatagcaagtaattcttctttgatatacatcaatttaccaagaacctcatggcctcctttaaccgctttatactcgggatatcgtggccgctgtcgttcaaacatagtccattgagcatcactaacgttagcgtatgcatatcgagaatttccgtagtattgttcaatccggtactcgttattttcattaagtgaaatccattcttcacagacttcataatatttctgcatccaaatagtacgaccattcacgtcattgattggccaccaagcaaacctatattttccaatagcccgctctaccatttttaactgtcgtttagcacgcctttgcgcagttgtcattccaataatcataatattctcctctggccaacaagactataataccaaaacacgatgtccatgtaaacaactaaatgacccgaaggtcatttattcataacgaattgtgctgttcttgagaaaaagtcctgagcacactgttccgttaacaggttttcctgttggtccaatagccgtaaagcctgtgtgctgaaaatcatcctctgagcaagaaaagaacttatatccggtgattttgatatcagtaaatcccgcgttatctaacacgcgagttgcgttatcagcgtcagtgcatccaatcatcatgaaggcaagcgctgtaattaaaatctttttcattttaattttaatttaaccctataagttatattacctactttaataacccggatttctccgggtttcatggtaatgcgtgctttagttcccatcaataatcaccactctttaatccatcgtagtgaactgccggagcagaaactactcgcttcatttgaccttcacacttagggttaaagcagttaacagtatagtcacgatgggaaattttacgcataatttctatcttttttccacagacttcacacttgtaatcatacattggcattaacagcatccttccatttttgtgttttgaccacgatttgctcatttagtgcacgagtaaccatcatggagatttcatcatctgatacatgggtatcatttttatggcgatttctgaaatgcagccaaagtgcatccactacacagttaataacatctgcgcactcgccttcaaattcttctttctgccgccatggacgattaatccaatcacacatttctccagtttctgaagaaagttgcagcatgacattcccaatgctacggttaggaataggataagacagttttgatgcttcaaaaataggagctaaatttaacattgatacgcactctgcagtgctgcaatagcagcgattgcttgaccacggttatgaatagaaagattcataaccaaatcggttggaattacattcgcggaagttccaacttcagtaaagtatttgaattcgctatcaaaaattacaaggtcttcaccgccgacttcatcacattctgtgccattagcccacataattcccgatactctattattttggtggtcaactttagtaacagtaaaactcccaccattttcatagagttcatacacaaagtcttcattaacctcatagcgtgaagaaaattcttcttcagcttcatcattgacgaatttgtactgtacgccttctttaaaattcattacacaatctccatgtattctgggccatcaactgtgattacgcgagcaaaggtacgaactgggacaatatcaccatggttcgcgaatacatacaaccaggtccaatgctcttctttaccgaaggttttctctttctgaacgacgattaagtccgggttgaatagaatgtcttcaaaagcttcagcagtaatttttacggtattttcagttttcatgttattctcctcagtagttgataagataatagtaccacatccttgtggtaaagtaaacaactttttaaactaaacctggattttgtgattctgtcggctctacatcagctttaggcagaactgcatagttgccttgaaacactacgtttactaaggttttaccgtcttcttcccactcatcagtgacaagaacatttttatgcagcgacagattagtggctgaattagtagaactcaccgattgggtaataacattgtcaagtgaattcacatgtacccacttgcgcagatagctttcgttaaacatagaatcaagcaaatcgcgcgattctagagcaactacgaatttttgcagcgaatacacggctttgtcttcattttccaattgaagcaaatatgaagacattttgttagaacggttaaagattccaacaattacgccttctttaccgatatgcttaccaccaattactttaacgttttcgcctacaaccaaatttttcatcgtgtttctctcagtttgttaatgtagagccattatataatggctctttcataaagtaaatagttatcggtgagaaatttcacatccaacatcgacgccgaacagatatccagcttcccaccctttagccatcatagccttggccaccagaaccatcgttggagagattttcgggaggatttcccggttgaaccactcttcaaagttttcatcgaactcaaactcttccattagccacgccccttaggtaaactcagtggatcggtatcttctggacttggtgcttcgcttaggcctagagcataacgttgagcatatttaagcattaaaatatccttagcgcagtcatggatactatcatgcgcgataaacccgtcgagcgtaccctttggaagaggagtagttgtcagcccacgagtcagaagcagcgattcaattgcagtacgaatatcacgttgattccagaacttgcacggttcttctttaaatgtatcaatttcttcttcggaaattccttgggctcgttgaacatcgcgaagacaatcaacaaaaatcggaaagtcaaagctctgcccacggcaccaaccaaaggaatcccatggatgaattccattatcaatcagatattgctgagcttctttaattccagcaattactgataaatcgtctggcgttgaggccaggttagcacgggcctcagctgattgtttcttccaccactcaagagtagacttaccaaacaaccgatgacctttctgggatttaaggtcaaacttgatgcgatgaccacgtttaaccaattcatcgaagctttccagaacttcagggtcagaatcaaaggtgattagagcaaggtcaatcacagaagagcttgacacatttccgaatgtttcaaaatcaataataaagtctttagccattttgagcctctagcataaatttaatttcgcgtaactggcaaccaatatattcgctcagatacacctttgggtcatatcctgtgaaccaagtaatagcattagcattatctgctatatcacgaagctcattcagaactgtatcaattttaatgttaatagcacgcttaacattatccggtgcttcaaacttagattcttgtaagccaacaatcattgtttgaaggtcttctaatttcaattcaaacatattacctcacacatagaatacatcataacgaccacgagtagtaccaacatataataactgttgcgcgagagaagcatctgccatgtgaatgcatggagtataaatgaagcttctgtcaattgagatgccctgggccttatggaaagtcgaagctggtaatgctttcactttatgaaacttacgcttagcatcccagaactcagaccaaggagctttacctcctttattccaattcttatatgtatctgcagtttttgccaaaaagaattgaaacttgttcatttcttcttcggatgagatgacacagattttctctctagcgtactcttcatcgtcgccataggtttcaatatctaatacccaatgacgaaccagatattcacccggaacacctctggcacccaaaaatgatgtggtttcaactgcatctaatatgcgaacaaactgaccattattgaaaagaatttcgctgaatttctttccttcaaatttaagttccttggtaagaggttcttgcataacaacaatctcacctactacgaatggccgttcagtttcgtatattcttcgtctgattatttcattcaatttatcaacagatttattagtgaacgcaagcattcggttttcaaataaatcttctggtgttttaactaaattaaaataatttagcataaaatctttaagggcagttcctttcgtaaacccacggacaccatgaccatcaactacacagtcgcgaatccatccaccgtttctgatttcagtagcaacttcaatgattggagcattactccgcatcacctcggtcaaatgaagttgtaagaaatctttatgagtgaagaatggactcagtgcaggttcattacttccgggttctaccggacgtatctgagccttatcaccaatggcaatgacaatacaccaggcaggaatagttgccatcaaaatcttaaacagcttacggtcatacattgaagcttcatcacagataagaactcgaatagatgccatatccggaactttcttttgttcaaacagaacgttttcttcatatgtcgtcgggttaattttcagaagactatgaatagtactggcctgcattccgctgagcttagataaaacctttttggccccatgtgtaggtgctgccagcgcaatgccagagataccctgagaaatcaaagcatcaatgataaatttggttaaagttgttttacctgtaccggcaggtccattaatcgtaatatgttgacctttagctccttgtttgaccatttcaataactttattaaaaatcgctttttgactttcttttaattggtcaaacgtaatcatgccacttttaccctcactacatgcagatttttaatttttgctttgagtttttcacgctcaacatcactaagcggttcatacaccagctcagatgttttccaccaaagcatccctttggttttgcttttcccagtaaaattcccctttgccaatttgtctgttaaaaccgacattgtacgaatccgtgctttattagccgattcttcattagtgaagactacacatcgttctccatcatacatatcagttgtgactggatggtcaaatccgtctttatccttatacgctactacatatccatagtgttgcattacattttacctctcaaaagttggaagaaggacgcagtcaatggaagaccttttttcaattttaacttatctaacattgagcatttttctaaccgacgaagtgagctaacaattagccgtattgattgtacacggatttcagcatctgatggacgattcggaactgatgctaaaatagcagataacttacgctcaactttagctaattcagacttaccaccgctgatacgagttctcaatgcattaataagttctaaatctgccgaggttgcagttccattcttttctttttgcacaaattgagaaagatgattttcgcgattacgtaagttagttttaattgatgtgatagttttttcatactcacgaatcttttccaaacgagaagcttctttatcacttgttggcttaacagaatctgaagaacgaactatgcgtgccgcaatttcattcgcttttcgttcaaggccttcaatcgtattatttccacgcaaagtattatacttttgcttaacaggaataacattccctactacatatcccaagtcattattccagcgttcaagcgtcatgctgtcaggatggtttcctttgacggttccaaacttttcgcctgagtatgcgcagtgtgtctgctgcatgatgttaaacagatattctggggtgagattgaactccttgtgccgacgttgagcagaacctaaagttgtaattaaacgagtataaactttagcggtttcagcagtgaatttcattatgttttcctcaaaaatgctttcgtcttacggacggtataatgggtctaggtccctagttctagataatcactagttgactaagctatagtaacactaaagtagtccataagtaaaccagatttttcaactttgttatgacccaccactttgaacttagttcccatcggtagcatcctttcttgttctttatcaatcatctcgatgtcagcgcttctgcgctgagcaatgttatcaatcacatcatttggtcgcatgaattcagaatctggtgcagtaattaaaagcgatttcatgttggtatgataatcaaatgattgatggcaattattgacttcaatgactacaaaggtcgaataatgccatttgcctgcaaactctcgggcgattgtttcatctgttgtgaatgacgccacctttccaaagtcaaattgctctcctttaataagagcttcataaaaggctttagcctcacggcatgatagacctctatagagaatgtctctgttatcaatttgatggcgcctaacgatagagtcaagtttcttatgaaattcttcgccaatcttattgttcatgcactgccacagaattgactgttctttgcagtcaaaacgattggctaatgcttcccatacgcttaaatcatataaaggtaatcctttgctttctcgcgcgaagttaagaacatcaatggaacgaatgggttcttcgataggaataacctttgataattttactgaaatagatgggtttaatgaaatagccatgatattctccattttggttacgagaggtatcatatcatggctttttagaagagtaaactactttatgaaattattttgcccacggagaccagggcggcgggtcagaccagattgaagccagttcgtctagaagagcttctggggctttaataccatacttctgtataattatacggtattcgtctttgatgtccttagaaatcactggatgaacttgaacctcttcctgaggctcttccatcatttcaaacaaatccatcacatgaaccactccatccgacgatattgactgttactattattatatgcatcagcagctttttgaagcaaatcgctcggagtaaatctggcgaaatcagcttgcataaatgaccatactaactgagtaaatactataaaagcgtcttcattgtcaatgacgatacttttgccgttaacgattttatcatttgcatattcaaacagatcggtctcatgatatgcattggtatatcctttaaggtgtaaagcacctaaaatattaattggacttcctggcatgtgtgaaacatcaaaagtatgggctgttttgacaagtccatatttactattaggacaccacccgcgtgcttcaaatttattgaccagttctttaaactcgtcataagaataattgtaaattgctacagtgaatactttatcagaatcaaaaccttcttttagtttgcgctgtaaacttactttatagatttttgcgtcggccacacatagctccttcagtcatgttgttgtcttcaaaccacttatcatttgctttaattaaagcaggcgcagcttttagtaataacgctgcagctcttacacctctgtaccaacaatcaaaatgagacttctttaatggtgattgataccagggcttagtataacatatcattttgttctcctcagttagtaggaataatatactattcccagtatagcataaaaggactcccggaggagtccttaatttttatacttctgcactagcttcaaacattttagcgttggtggttgcccaagttgcagcatcatcaactactgttgaataagcagctttttcagatgggaaaatctgatactgtgcgttagcaatgcgatgtgaatcagaatacaccttaaaagctacagatacttcagtacctttaacttcgccatcagcagtggtatggtcaaaagttttgatatttacgtaagccattttaatctcctatttagtttacaggagtatttatatagctgcggtaagcacctttaatatttctttatcaatttctcgagtgatttcttctcgaagggccaatactaaggccctttctttttgctttctgataatttttaaacgacgcttagatattcttttagccattagtagcctgcatcttgacgagcaaagttctcagcgtttttcagataatacagtttaaagatttcttcagaatccagaccaagcgccataaacatattcagaacaaagtgcaggatatcaatcatttcaaatttgatttcaagctggtctttatcagacaggtctttgatataagtttcctgcatcttgacgtggtcagctttccatggtttccacacagcactagctgccttttcaccattactcataccgccaagagatgtcagaagttcgcggaattcgtcatcaatgtaatctttttgattacgcagccactgcacgatatcaccggcttgagccaattcatcaggatgcatgttagtaccaggcttgtcatttgcaagacgaacctgaagagatttttgcatatcaagcattacttgcagagggtcaccaccaactttgcgtacgatacctgcgtatcgagcttcagctttatctgcaccagcgatcagttgactacattcgttaaagtgtgccattattttattcctttcaattaaattagataaatattatatcacttaacataaatagcaggaggattcatgtctgaagtgaaacaagaatgtaaagacaaaggaggatttggaagatatctttacgtcggaatcgccactgctgctttagctgcatggaattatgtggtagttccattagctagcacacatgggctagttcttcctccaatgccgttagaaaaagttgtgtcgtttattatgactggaggattgctttaatttaaggggctttggcccctatatcttcgcatatttgtcaagacgtaatttagccattaaaccttgcgatatattttgattaatataatccgttatttcagaagcagttgccccctctttcataatcatatcatttatatctttgcttttccaaggcgacttatcccagaaaactaccttttcaccagcatctactaaacgtttcatacgcttaattgtatcgggatgacgaggttcatggtccataatccacgctcggttatcatggcatggaacttgagctaaatctaaagacccaccagttattgcaatagcattatcaatgaacaacgaatctattggtccttccatgacgaatacgagttttgactcatcaatagtgtcgagaccataaattttggtcgcgtgttcatgggctttgattgtgatgtatttttgtggagcattctttcgtagtgctcgtccttgaaacgactcaatctctcctttcttgttgaagataggaataaccaaacgtggttcgttcgtctcattcttataggttcctggattaacggagttaacaagagaaggccattggttagtaaaccataaccttttccaagaagtgcttggaatacatctggcagtcacgtatttaactatcggatgttccttaggaagtctatctaatcgctcgcagaaattaagtttttctattacggggagttttgcattaattttctcagacggttctacagtctttggcttatcaaagacctgctcctttcttttctcaagaagatactctcgatagaggtcaggttcattatctttaagatactgcgatagccacttgttatactcacagttgaagcaatggcagcgtaatccttgacctgcatcaaaaatccagaatcgggctttattgatatctttctgtgagtcaccacaaattgggcaacgacagtttaacttgaatgttgaagatgtagtaacgtgtctaaatttaggtaggtgagatattgcacgaattgcatactcgttatcaacccaagacataatatttcctctggccttaaactaataaggccattttatcactttttcttggcagcatctttatctgctttccgtttctttggaagggtttcgggtcctttattgacaatgtccccggaagtggtacctgatgcaatattttgtgggctgccgcctgcatcaccagcgaccatttcagtaacaaactctttgtatgttttcatagagcctcctactatttattcatgcgtaatacgtaagcatttatatgtaggatacagcgtcggagacattgattttggattgtctttgataagcataaactgcttgcctgtatcttcacacttttgcttaattactgcttcatctttaccagtgaatgccatcttttcaatagacattcctccagaaccagtagatagcgccattactaaaacgtatgtaatcatcctaaaatccacttaacaatgttgaagttatcaaactgggcatcacagtaaagaacataattcaacttaagtgctgcgccgtcgtctttaagttctgcctgcacttctgattgtttgctcgggtctacgttttccacaatatgaccaacatctgcacgaatctgctgagctacttcggactcatcagcagtcattgaccactcgcataagtctttatcatagttggccattgcaggaactgcagagcaacttgatactgcgaacactaaagcaagtacaatctttttcattttggtttcctcaagcagcttgtacgttaagagcagaaatcaggcgataatcaccgtttgcgtatactaacattgacacattgccatcagtgtttttgaatggctcaacaactactaaaacggtatcgccttcatctaatgcttttcgtactacgccatcacaacgcagattagcatgtggagatttaactactttgcttccaactaccataccacaatgcggtacagtttccgctgattcatctttactcttaaagactacgtctaatgctttttcaattgtccacatgatgttttcctctactcgttttgtttcagtaaggccatagtatcatggcctttgaagaaagtaaactaccttttgaacaattttttcaacaaaatgtcagaggtcagattcttggtgggtagatatgttgccgagttgacccagatgccatcgctgttatacaccttgacctctccatagtcgcatacagataggtctgctttgttatatgcctcaatgcctcgatgaatggtatctgtggctgttacaacaaaagagtgacctgactggtcacggaccgcgctaaacacaaaaatcataaaatttacctagaattttaactcttctgccagagcatcaagcttagaacgtgatactcgttcttgacgattagattcggctacacggttctgtgcacctgcaccttctcggacggtattgcttggattaggcttagttgggtcgttttgctgctcaatttctacccaacgctgattagccttatgtacacccataaagaacttgttgttgatgttcttatcgccataacgtgatttaatctgcttaattaactgttgcttcatctgagcaagttcaggggtttcaatcacagccagcataaagtctgccgtagcaggtagacccgcagattctgcaatatcactcatgtccatatcagaagcatcccaagctgaacgacctacctgagccgcggtccaaagaacagtttcagattctacagccaatgcacgaagttcttctgcaatagctttaactaacgtgtaactgttttcagtatattgacgaatacgacaagaagcacaaataccaagatagtcaatgatgataacagtcggtttaaagttcttcttgagtttcaattcatttagaagagctcggaatgtattagcgttagcaccgccagtcggatactgtttaatgattaaacgaccaagagtactagaactacgccatttttccattttgcctttatattcggcgtatgatacacaaccatcgtcaatatcatcaagtgatacatcgagcaaattagcatcaatacgtttagcacaaacttcttcggccatttccatggaaatataaaggacgttatgccccatctgaagatagtctgcagccaatgaacacaatcctaacgatttaccaacgttgacgccagccatcaatacgttcagtgtaccagtctcggcaccacctttagtaattttgttcagaatgctaagtttaaacggaactttacgagctttattctggtatgataaccaacgagcttcgtaatcttccatccaatcatgaccaatatagctatcaaacgatactgataacgcttcgcgcatgatatcaggaatagccccaatatcaggaagacgcttatctcgcttatttggctcaagctgggcattagtctgaatttcaataattcgagacgttgcgttgtacatagccttttcttgaacgtacttttcagtttccttaactaaccaattcaaatcttcaggagcatcagataacttatcaataagtttctttgcgccttcatgttccgtttcagttatagacgaattatccagtgctacacacaacgcagtctttgaaggaattgctgtatattcattaacatgcttcttaattatgttaaacaccgtctgagcaggtccttgctcgaagtactctttgtccatatatggccaaaccttcgtaaagaaagcctggttgtaaatcagattagctaagattgtttctaccactttaacctcttaaaagattttccataatgattttttcttggtctttaatgcactctggatttgttgtttaacacaagcttccacatgaggataaagttcatccttatgagcttcagatggagtactaaactcaatagttacttcccccgaaggagaaatatttaatttatgaacataaaccaagtgtgattgaccatttaattttatcacaatttcttggataacagtcttcatagcttcttggattatttcatggcttttcttgaacactcgttcttgacgctcgaagtctccctcttccgagggagattcttgttcaaatttctcgagttcagattctaaatcaaactcagtcttcattcatgaagttctctaattcatcttcaacttcagcagctgatactgaaccactctcagggagtttaacaccatcaaccttagttgaaacttttgagttaatcatttctgctaccgcttcatcaaccgcagcgtttgaatcaatagcacccaactgatagcgagctttgatagcgtcacggaatggctcgtgcttaaacagaggaccccaaaattccgtactgctcgtatcttttgcccgccaggatttttcttcacgaatcatctcaccggtttcaacatccaggaattctcgtgcgtaccatccatttttcggtttaaccacaaacccgatatccagagccatatcaagcagaccactgtatggatcgataccgccatcgaatttaacatcgatgaagaacttacttttctctttgacagtacgtgatttctcggcgttcaggacaaactgatatccctcaagctcagtaccatctttaatttgacgtttaccgatgatgaacacagtatctgcagaatacataggacctgtaccaccagtcattaccgtcttactgaacatctcgatggtctcgattgtatggttaaccgcaacgcaaggaatgttcttaatagagaagtaaggagttacgatacggaagagagacttcagacttttcgcacgagtcatatctgcaacagatttctcgttcagagcatcttcagtttcctttttagacgccatgttaccaattgagtcgataaacacgatgactttttcaccacgctcaatagcttcaagctggttaaccatatcgatttttaattgttcaaccgactgaaccggtgtatgaattacacggtcagggtcaacacccatagatttcagataagctggagtgataccaaattctgaatcatagaacaaacagactgcatcaggatacttattaagataagcactaaccattgtcagagacatgttagatttgaagtgtttagatggacctgcgaagatagtcaacccggactgcataccaccatccaacgctccactgattgcgatattaagcatcggaattttagttctaactacatctttctcgttaaagaattttgatttagtcagttctgctgtcattttagaagtggatgctttaatcaggcgagattttaagtcagacattcattatattccataagtctccattatatttttctcacaggttaaaggatagagtaattatattactttgttcttgaagctattaacagaagttccatttcttcttggtgttataaaccactgtttccgtatctatttcatagtgtattttacatccaacgcacatgccatgccaccagcaatgcattccatctgagccagtagttccttcatgaacaaactcatcagatttacatacgaagcatctgaattcttcagccttgaatatgttaccagctacatcagatttattatagatgttcataagaggtccttggagggctttcgccctcacagatatggttctaccttaccaaactcatggaaggcctgagatttcactcgagtgttaatacacatacgaattgattttagaggttcgtcatcaccgaataaaccacgtctttcaccatctttagatttccaacgggcttgatttgggaaagcagcatgtagttgttcaagggctctattctgacgagcagtatcacgctgtgtagagcaaccgccaggagactgcactttgccggatttaacgagatacttaaacagagccagatgaggatgacccatgttaatcaattttagaaaagcataagcatcttcgttaaggtcaataactccgtaaccaatatcttctgcggtgagtttagtcaaatcgtagaaagtattcgtgaacccaaaactattctcgcgataatgcccccagcttgatgtaattttgaaaatcggcaagcgagcatgaccgtgataataaccacaatccatagcagtctcgacatatttgaccatatcatcaaatacttcttggctcattgcctcgccgacaccaagcggaacacggcgatcgtcgcgttcacgaatttcagtcagatgaattgtcgtatcatcatcaagcatccaaattcgctgccctgcatacatttcagtaatcagacggcgagtaccagcgattccatcaacatcatcgggaatagtaacaattttagcagcatgaccatgccaggtttcgtatgcttctttttctgattcacgtactacaagatgtggaacataaccttcaggaaacatagtcagggcagtaactgccccggcgcgcttataacttggaattacaaactgaatcataatgtacatcctcttttatttggtccatgcctatcatagcgacttggaactattcttttgtggcaatatatacagtaaagttctattctctttggtgatattctaccacgcaatgtattagcaattttatttctactttcttctgaaagctttcttccaatcaatccatttgaaatgtttttgcatctttcttcgctaaagacgaatttcatcccctttgttggagacgctcgtcctttaagtttagatgatactttactataatcaatttttgatattctagctttaatatgctctgttgattgcttatatccagatatcgttcttccatttaaccactgggcagaaagagtattaaacgcttgcgcatcttcatatcttccatatttttcatacaattccagatgtgccttagcatgctcttccggagtaagatatacgatattatcatcgtcatctgttcctccagcgtgttttggaattatatgatgacgatgatatccagacttacgtggaatcacttccactcacctttataatctttctttgcaatgtgggtttcacccgtgtgagcataattatctacgagatagaaatgtcgagaatatacgtgcaaagacccgacgttccaaataatgtcgccaactgaataatttttacctgatgcattcagaagtttggttaactgttccagaacatagagctgccacgcatagtcattacgatatccaaagacgacatcgtttgagcgcatatttaccacagcgtgaactttattgtcacgaataagatattgtacattgttagtacacatgaaatcactcataccatcacgctcaaaatcatactgcatttgaggtcgtgtgtaaatcataattccacggcgagaatcaggattactgataagttcttttgcacagttagcaaactgtgaatagttttgtgatgaccaaactgcccagccatagttagaattaatctcaccatgcttggatgcaattgctttccaaatagctggagtttcaccaggaatatctttaacgaataaactttgagatttataccactcaagttcccgagcaatatatccatcattaactgcgccaaaaatcaggttttcatctgcaataaatgatgcacctacgatttcaatagtcttcacacccgtcttatcaatcacaaattctttgttaagcaaagcatcagcgaattcttgacggatatcttgtactgtcattggagttacaatcatgagacctcttatttaacttgctggataataattgtattctgctgtgcattagaagcagaccaaatcagcgcaattaaccaaccgataatggaccaaccgaatactagatttgtgataaagattccaccccgtgatttatgcttacgactgcaagctacaaaggtcggcaaaaaatagatgaagaaaagaatgattaaaccaaatactgcttccattttaatttcctcagttagacatgcatttgttgtagatgtgattttggagagattttaactgctccatacgttgtttatgctcattataactcaacccgccattagcaaaatcagttaaacgaatctggtcattcactgctgccgcttgagcagtgcatgtacgttctttttgagttttacgcagacgcttaatttcttccagctcatgcttattctgctcaatcatgtcaagttccatcgcagacagctgacgattaggattagctttttctttcgccaaccgacgctcaaccgcgagcgattcagcagagacctggttgctagcacgatagtatcctacagtaccgccaattgctcgcacctgtccaacagaagaagccgggacgatatcaccttgtggcatttgacaaccagtcagcgtgagagcaacgataacagcaagtaacgatttcattgtaatctcctcagtatgttatttcgagaaccatggtaccacatccttgtggtaaagtaaacaactttttaaaaatcgaacatatcaagaagagacgatttctcttcatagtctaaccctgccgcttcagacatacccgtcagaggtttaacgaacgatttttggaacagaacactgtggtcaagccacactagaacttcctgtcggatttcttgtggcagctcagtgccagatggccatgccatgcatttctcgccgtacgggttaccttcacgcagcgggatgaccatcaccttctcgccttccatgattggtgttataccttcaaatcctgcggttgctcggttatatgccaaagcgcctttaacgtgatacggcgtacctttatctggatatcctgcaccatcatcatacttaccgatgttgttggcagtcttaacttcggcgattactttatagtcaagctcacgatactcagactcaaactgcttataatattgttgtaaagattcttcaccttcttgcagcatacgacgaatagattcttccaatgcgttttgaacagcagttggtgtagaactttgctgagtttccatacccataattttcagatgcggttctgcataacgtgtaccttccatatcatacacgttcagagcatatcgtttcttcgctttccaaaatccgccaatgccgtttgaccccaacggaggacaagaaatagcttcacggtccatgaacattaaatgttctttgttgttcatgtattcacacatctcacgatatgattggtcaatccaaggttccattttcttcttaccgaattggttcaggaattctaccaaatcgttagtttctttgaaacgctcaagacctactttctcaataaccttatcaacacaaacgtaaattgagtcagtatcaccggctactacaaacgaatgtccttcagtaccgcataccttgttgaggtattcattaactttacgttcaatccattggattgccatttgaccaaacaaggtgattgctgatgcgttacgtaaatcataataacggaagtaaatgttacccaatgcaccataaagggagttgatcagaatcttacggtttaactggttagtattacccaagatttcagcatgtttacattcaaacatcagtttgtcaagacactcttcggtatatgtcagcagttctgctttcatatcatcagagaaatcttcatagacattaacttctgcgaatttatcgatagttccaaacttcttatcattcagaacctttttaatcagttcttgatttcgtttggcacccatcattttatttttccactctttacgctgataaaataccttcgcgatttcaactggaatgacaccatctacatctttacgatacatccaaccatttggtgaacatgaatattcatcagatggacgaggagcagtcttgttaatgtactcacccaacggatgaagtttaaactgtccaacgatagtttctggtgaaatattgacctgtcggataattgacggatacagagatgtcaagtcaaacgacatgatataacggtatgcagcaggaactggttccttaacatacgcaccaggatacgactgtttaacatgagaacgactttgcggaataaccttgtcttgttctttcagactgttaaagatgattgcgtcccatgttttaattggactcattacaccttgatatggcatcttcgcataataagacattgagattgccaggtcaataaatccacgaaccgcatcaatcgcttgtactgattcaacgtcgatgatgttatacgaaatataccgttggtggttagtttcacgcaacttattgatcggaccatcatatgctaatttacctttcttggtttcataataagcaatgaaatccaacttatacgtcggttggttcgtgaaactaaatttcttatacaaatccatgtaatcaagaatagtcacacccatgatagaataaatttctttatcaccatacatgtttgttataatcttagatgaaactttattcagaggagagaaccgtttcatcgtacgctcaccaagaatctgtttcacacgattcatgatgtacggaatatcaaatccttcaatgttccatccagtaaagattgctgggcatttctgttcccaaagattgatgtactcaagcatcatttctttttctgaattgaacggcatatacaccacgcgatcaagaatatgttgcggaacttcatcaccaccctcagaatctaaacgagcagcgagtttcttgtcccactcggaaacagaaccataaagcgaatgcagtaaatcaaacacatagaacttatcatcaatcgaatcatagtgagtgatagcatcaatttcatattctgctttcatcgggtctgggaattgagatgctgtaacctcaatgtcacagtttgcgattcggatgaattttttattataaacgatttctgaaccgtaagtatcactgatatacgcgagtttgaaatcatccatacccattgcttccattcccatatcttccatacgacgcatccaatcgcgtgcatctttcatagttgggaatgtattcttcttgcaatactttccgtagatgtctttgtactttgtttcttccatgcaatgactaaacataacaggagaatatggaacacgacgcatgcgttcctcaccagtagaatcgatataacgttctacaatgtcattgcctagagattcaacgctaatataaaattctttcatgggtttcctttgtttatagaccgagttattagtctttaggtgggataattatactccgatttttataaagtaaaagggccgaagcccttttcttacgcaccgattgtgtacttagattttaaagtccattcatgcttctgcttgaatgtaattactcggaagttattctgcatctgtgcaagagtttgaccacgattaatacttaatagaccccaatctgcaagcagttgggcaattgaatctcgacggatttcatcttccaggtcaataataacaggacgtccatcaagcttcaacatttctttaaaatgtacaatatagtaacgaccttgtttctggagaatgtggcagctttgatatagtaccttatctttgttattagcaattcccatacgagtcagagtttctttaactttcaggaagtcttcaggctgtttcagtgtaatttcaatcatctttaccattccaatgctgttttcttaagagttttctgttctttcacgtttttcgtgattgtcttgaccaattcatcagtcacaagacctttcattttcttgagagcaggtttaagtttatttttggcttccagagtctctctatacatcctagcatcaatcgcattgaccttgtaatatgtcattataacttgaagaatcaatgcatcctggatgttttctgttaacttagcccatttcccataccgacgacctctaggaacagaggccatcatatagttatagtgtgcttggtcagacagtccttgaccaacaaggttcataacataaacagcaggcatacagtcagcatgctgagaaagagcgttttcaaccatgaattttgaataatccatagtcgagatgttcaaatgctctttcttttcattaatagaaccgataatctcgaagaattgattttctgccttttctttatatgaatcagataattcctggactttcgcccagtctttacctaaccacgcgatttggtgctcattatactgatcatcatcttcaaataaactcatcatttccactgcatctctacaacaagttgaataagcatataaaccaaatgtaattcaatcgaagctgctacaccatgatactggttattttcaccaatgatttcatacattcggataatacttgggccagtaaccattgtatacagttccgaagaaagtttatctacgaaccaagtatagtctgcagcatatttcggagcaagagcacgaagttctttgatgttcttggttttaatagcttcaatgacatcttcaattgagccgcggtcatttagaacaatagacaagatacctgcatcaatcacacccttagaagaataatgatcaagcatgttgatggtcttacggaattctggaaaattctttttgaccaaagcagctacaactttcttatcttcaaccaccacgccttcattttcacaaattgcgagacaacgcttgagcatctcgatttgcattggcttaacatcagatggagatggtttaccaaaattaattacacggcaacgagactgaagaggtttaatgataccatcaagattgtttgcagtaatgataatagtacagtttgtgctatacgcttccatgaatgaacgcagatgtcgttgggattctgcaagacctgctcggtcgaattcatcaatcacgataattttctgcttacctgcaatggatgcagaacttgcgaatgcggttaacggtccacgaacgaaatcaattttacaatcagaaccattcacgaacatcatttcagcattaatgtcattacataatgctttagctactgtggtcttaccggtgcctggagaagtactatggagaattaaatgaggaatttttcctttagctactaaagccgaaaaaatttctttatcttcagcaggcaatacacactcagaaatagtacctggacgatatttctgttcccacataaagtctgcttcgtttactgtcaatttcatttatatttcctcattcagattaaagatggggccgaagccccgaatttattactcaaagtcaaaggtactatctgcttccattgctaccacataagaggctgatgcaccttcaaattttgctgcagtctgtttcttagcaccgttcatttttgcccacagcatcagcttgtaatcaccaacagtcattttcatattgctcatgttgatgatgaagttgaagttaccttcgccatcataatcaccgagcgtcagagaatacttcggacgagtcagtgcagcgtcttctactttattataaccacgcagaacaattttaccatcaacgttggtgatagcaattgtgtcaatctgcataccacgagacactcgcatcagttgctgcaggtcttcacctttaaaatcaataattacgtttgccaccgggaatgggattggtttagtcggaaacacgattgtgctcgggtcagctgctggccagaagatagttgagcgagcatctttaattgccagattaccatcttcctgcatgataatatctgcatcatcaccaaccagagacagaatgctcaggaaactgttcaggtcataaattgctacatcagtatcgatagtatcagagattgtggcttcagcataagtcgtaccgttaacagcacgagtcatgataaaattgccaggtttcagcatgataccagagttgatggtggagaagtttttcagaatattcagagtttctttagagaatttcatttcaataccttttaattaagttcaggataattatatcaagctgcgaatgtagcagttaattcttctgcaacaatctgacctgccgcaacgagttgctcatcagcatctacgcagtaatcattttctagacgttcgccaccatgacggtcagtaacaattttagcaccagccttgattgattcgttgtaatgcttacgcatcaattcaatccatttttctgcaacttcgtcgtcaatagatttatagaaagcaaagcgagcttcagaatctttaatcttatctttaataactgctttagtttcttcagttagagccagaacccaagatttacgaatacgattttggttattcgggttggagtctgcacgtacgtttttaacctggatatctttcacatcaacaaaattaatcattatatttaccttaatcgtaataatcttcaaccatccaaccgggattcctgctggacatgactctattatattcatttcctgtaaaagcatctcgtaacatttcttctgttactaagtgcttttcatcagaaaacaaattagttaacacatatcgctttacttcaggaaaggccagcagatgctggccagttgtaaactcattcattccatcaccgtgaatcgtccgaccttcttcatttgaaggtgttggccatatgcctgcgggtcatggtcacggtgagaaataataaacacattagcatctaccatcttattcagaatagcagttattgccttaacaccttctgcgtcggtagccgagtcgtagacttcgtcaaggaacagacagtttattttaacaccagaaaccttttcagcaatatcacgccacgtgaatagtaatgctatatcaattcgagctttttcaccttgactaaacgaggcataactaaactcttctcgtccacgagatttaatcgtttcagagaactcttcgtttaacgtaaacgaatagtcagcttccataatttttaggtagctattaatttgcttattgaacatcgggatgtacttcttgatgatagctcctttaataccggagtctttcagcatttcagttaaaatacctcgacgatatttttccataaccaaattagttttgacgaggataattttatctaattcttcttgtagcagttcaatcttgtcagagttatcaatgaactcctgtgatgctttatcaattgctgctttaatacgacgtgctttatcaactgcagttaaagtcatctgcttcaaattactcatttgatttttgatgtctcttgcacgcgtacgaatagtattatactcgcgagctagttcatccagttcactctggcgcgtctttaactcgccaagaatggtattacattcttcaacatgatgattaatcttagtgattagagtgtcattagaatgcaaatcctgcaagcacgttgggcaatgaccacctttatcatacaacccaagaacctttgagtatgattcaattttagaacgaatcttaaaggttttaccttgaacttcttgaattgactctgctgggtcatcaccaatcacgagttcaagcagttcgctttgaagagtttctaattctgctttatatcctcgtgcctctttcacttgctcatcatacatcgcctgcaggcgagctacgttatcaccagaaagtttcttctgcttttctgcgtactcatgatgagttttaatttcattggttaatgcttcacgacgaacatcattaacttgaatctgctggttaatttctctgatttgggttttattcagtttgtccatatcagccaggagagacacctcaagtaggtcttcaacgagcttacgtctattcccagtggacaatcccatgaatggagtatatccggcagttcctagcacaacaatttgcttaaatgatgagtatgacattccgataaggctttcaaagtatgattggaaatcctttgaacttgcagcctcatcaagcttgtttccgtctcgtaaaatttcaaagacgtttggtttctgtcctcgctttatgtagaaactatggccgtcatactccatccataattctactacagagtccttcttattaaaggagttaattaattgacctttcttaatatcacgaaatggttttccaaatagggcaaaggtgatggcttcaagcatagtacttttacctccaccattcttgcccgtgattaaggtcttttggcatttatcaagttgaatgtcaatagccgcctgaccaactgacattatattcttatatttgacacgatttagtttaaaagtcttcactgattttgtgcctcaatatataactgtttagacataacttttaaggccttgatgtcatctttggacaggtcttcaagtgcttggatatattcttccattaaatccaataagcttttaacttctacttcttcaccgtcttcagactcgaccgagttatctaccttagaaacagttcttaattcatggactactttttcgagttcggattcaaactttggaagattttcatctactgcagtaacaataattcgcactgcaagatttctgaactcttcaaaatcaacttgccctgtgacaggataaattaattttctatgccatgtgatttcattagggacgaaatcaaaggttgataatccagtgtcttgaacccagaatccgcgtgggtcgttctcatcacccgctgtaagcgtccaaggcgttccgatgtacttaacgtttgctgcgcttgagatggtgtggaagtgtccagaccaaacttgcttgtactttttgaggaaatctggttccaacccatgagatttcatacctttataaaaatagaagccattaagctcccagtgaccaatgcagtattcagcagacgattctttgatatgcttcataatttccgatgcgttctcttcacacatccatgggcacaagtcaatcaaagtcccatcaaaatccatagtcgtaggtttatcaatcaccgtgatatggtcatacttaccaagaatttcagttgatgcattgggtgtcaacgtattcttgtagtgcatatcatggttgcctacaatagtgattaaattaattccttctccttcaagggattcagcaatttcacgagcaaattccattgtcttatgagtaatggctttgcgaacgtcaaaaatatcaccatactgaatccaagtagtgatttcattttcttttgaatattcaatcgcctgttgaattccatgacgttgaacgtcttgaacccatgggtcatcgttgcggacacctaagtgccaatctccagtatgtagaattttcatataacctctctaatagagtttaattttatattattccgtgaatagcaaaaagggcccgaaggcccattacttattttgtcattaactcaaattgttctttaaagcaatgctcagaatcttggtgttctaccaggaattcaaatgctttatttcgctctttatcatagagcttccggtcagatgacagatgtttcattcgttcaaagacttcatttttattttcatcattcaaccacaaaatgccagaatcatgagaagtcaacggctttccatcaacccggaatttcaaagcatcaccagtagctttatggaacacaggaatagttccgcaagcacctaattccaagtgggtatattccagtgagcgctcgagaaatttgtctggaagacgtgacaactgatagccaaatccagactgagacatacgctcaagcatttcagagttaacatatcggtcaagaacttgaggattcagacctggtccagttttaatctgatgatagtgacggcaataatcaatttcatagcgttctttgatgttaataaatgcaggactgcgttctaacccttccaagatagtcgttttgcctgcgggccgcagatgactttcatgaaagtcaaacatcaagaaataacctttccatgtagtagtacgaccaatccaacgatggatatcaaaatcaatggcagagaagtctttccaatacttatcacgaattgctttgatgctcatagcaggttgaaagttataaaccggaggagctgagtcagaatcatcaaagaaactcaacccgccgcttggaaaatattcttccattagcacggtgttaaaatcaccgtttgagctatgactaaacaaaacatcggcgcgcttaacagtttcttcaagaccagcgtttctacgcagtgacaacgctctatggtcatgttgatacacgactacccgaacttcaggtttaatgttctctacgagcttcttatagttatcaatcgctgcttctggcgcattaatagccggtactgagttaatgataagaatatcacaagcattgagtaaagacagtgtcttgtcatagtcatctgctaaagacactggaatagttacatctttgtagttatgcgctctattacgtgtaaacgctttatctttagcgtaaatgatatttacttcatggccatgttttactaaccactcacggtgctcgagactgaacttggttacaccgcagccctcaagtccgcgagccattaaaatattaatcttcatatgttgacctttgttgttaattttgaatattttaccattcccgtaataaagcaaaagggccgaagccctttaaattttcttgtatacaacataacccgctgcttcacatatacgcttagcttcttcaaagcgtctaagcatatctaccttagcattatgaatcgcttcataatcgggagcaggtgcttctctccgagcagtatcacatttataacagaagtaactacgctttggtcctgtataacgttctgaacaattactgcatcggcatgtataatttccttccggccaatcatgcccagggttagaacccatcaaattcgtcatacatcccaattctcttcactagtaataaaatcagggtgttcatctaaatcaatgaatccccagttctcttcgtttaccattcataccaccgtttaacctggaaggtgtcaacccagacaagagagttcttatcaattagcttacatccttcggtagagcctaacacgcgatattgattatctgctacctttactgccatcgtaccagtcgcagtgtttaaagtaaatcctgcgtctttacgaacacgtttaaattttacttgtaccagcatttagaatgtcccaaacagatttacgagaggtattccagcaagtcagaataatctcatcattaaaaggttgttttaaaatagtacgcagtttttcaatagcatacttgtaagcagggaaattgttgtctaataccgcgtctccagcatgagcttttaatcgctcaagttcacgacggtttttacgaacaactttgttggctcgagcaatagcttgttcttctgccgcttccattagtttctgttgcagctcgtcgcgctcttcctgggtaatattgttcatgttattcctttggatggtaatttatttcaaatgtgaattcagtatcagtccaattataactatgttcaattatagcagaatctgacctgaaatcagcgtcatgtggatttttcgggtcaatgtgaatatcaagatcaagcacctcccttaaatacatctttagcaaataagggatagcgtctaggtcttgcacatcttctaaaaacccgtcgaggttaatcttcagcctcatataaaaattccagattaggtccatcgcttgtaggttcgctctttttagcagaccctggcgccttataagcggtggattcatactgcgtcattttgtcgtagatgtcctgaataaaggtttcatctgctaacgcaaccatatcatcgtcccgtgaatcatacacgttgtggacaaaatagctgtatttctttgccatttctttgcgttcttttttgatacgctgaacgaatgcattgaaacaagcttgggttatatacgcatgcgggttatcatacttagtttcatcgaagttgattaagcctttaattgcggcttcaatcccgtctgaaatcatttcttgcttccaggattgggtgtatcctgaaaagttgaaacgcttactcagaccttctgcgatcagcataatagcaaggccgatcgtatcgttctgttttactactcgaggaccgccagcagcttcagactcccggcacttctctttccacgcacagattgatttatacagttccttgttatttacataattactcatattgcctcttcgcttcaattaataatatctattataacaaatttgggaagcgagaggattaaagcattacttaatcaattcagcgcatgcaattaatttcatcatgatacgataaaaatcgttatacgtgaaatctaatggaacatcaatgacggcttcaaaatcttcaaatacacgctccattccataaccagcgatatcatctgattcagcataccagtacgttccatcttgtgcaaaagttatttggctattttcaagacagaacacacctttaatattttcatgtgtaagagtcaattgaattttcatagttcacccttcataatacgatagcattggaacagctgttccatgatacgtttgaactcaaccaaactaagttcaaaccactcagattcatctacttcatgcatcatttccatgaatgaagagtataaactttcataatgagtttcatttaacatagaggcatgcgtttcccaatacataccctcttcattgtcaaaccaaacacccatataagaatctatagtaaatccgccaatgccttctactacaatcataatttggtttactttagccatgtcttcaccgagtcaatagcgtcttcaaatttagagaaagcatccacggatgtgtattcattctcaccagagcgttcataaatccaaaacgcgtcaaaatcttcttcaatgatgaattccccgttaggagtttcaatcgtgtttctgccatcaggcgttttagatataaaccatccaagcaaaccaacttctacaatttgttcttcagtcatttagaatttccaccaattgattatagtttaatgcctttccagatgaaatcataacattacaaaatctgtatagtgcttcttttgatactttatacacataatcagaagttgttataatgtatgaaatgcggacaaacgttggagatttttctgctaactcatatgccaattttctagctctaccgatatcatcggcaaacttggtatcagcaagcaaaatactatcaaatacccaacggttagtaaaaatttctgtgtatagaataaccttacgcatcaagatactctcgcagttcctgctcgtttaacccttcttgccacatctctgacggagatggaagttggctgtctagagtggatgaatcaattggaaatactctgataattacgctagtatcttcaccccattgatttgtgagtatccgtttagcttgactaatatcaggctcagaatgagcccggatatacttaatccttctatgccatacaccggtaggaatagatgcgcacacgatatatgaaatcattttgccgccttaaccgctttaacatcgcggaagcctttcttacgttgattcttcatcttacgaatagtgctttcagaaatttcaccgatacccggagtgattggttctacaccaaaggctttgatgccaaattcagacagaagataagcaaccactaattcacggatgcgggctttaccaattttttggccttcttctttcatcgtaccgtgaagctcaacttcccactgatcaagcaaagacggagttacacaacgtccttcttccagcattgcagatactttatcataagcaaaagagttcagtacgtttttgattgcttgggacatattaatttcctcagtaacgattgttttgacagaggagattttaaatcaaatctcctgtagcaaatcaatctttgagagattttatctcttcaagcatatcgtagtattctttactagcaaccggagctacagtacagtggtagctattgaattcatgatatttcacgaagcgttcaagttgccactcaatcagattgttaattcggtgaagcagaaccccctctgaaccgacgtagacaactacttcaaattgaagcccatcccaaattctggtacggacgatatcacctacattaaatgttttcatgcgatgtaccaatgttcgttttgccaagactcacccttgtaccagcgagtcatatcatatccgttctcgtcacggatagcgccattacgcatatagaagtactcgtcatcagtaaaatactcatgcttaacgatacatcctttactcatagcttctagagcttcttgccaatttaaccaattcatattttcctctcgagttaaacggtatgctgttatccgttgatagggctatggtatcactcatcaactagcttgtaaacaactttgtgaaatgaatttaaaataaaagagaggccccataggaacctctaaatgaagggtatagaaatatacagaaggcggtcaagatgaccttagaaaggaactggttaatcttctatgatatctgggtcatgcccagcagcaataagattggctttaaatgttggaatgtcatactgcttgacgttatccataaaaatgacaggataccgaatagcaagcgatggatagcacccgatgcgtttagcaagtgactcaatcaacggacggtcataaaccggctgaccgtcaacctcgttgattacattatagaactcatatggaagttgcagcttactgagcaagtcacgaactgctttacatccagggcatctccaaacttcttcagggatgccatagatttctatcatagttcagccttaatctcagaaatcaatctttcaattaattcaagtttatccgctgtagtcataggataaattttgtcaacagtggcttcttcaagatagcaacggtcagcatcgttaagtatacaccactgatcaaaatcatcagcatctatgctaacgccgttgaaggtcttaactcgttcaacagacccgtcctgtgtcagagctgttaccaaaaatggtttaaacttaaggatgttgtagaattcaacatcctttgacgatgcgttatttaaccatttatcaacagagtcgtctttaaacttgtaccacttatcacaacaaaacaattctatcatttcatgacctgttgaagtttggcagtcagagtattaacacgcttctgaaattcttcattagacagtttttcatctttcttagtaggattaatccagtcagaaataatgatgagaacaataaatggaatagctacgaaagcacctgcggttaatgcaaccagcgcaataacattggaaataaatttacgaatagcattaatgaatttcataattttccttaaatagttaagatgaatgctgtcatagccagaaattctggtccaaacagttcagtagccatgtggttcagagtaaacataattttgtaagtcagcatataaatttcctcaatcatgtgtccaggtagaaccgtttcttacccagagtctttggttatcagaaccacgccaatttttagtggttggcagtgattgctcgtatttcccatcaattataacatcaatgtgttgtagcaaatctaagtctttaatatcttcaaatttatatcctgtccacatccagatatctttctccggaaatcttgctttaacccaagaaactaaatttgaaatctcttcccggttctgtggataaagcgggtctccaccagttaaggtaagaccttggatatacgatttgcttaaatggggtgcaagctctttaacagtattcatagtgaataactggccgtttctagcattccaagtagatttattataacacccttcgcatttatgcaaacacccggtgacaaaaagaacgaccctgcacccagggccattcacaaagtcagaagggtagattctgtcgaaattcattgaaccttacctcattacgtgcttctacttctgcatcatatttccagggttcatcagtttgaatagccccagccgatagtccactttcagggtcacgggttatagcaattcccaacggatgcagaacctctttgttgattttccaaatcaatccccactcgctaagttggttccaatcaacttgcttcattggtttctctaacatgttttaccctatgcataatttctttgttcttaccaagattaaacccacgctcagaaggattaccaagatagccacaagtcctacgaattgtattcatcttctttggatcagtttcaccacaaattgaacacgtgaatccgttttcagtaggtgtcatctcatgagtagaaccacaagaaagacacttatctactggcatattaacaccaaaataatccaacttctcgatagcatagtcccataccgcttcaagaccttcaaggttgcgcttcatgtcaggaagttcaacataagaaatatgaccacctttagcaatagaatgatatggtgcttcacggtcaattttttcaaaaggcgacaggttttcttctactgacacatggaagctattagtgtaccagcctttatcagttacgcccttaacatcaccaaacttagcttggtcaatcttacagaaacgatagcacagactttcagccggagttgagtacagactaaaggcatagccggtttcttccgtccacttgtttagcttagtgttgatgtacttcaggacgagtttaccgcttcctttaaaagtaagcatatcaaattcgtgaatgccaatatatcctaatgaaattgaactacgtccatttttgaatagctcaagaatttcatcatcaggtttcatacgcacaccaaaagcaccttcctggtaaagaataggagcaactgatgcagtaacaccttcaagggatttaattctagttaaaagagcttctttacaaatatcaagacgttcatccagtagtttgaacagtttattactgtcatctgaacttttataatttgcatccagagctatcctagggagattcagtgttactacccctagattattacggccatcaagaacgggtttgccagaagagtctctccaagcaccaaggaaacttctacagcccattggagatacaggagtttctgaaccggtaattgctctattatttcgagcactgatgatatcaggatacatacgtttagctgcgcattctaatgcaagctgcttaatatcatagttcgggtcttctttacgtagattaatgccttcttctacaaacatcacaagctttggaaagattggagtaattccatcgcgtcctaatccacgaatacgattatcaagaatagctcgttgaattaatttttcttcccatgacgtgcccataccaaatgtgatagtcacaaacggagtttggccatttgaactaaacaaagtattcacttcatattcatatgcctggaaagcatcaaatacatctttttctgtttttgaaatagcataatcttttactaatgctacttgatatttgcgtgcatcacgtacatgtttagcgaatgtcttctccacataaggagccaatactaaatcaacattagcaaaggtagttccaccatattggtgagatgctacttgtgcagtgatttgcgccatgatagcagtagctactccaatactcttaggagtttcaatttgagcgttaccaagtttaaagccgttctgcaacatacccttcaaatctaccaaacagcagttagtgaaaggcaaagctggactatagtccatatcatgaaaatggataacaccttctttgtgtgcttccattacagagaaaggaatgacctgattagcgatatgtttagatacgataccagccatcaggtcacgttgggtaggaaaaacacgagaatctttgttagcattctcgtttaagaggtccttgttggttttattaataagtccctggatttctaattcgatattcattttaaactcttacgaagctgcttcttgtattttgaagcaagttgtgattttccatcactttcctcgtatgtaaacccatgcaattccatttcagcaatcatctcaggtttaccaagacgtgaaaagcgtttagccatatcggcaacatattgcgggtgaatattactgtctttacgattctggcggagatagaccagcaaattctctaaccattcgaggtagtcaatatcttgaccttttaaaccagaacggttgaacttatgcttcatttggccttctgccgcattacacaggttacagagcaagcctctgacctttcctgcattgtcaccttctaacgcatggtcatggtcgaggtggttcttttgaatgtcctcatctaaaggacgtttgcagcaaggacataatccgttctgtgcctgatatagtttttctttttcttctttatataacttaccggttaataacatactcttacctcagcgattagataagagtatttatagttaaattaacgagtaactactatatgcattatgattagattctttgatgcagaatgaagtacagaaagcatatatgccttcataatcgtctacagtgaaatcaatgtatgaattagtttcttcatgaagaagactcattttagtccaagccattccattgatgtcatcgtcgtaatagcctccactaaattctactacatcgccaacttcataccaatgactgcgtaaaatttctcttgtaacacgatgaatatcagcgaaattgagaatttttactctaatagttttagtaatgcacgatttagacatggcgaactccaagacgttgttcaagtgcgacaatgtaatccgcagctttttgcattaaatcatactcttctgaatcacaattttcctgtccagcaaaggcgtaaagagctctggtaattggaacgattgcaccttggaaatggttaagtttaatttcagaaatcagaggaacatcttcaccttgaccaatttctttaatttggtgcatcgtatcttcactgtagaagcaccagaaccaagattcgccgtgtggagttgggtcgttaatagtaatgattttatttgtcagtaaatcaataactgcagtgattcctaccagttcaaggtcgtcttcattatctgcagaaataacttgaaacttaaatcccggaatgaacataggaaattgttcgctcagttcatcatcattctcaataacttcaaactgcttaccaataagccccattcactttgtcctcataatcaagcaattcatttatggtaggttcagaggtattataatcctcttcaggaatagcatcttcctctggctcgacagtttcccaacgagccgcataccagggttttagacctttgctactttgcatggtgttggttcagaatcattagcagaatcatgttcaatacgccattcaacttcagtgcgagtaaccactttttcatgacgagtaacgatatctacttcaggaggactataataccaatcagtatgatatgaacctgaacgagattctgataccatgaaatgaacgccgcgtgctggataataccaaatttgagtgcggtcttgatacttatgctcttgtgtccagtctccatcttctactaaaacaaagatttcttctgcatcatcgtctggtgcattaggcggatattcaaaatcgtagttgtcgtcccagccaccagtgacgccagcgatatgcttgatttcttttactaattcagcgttagtcattttaacctcgcagcttctgtaaatcttcatcatcaatccagctttctaaaccggatggaagcgaacattcaatttcccacagcaattcttcaactgcttgcaatcgttcaagctcttctgctgaaatagttaccatgcgtggagcttttaaatcaccgatatcataactcatagttcttcctcatgccaagaacagtcaacttcaaagtctggaccaaggtcttcatcttcccaacgccaagaccctaacggattaccagcatcatcgtaatcaatttcaagaccaatataactccactgaacaccatgaatggtatttccttgctttacaaagaattcaccccattggtgcatgaaagcatactgtggatcagatatagctctttcaatcattgcttcacgaagattacgttctaaatctacttggtcgccttcaagaaaaacaaactcaattgggtatttcataatttcaccatacactcgccgtatttccatttagacataaccttaactccattagagtaagttacctctaccttcgctcggtgattcttaatctgcttaatttcaccagtttccaatccaccgtagccataataaagagctacaatatcaccctcccgaaggagggttccacgataatcatgcattgaatttgaatttacggagttcatcaaaaccgccaatatgtgtaccgtcaggagcaaaaatctgcggcatagttaatccaacttgcgattcacgtcctaaacggcgaagcaaatcactgataaccacttcatcaaatacacctttttctggcattacattgatgaatgcatattcttgtttcttaacatcgagcagacgctttgcattatcgcaaaatacacacttatgaatgctgctgtcgtaaccaaaaaccgtgaacatcttcttctatttccttaaatacttgagcttgaacttggttccaactcgggtgtttatacgctttataaacgttaatcattccaaggcgcttcgtgacttcgccatcaattgcagcttgggcaaaatttcttccacgggtcatagctcctttgagattggaactgttagcaatttgaccagtctcattataataaaccgaatacatgagtagcattactcgttcggcttcttccatatatcgtttacgagccattttcagccttagtagttataactaatgttttaccatctaacgcatcgagaatatctttgatgcaattatctggcattggttgaacgctagctaattgcttggcaatatcatcaggaattcccatgcgtggtatatttaatttgctaaaatcaattttatccattagcagttaccgggaagtgttctgccaatttagcagcaatggcagcgttaatttgatcagcgaaattcttattcattgcgttaacaatgatttcttgaattcggagattagctctttcaatagacatcttaatacgaccttcagcttgcttaacagcgtcatcaatagtttgacgaaccatatcatcaatagcatttttagcgcatgattgggcagcgttacgcatcatctgtgacatttcttctttagcagacatatcattccaaccgcgagtatggaacatctgctgaacttgcttcttaacttctgctcggacatctggaatagtcacagcagcaatattaacttcagattgtactgcttgttttagtttattctgggaatcttttaacaccatttctttaacgatgttattgattactgactgttgcagttgagcacgggctgctgtaccttctgggaataactggcgtactgcataagtatctaatttaatgtcaatcattttacctttttcactccaggaatattagagatagtttcaaatacttcgtcaaagttatctttatcaacagtgactaccatagtacgagcggtctgtttctttttccaacgtttaaagaaagtttcaagactcaaatcatgggaagtgaagaaatcatcggttttgtaaacatatccgctttcaatttttactaccgcatcaggcgaagggtcttcatattcttctacttcaacatcatcaaagagtattaaagtgtcatcatgataatagccttcccagaaggcttcatcgttataaaattctttccaaagcgcgccagtggttttcatttaatcaccttcttccaagcttcgtgagcagcacacgctaatacttcgtcatcagtcaaattgaacttgccttcattacgacgagcaatcatttcattgaattcagtatcagttctaagcatcatgttaagaactgtaaaatccattgtcgctcgaagatattctttaagctgcatagggtcgatgccactttcgtatgcgtcaagaatcatatctgcaatgatgttatcaaagtttttgtcttttatgaggttattagcatactcgacaaaaaacttagtattagcaccagtaatagttttagtaatcattttaattttctctcaaatttatgcttacaagtccggcatttcattttcagaatatcggttgtccaatcaacaagctgtacttgaatactaccacatttttcacaaggcacaacttgtttagctgcagcttctcgacggtctaccatttcaagacaggcatcccagtcaattttaaattcaggtacaggtggatactcaaactcaatttcaaggtcgttatcatcaacgaccatgtcttcttttaattggtttttcacagtaagctccgggcatactcgagagattcataacgctctttgtattcgttaagcgatttaaccaaatctgccatagctaattcatgtttagccaattcagcttctttggtatcaataaaccgcttaaccgattccatttcggcagtaatactattcttagcagtttcaatatgatttactggtgttaatggaagaggtttaacaacattgagatacatatgtgctacatcttcatcaataactggggtggtgctcaatgttttaggaaaaatcttaaatgggtccaaatgcacttcaagaacagatgagttttcaccttgctgtttgcaacatgattttttaactacatccatatgctctaaagcagtacgaacttgcgctaaaagcgcccgagccggatactttccgctggacaaatggctattaatatgaattcgtacagttacattgtcaagctcttcggcacgaatgaatgaaacacccttaggatttctagaactagtagaagatacctggtatttcacacggtcatcgcctttaagtaagcaaattgaacgattaagaatacgacgcaggtttgcattaaattcagagcagaagatttgggcagcgctacggtcatgtctttcttcagttttaaacgcccctgccgcaaagctataacgctgaccgtaaattttagcattgccgatagcaaactttttgagctgtttctctgctgacattgcgcctaaccagcgagaacgacgaatgttttctacaacaaaaccagcataattggcttcatgcgctgccatgctatttagaacacgacgagctacgttaccagcaattgctacgttataagcagctggatttaaatcatgtaaagctgccaaaacctttacgtgcttctcacgctttgacaacccctttccattatgcttatcaaattcaccagctacaaacatctttaattcattcttattcattatcttttcctctattttggactgggctcaaagagtatctcaaaatctccctgaacccattatacaacaattattcctcaagcattataactttgcttgggcgcttatagaaagcatgagttttatcatctttcgctaattcaaatgtagcagtaaactgtactttgcctctgtattcaaacggaatactttttggaagggagccgtaaaccgtagctccattctcaagaacaaccatcatcttacattgtacgccgtaatagtcttcataaacttttactgacgttacggtaccggagacagtcactcgtccttctggtgcatcccctttattcttattcagctcattgaatatattatcaaagacctgttttgaatgttcctggatagcctctaagatgctcttatgagctctaacttctgccataacaacatctgtgccatcttgcaatttccactctttatatggaatgcgtacttcaagaggataaccatactcgcgaagttctttgtactccgcttgagttaagcggagtttccaccaaccgtggtcacctgtatactcaggcttatccagtgaatcaaattctgtaacatacggcaagtaactgcccgcgtgataagcttcaacttcacctaattcattttcccaaagataaccatcaaagggagcatgaggacgatcatctttgccccaagtaggagctacaactttatcaaagtattcacgaccgaagcgggtcttcgcccatccagcattcaactcctcggcgcgtttttcaactttcgctcggtgtgcttggcgggctacacgattttcttcaacaagcgcagagataatctcggttaaagttttcattttattctccagtttggttgacgagaccatcttatcaacagcctcgccgaaagtaaactactttgtgaaaaattttctccaaagcagaactgcgtctctacgagatacttctactgctcctagagcaactgcttgcttgcgacgaacatcgcgcaaatcatagtgtggaactcgcttatcctggaaccaagaacgtttcattccgatagcttctgccatagcatgcaactcatcaaggttgtcgctaaacatatgacaattctttacttgatgacctctcattttccagccatgattcatcaagacatctacgtatactgtcatttctgattctcgatgtaagtttcaatgatgaactgtgctaaacacagaagattatcttctgaaggagaatctactaaattctcaaccatttcagaaatagttccaaaagcttcttcagtattgaacatttcttgaagttcgttccaagtaggtgctttcatttcaatctcctcattagttaacgaagctatcttatcatggcttttctaagatgtaaacaacaaaagggcccgaaggcccttaaaaagatcggaaatcactgttaaaccatggcgactggtgttgtcgccgcttaagcaatttcagttggtatttcctattgtcttctataatcatcttagaggcttttagctcttcagccaatgagacctgtttacggtccatcaagatgaggttctgggtcttctgggcaaacgtctgaatacctttgagacattccacagattcctccatccctcgtttatacttggttcgggcagcatttaactgcccttcgtaatacgcatgtatagacactatagtactaaacacgttttacctcaataacatctaagataatatcttcaacgtcttgctcagggaatgccacgccattggtctgcccatgctgaaatactgcttggtacgctgacggcgcagaaattcgggttgaacgttctttattgtcatagcatttgccatcaataaagcgtttaaatttaacttcataggtttttaacattattacaccttagcataattgacaatttgttcacggtcagcaggccaattcaaatcagagcgctttttgtttgaccacgcaatattttcttcagcccaatgaagtttagccgatacgctcttttgtacttctctgatggcttcttcaagataaatgcctaaatctctcgggttagttccttgagttttaaatgcattgaacaaaatatttcttacgacttctttaaattgattttcaacttccggatgaatgaattcacgataaccgttgcacggatatccaaaagcatctaccatacgagcagtactaaattctttgttcataatccgagagcctcgcgttcatcaggatttaatttagccaaagcggcttctttaattttttccaaccgtttacgcttagcttcaggtgtttcttcctggacggtgatagcagcctttttagggaatgtccatgattcaccattttcatcggtgaatgtaattagttctgttggcttacgattaactgtaccatctgagccccaccaagactgccccttaactgcttcttcggcaacgcaatatgaaccataataaccaaacaactcactacggcgatcgtctggtgaaacatacgctgcataggcttcactttctgtcattacccatttcattttaacacctcatagcgaataagttcaatacgatttttaagctcttggtatgatttacgccaaggcttataataagcatttaaatcttggtgttgtttatgcatttcgtctaaatgctttactgcatcctgtacatttgcaaggaaagtatcaaatactttattagcgtattctttcctgagctcaatgaacggaggagcacgaaatacgtttaccattacacgtagttcatgataagaagaatggacttcagctaatacatttttcttatcgccaaaattaaacttataaagtttttcacagattgcttcacaggatttctctgctttacccttgggtttacccgcaaagatatgaccaggcggatatactttaatatcgtttaaccaacattcaatatctttaatagctgctaaactcattgtacccacgctccattttcatcaatgtaattaatccactcgttaatagtccaggaagaggtatcacctttaggagtatcaacgatatacattccgcctttaaacaaaacacgttttacatcattagaaattaaagtagccattatattttcctcagttagggaggatttctcctcccgtttaaattatttcagcattgttacttcagcaatttcacgccagtttttacggtcagtcgcgacgaaatcaccaatataaagagcagtacggagagatacgttacgcagacgatttacgttatctttcataaattccaaaacttcaataacttcggaatttcttaacccacggttctgtaacatagaagtagtcattattacatcttgaactcggaccataatctcttcattagtgtgaacaccaaggtcaagataaaccgaacgtgataccagagcttgaagatgtggagcaagtttagaaccgcgctctaattcacggtcaatatcaacgttagtgataaagaccacagtaccttcaaactcaaactcattaggaattcctttatcttccaagaaagaagatgcagtgctccagcatactttacgtttctctcctgaatctaatgcagctttcagaaggttcaaaatgtccatatcagagaatacatccacatcgtcaataagcagaactgaatttgcttcacgtgattcccaaagacggcagtacaaaccaattcctgagattttaccgttcactgatttgtaatcaatagcgttagtatcatgggcatgttgtaatgctttatccaaagagtaagtcttaccgatacctgctgctccggagataatcagagaacgaatgttcccgtggattaaaccgttagtcattaatcccatgacgttaaagcgtttcttgatacgctctttcatttcatcaacggattcaacaacttcaattttagcagctacaccgtcaactgtaatatcatctttgaatacccaaacaccacgctttttaccattcagttcaacaaagactttaccatcaccctggcgagaatcttcagcacttaagctatccgggaaccactcaccgagtaactcataagtacctgaaatctctttgccgaagtaaatccctttcttgatggtgatagttgacattttattctccgttactctgttttgttttgatggagctatagtatcattctacagctccaaagtaaactactttttaattatttttctaaaatttcattgatgtagtaaggacgaacctttgaaccgagatagaagtcatcaacaaaatcaatcaagttgtcagtttcaccgcggatgatagcaagtttagagaacgcttctcctaccatcattggttcaaattctacgccgtgagcttcagcagctttaaaggctttatcaatgttgtttacaacgatttctaaagttttcattttattctccaatattttatctgtttgggtggtacaggtctatagtatcaccagctcgcgagcttgtatactactttatgcattcttttgaaacaaaaagaggagcccgaaggctcctcagttatgcatgcttattgatagcattttctgctatacgttttggaagtttacctgcccagcggaagaacatgataatcgctccggcaataaacgcagggaaccaaaagatgagataaaaccaatactctcctgctttctcgatggttccatttttgattagatgcttacagacagaccaacccacgacaaagtaaattattgcaacaacgattggcactactacgctccacagtaaaatcatatttcagcccagtaaagtgagaaccgaagagtttctccggcccatgacataaatcggtggatttgttttcgagttggtcgagcagagaatttagcattttctctacgaccagtctctctgcaaactgcttccaagtaccaccgtctacctttatgaggtcttccataattcaagaagaccttcattgtatcatttgtagtaagaattgtggttttcaagataaaccttctcgacgaaatcgtcccagaatttcatgtctactttcttaggcattccattcttttcggcttgatgagcaagacgctctactgcgtcaacggtcgtttccaaaatatcctgaacttctttgaacggtaactcaccagctttgattttcttaatcaagggagcctgtgtcagaggatatttaaggtcaccggaggaataaatctcctgcagctgaagaccaccacgaagggcatgacttagtgctttccaatctacaccttcgttagcttctgccttacgagcgcgttcgccatattcagcatcaagcttctcaagggagtacttcatttccttaaccgtgatagttgtctggaatttacgacctaacacattatagaaatactgctgacctgatttatggtctgtaaaggttgtccactcaaggaattcacctaccggaagacgatcggcgatgtccttaactttccaacgatcgttaatgcctttctgcttaggacgatcgtcatatttccattcaggaacatctcggataacatccaggactttatgcaaatcggctaagcgagaacccttaacaccatacttacctgcctgtttacgaacatatccgagataagctttcatatcagtagtatagaaacgggctcggttgtcttgaatgaatttccatacttcaggaaggtcagatgcaactaccaattccggcggagtatgcagcatgtcaagtgcaactgtttcaccgtcagcagcgagtttgaagaagtatttcaaactgaacagctcatggtcaatgtcatctttagtatttttggttgcactgttattcgtattacgattagtatgattcatcgcctgacacattagaatatcacgcggatgaggaacaaagatttctttgaaatccacatctgattcaggagttgaagtaccgtatagatgcgaaccaaaataagattttacgattgttttcataagtagatatgattccctttagcgaatttaactaatgcattagaacgtttgactgcttcttctgctcgagttttatctgtagttctttttgatgtacgataaacattaccaattttttgactggtgtaataatacactacttcatgagtatgatactcttgtccatcaggatgctgctcacgacaggtttcttcgcgcagtgtggtttcatacataggaactaatgcccaatcaattcctgtgctaatgattgccacctgaatgtcaagtctgttccagcgaaatgcattgatatatcctagtacccgtgattccgggtccatcattgcgaatttaatgttttcggctgaagctaatggcatttgtttcacaatgctcatactaagttttttcttagtagttacgagttcaatttccatgacccgccctcataatatatgtctaaatcaatgttatctttgccgctgtacttgccagtcaaaggaataaatttaaccgtaatcttttcgccgtcatcaaaagtaaattcggcaataggatatgtagaaattataccacgttcggttttagcacgaaagacggcccgaaggccgttaacgatataaacttgatcattcttcactagttttaccttctacataatcaatcattgggcagactttctgcttacgagcttttaaatactggatgaacaccaaaggttcggcttctgccggaagaccagcttttacccgagcgagtttcttggtatactttttctggatacggtaatgtttaaatttttctaaaccaaaaataaatccaaaagctatagctgcaaacacaagcataaatgctgctataaccgctgcgccaactggtactgctataacatttaaccaaaacgtggataaactaatacccatccaggcgagaattcctgtctctgccacaatcggccaaccgaacatccatgcaacggaaccgatgaacgtgataatcgccgaagaaaacacaacatgaagaactgttgtccaaaagtatccgcacagtgtttttggcattttccacatgttgtcagatttaaaccacaggttcattttgaaatgccaagagtttttattaatattcattatcagtccttcatagtcggaatcatagttacaagatattttacgagctgttcagcatcggatttatcaatcatcaagatagtaccgttgcgctcaatttcaataagtgtagaaccgtatagctctacggtagtcagatgcaaatcattaatgtatggactttcgtcctcaattactgcatcgcctttacgggattttccgtcccatactaatttactcgccatcttttgcctctatcaagaattgaattaatgaatcaatttgtttagtatcaagatgaattatatcattgccttgttttagcacgatacgactcaactttttagtgaaatacgaattcacaacctttacatgcacatcgctgtacggattatctaaattggtactatcaagaatactttccataattacctcaattgtgaatcttttgaaccacgacgattataggcagaagtcattacactgtcccactttccttgacattctacacaccgttggcagcctttaacaagaaggcgacgagctattggaatttcctcatcacagtcaacgcaaaactcttcggattcgcgttgttcttgaagctgtttctggagacgggcccattcaatcccgtctgctatagtggcttcacgagttgcgaagccgtcatccgatggaccccatccgttcatttcaaactcgctataattaaatcaagcaaatcgttaacaaagttgtaagtaaacatcggatattgatattgaactaccatgtataaaataatcaagatgtttttcattcttcgccatcatcaaagtcgtagtagtcgtaatcacaggaatcaagataagaatccatgaattctttctgccgacgaaaatcctcaataggagtcagtctgtctgcatacgcttggtcatctgggtcactgaacttgtcttcttgcagttctttaatgaactgttcagcttcttcacgcgtccaaaacccacgattaagattatgaaccgaacgtttttcacctggcttgaatacgcccatatcatgagcagaacgctcagttgaataactttcagtttggccagcatagttttcatattcgcaaatcacctggaagaaaggagattttcgcgaatatacaccacgaagaccaagttcaacatcatacgtgcctgatgcaacaatgtaacgcgaaatagaaccagacttggtttcagtgcgattaacaccacacacgtgataaaagatttttccaggttgaagctcggtagttaacttaatcataatgtttttctcgtttggttgttgatatgtctatagtatcatgtaatgaagggaagtaaacaactttttgaaaagaaaatgcctcccgaaggaggcggagggtattactgcaatgataacaaatacttagtcttgtagcatagacctgtaatgtcatccagaacactttggagggcggcaggaactgacttgtagataccatcggccttagccagaatgaggtctagcatttcaatggtgtcctttggcagctctttctgtgatggtaaagccggtgtataactcttacctgagaatcctaaccactgctcaccaaaagcatctatcaaatctggaatctcgttaaagaaaacttcatacgctttatgtctggcatacgatttggtatcaaaatgcgctgaatgaaaatacgcctgagacgccataagtaaaccgatgaattcatcttgtggagtaagtttaccgtcctttacaaaatcattgaacttcattatcgagttgtatcctcatgcggttagcatattcttcacctgctgaacgtcctaaagaatcacaatctttagaacaagactcgctcttccatttactttgtatgaaagaatagaactgttcagactcttgcttactaggctccttaaatttagcataaacttgtagagctccctcaacatacgagttataatccgaaatgtcgtcgtgtgatgcagctgggaatgaaatcccgcagcccaacaccagggctaagcaaattggtttaaaggccatacggcctcctattatttttgtccagtattacgtttgtgctgaagtacagccttaacttctttgaggtatttttccagcttacgtttacgggtataatctgcttttgaactgtgctgacgaatttcttcctgaaggtgcgaaataccatgcccaatctcacgacgaagttcgtccagttgttctacagtaagattacgaagttgcttttcacttaaatgctgcatatacacctcatcagttagtaatagtatttatataagtatgtgttacttaatcccaaagccattcgcagatgccttgctcaatagttctagcaccagcttcgtcccagttatattcttcgtcatacttcaatgcgcgtttaatttcggctttatgaaatagacgtgggatcggcatagcataacgggtccaacgtagagttttccagaatccatcacgctttgatttagcaatcagtttcttggcctctagcggtctttcccgattttcagaaatacgcagttcaacatatttctgttgggtttctttatctttctgagttttaacgtattcgttatagcttttaatataagcaaattcgttattattctgatcgttccatttggaagattttactacatgccagcctttacggcgaattgttctagacattattacctcgttaagttaaagtacctcaacgatagtaaaatcctgatttaaaaaatttaatattcatgaatagattaccttacatttacatttggggcattcaggttctttattcttaagacgcttggtagctgtctttggagcagtgttgtaatcatatacatgaagacaacggtagcacatcacatattttttcatattaaaccatcaacgaaagcaatattacgtacagcaagaatccaattatgagtactatagtactataccacttgctatggcaaataagctactcatgtttaatataacacccattcatattagcaataaagtctttaccttgtgctaatactttacagctagaatcaagacgattttgtgcttcttctcgtctgtcgctttgcacagacgctgctgcagcaatccaaatgaatagcatacctacgattagcatcaggatagtgttatacgttcttggcttcattataaacacctaccagttcgcaccagtgtttacgacaaagagaaacgtatttgtcttcaccaccaagttctactacttcaccatcggtaatagcatttccgttttcgtcaatacgagctaccattgtagccttacgtccacagtggcaaacgcccttgagctcaacaagtttatcggctacagaaagaagagctttagaaccttcgaataactcgccgcgaaaatcagtgcgaagcccatatgccattactggaacatcatacaagtcaacgattttacatagctgaagaacatgttcagcagtcaagaattgtgcttcatctacaaatacacaatgaatatcacgttgtgtttgtgcccacttgaaaaattcaaggatgtcaatagattcgtctactgtattagcttcatgacgtagaccaatacgagatgttacctcggtggcagaatctcgagtatcaatagcaggtttaagaatgagagttcccattcctcgttctttatagttatgagctgccgtgaggaggttagccgatttgcctgcgttcatactcgcatagttgaaataaagctgagccattaaagggtctccataaaatcagaaatagctttcttagaacgaatgagttcatcgtattcttcaggtagaccatttccgtaaatggcactaatagctactacttgctcagcacctgcataatcgtcaatcaactgccacagtttagttttttgctctttagtaatcatctatttacctctaacaaaacagatttagcttttagcttcttcatattctaccaccataatgtcaatatcaggtgttgctaaattgattaatttctcaattagttcccaatcaccgccagcaataccagctccaatttttggaatgtacagaggacgattataaacaatacggccagaatttagttcatggaatgcattaaaaattgcgccgtaatcaacatttggacctggagcatactgggtgtatagattatagcaatatgcagtgccttttttgtgaatggctcgagtatgagttccaagcttagctaaattgttgtcataataacggtcttcatcgatgtcaatatcgagaattggaggatatgctttagcaagttgtcctgctacaccagcacccattgtagtaaagcaattacacccatgagcgatatcgcattcatgcttcatgaatagttctacaatattgcccttaatatatccagtaatcatttattcacctatggaattttatatgttgcatattcattaagattattgtatactcttaaaaatatagcattgttacaattaaggatagggttcagcactccttgttctttaggatgcattactccatcaacagaaacaccgtcactctgcattccacatccgcgagcattatactcaacatgtggaactatcacttggtcatctttatcttgataattataaaatgacattagcagttttctactactaggcacaaatgctatttcaatattgttcttgaatggaccgttgctttctattttagtcccctgcgccgctagtacaggttcaggatagcctgggagcttttcccaggcattaactgaaaatgcacagcataataaaatagctgcttttttcattttgacgatagtcctgacatataacgagccattaattggtcacgatacattaaacatatattttcgttaggagcattgacacataaatctttcatgctcttagccttacgatttattagtgttgtccactgagccgggctacgtgaatcttttactccatcgctgaatgccgaatctaattcaagcgctaatatatcaacacattcagaattcgtattacaaaatgttttagcaatacgaagtgaatccgacattgaattttcagcattaacagagaatgccaatactaatccaagaagcgcggcgtactttatcattattccacctttatatgtagcattttatgtttctttaagaaatgagctttctctaggacatctgacgcataagagtttcctcttttgacattccatcctgcgttataactagcaagagcttttcgcatgttgccgttatgtatatttaaccaatatgaaagctcaatatatgccaactccgcagaattacgtctggatttaagcatttttcttatttcagaatcactaaggtttttaccttccagtttagctctggccttaacggtgggtaagtaattttgaaaaaccccataagaatgatgccccgttcctgcttttaaattggctcctgccgaagattctttccatgatatagcagccattatatatcctaagccgttattatcatatcggttatgtggagatttttcctttccggatttttgatattgttcaccaaaattatatgcgtaatgcaagttgtcaagttgaacattactgaaagttggctcagacccaaaggccgttgaacataaggccattagaccgataagcgcttttttcatgtttacctcaattaatgtgtataacttttgtgctgattttacctttcaaacgtttatcattaacgaatgccatacgacactttatactaggtccttttcctggtcttggaatatccatggtaaatcctagccacagatttccatccgtaatttctaaccgcatgggtttatactcgatattttcatcaatgtcttttgggtcaattggaagccaaggcattgctaaaaattcattaatttctttaagatgattaggaattttggaaagaacagagaatacatactcttcatcaatttcacgttggatagcacggtccaacaaatgatcagagtacttagtgaagaaaggctctttaccctcagccttagctcgggcacgaactgataaattcaaagagcgaaaagcttcctcaaacttacgacgcagtttagttctgcgaatgaatacttctgggttagttgacatagttcattctcctttatttgtagggccatagtatcatggcccgtaaggaaagtaaactactttttaatatttttcttctggacagaacactgcacggcaagcccacatagaagcttccttcagtttctgttttgctgtacgaatctgggcaatacgttcgtatgcttcatcgagtacctgcttgggttcattgactgacacttggtaattaattaatgcctcttcttcaagagcagtaaagataagaccaagacgagtctcagcgtctttgatagcattgactttaccaatcttttcatcggtatgtggcttgtatcctttaatatcttcgattgacattatagtgcctctgtgaaagtacgagcgataacgtcgcgctgctgttccggcgtcagggagttgaagcgcaccgcgtagccagaaacacgaatagtcagctgcggatatttttccggatgctcaaccgcgtccagcagggtttctcgacgcagcacgttaacgttcaggtgctgaccgccttcaatttttaccgttggctggtattcaatttctacttcacgagccttgtaaccataaaaagtttcagcgtctgtaatagtatcttctttaagaacttttgaaacgattactcgtgcgtcatcgccatcttcgatgtaaatggtgcctttaagttcaccttcaagaatttgatatgctttcatatttcctcttaattagattctttattccaaccatgcatgtatgcggtaattacactcattttattccattcgtctgaatgaaacttcgcagctgcttctagataagttattttatcttcatgataagtaacttcttcgtcagtttctttatcgtactctacaatttcaataggctcgtcaactccatatccgcgagtgcctatatacgttgtagcttcttcccattgttttgtggtttcattccaagttccattctgatgggcttcatagaaatcttgctcgccagaattactgaaccaatcgcagaagctttcaactaaatgtggaggacactttataacaatttcagccattgcgttgttttctcttgaatgcgttggtcatatgtgattaagcttgaactaatcacgcctttgagcttgccagatataaactcaattctaaaattaggatagcgattcatccacttcgtgttaggagcgttagaaatgaattctgcacctttaaacggaccagacagaaacttgtagcgcttgtactcaagcaggttgccagccgtaaccattgttattaattgcttcatatcggcaaatcctgtattttccattactgtaatcatatcaacaatttctgtctgtgtcatcattgcattcctatcacgaaaaataaaggcaaggtatcattaggcatagaccatctgatagcttcctggtacatatcatagaacttcatcatatcgggaactttcattggttcttcaatgataattaatgctcttccaaactttcttcccctaaacttgtaagaggaatcattggatagaaattccctgattgtcatcggaacaattgatttagctatctcgttagccggtaatttattaattaaatgcgatgaattatattctcgtagaataccttccatcaattcagatgattgtgtgtatcgagtagataagattataaccgaaccatcttcaagcaaccaatcggtagcgaattgacataaggctgtggtctttccggtttgtcttccaccgtctagacgaagggtaccgtactctcgcataaggcaagacggttcataaaaactgtagttgggattattcaatcgtctgtctgcagcgtctctgaaagcatgcatcagggtcaaataaatgggagttaagtgtttcattttagattccagttaaaggggccattccttggcacatgtttaatccatcgacacactatgtaaaccccttaccgcacttgcgctcgaccttattacaggtagggaaagctacttcactcagaggactcgacgttcatgaggagaggtcgtgtttagctttattaggaattagttttaattacgggctgcattagcaacggcgtaagcgtattgaacattagcgtctttaaacgtacctttagtggtatctaaatctgccttaaatccgcctttagccataacctcggcgaattctttacggaaggccatggcgtcaagatttttccaggctgccttatgcttggcgaattcgaggcctgcaaagttgacagccttagccaatttattatcaataacccatttacctgctttaggtacaaataccgggcctttctgtttagagaatagttttaaattccagcgccgaaggtctccatcagctttaacaaaagctgcgtctaagttactagcaacaacatcttgaatatgaccaaatttaagcccatcggcttcaatatttagatcgttacgccagcgaagtccttcccaggcgaaggctttaaagtcggaagcctttgtagctaaataccgctcaataggagctgttttagggtcaaagccgtttcctcggtaggtccactcatctttattaatgccttggacctttcctacagaagcttcagtgataaattctttataggttttcattttatatcctttaagttaatgtgtggtatagtagcctccatttaataaggctactataccacattaccgtctcaatgtaaactacttaattgatttagcgtaacgaatagcgccgcgatcgtttacgaatgcaattttaccattacgcatgtacatggtaacagtacgctgataaccgttagaagttttgccagactgataacctactaatgcaaagttgtcttcaccaggtttgttctgcttagacttaatacgctcatgaccaagtgccattaaggagcgtgcatcgccagatgctactgctttacgagaagactcatcttcaattgaagaggtgaaatcatcgaatgaatcaaacttggcatggctcttattatataacttgccgtctactacgtagttatatccaacaacatccatttcaatttctgtaccatcttctaacgtggcggtcatcttctgaccttttttaaatttcagaagattacttccaacagattcagtcattacgccaactgttgctaaacgggattcatttaaaaattcttgataggttttcatttattttccttgataagcagaccaagttccggtccgcattgtttcaattacacgacgagcacgatttggtgtctgacgataccaacgtgaatttgcaagttccttggcagcagcttcccactttttagcgagtaataacttcattgaagctgggaacccggctacaccagacacacccatttggaataccatgttaatcagagcagctctacgaacatcatctaatacattatataccgggtttaatgtagcattagcaacaatacctttaattgccttctcaacatctttggcaaaaattacttctgcctcagcctgagtaatttgtccacctgtagaacgacctactagcttgtccaggttagaaatagctaaagattttgacgggtctttagtcagtaagtggccaataccaatggtccaatacccttcggtatctttataaattttgctgtcatatccttcatcgatacgcaacatgccaaaaatatccataaggacctcctattaaattataggagtatttatttggccctacacttggctataaacatctcaatgctgcaatcttcatacggcgtccatttacctttccaccatacataatctcttttatcgtcctctggaatttcattaaatcctggacataacttttctgccatgtaatacgacgattttgtatactcactatcactgaagacataccgtgatttcattagtatacgcgacattttatctctaggatgaaatatgctaatccattttccatcgtgaataaatcgtagctcatgcttataaatgtgtggaatgcctaattcaacggcttcttccatagtaacctcactgggctgtgctatacatctgtgtcatgattttatacaaacttggtcccatcacatatttccattgagaaggtttaattaaagcaaatgcgtcgatttccgggaaagaaattccattttcatctttatggtaagctgtgcaacagcaattcttaaacacttctgggctcacagggagcatatatccaaacagatggatatccttattgctggcataatcatgtcgtccaaggtcatataagaggtcctggtcaaactcagtaaatccagtctcttccttgcattcacgaatagcagcttctttcggtgtttcaccaggctcaacatgacctttcggaatatcccatctagagcctctgccctggacatatgtatttgtcatacgacccatgaaaagccgtttgtcatcggtaaagaataagattcctgcactgagctctttcattggcattcattccaactttcttcaagaatatcttccatggcagtatagaccatagactctagtacaccatcacaattatatgaaccctctaccgagaaatcacagataggtccattaatactaagcagttcttctttaagtgaaatctcgataccgctcagtgattcattatcactgtaacacagaaggcgagtatcaccattttcaaattttacatgcactgcaacagccattatttcatctccttaatccaggataaagtttcattacgagaatcatctttagatttttctttctttactttgggcttatcaaatacaccccgctgccgttgagaaacgaattgcaaccaacgagcaagcattgcaaaccaagttccaacacctgacatccaacctaaatagaacaaagtatctccaaagattggtgaaaagaagtaaaaaccccaaaaagtcccaaatccaacaaaagctgaaaatgaaaaccagataagcagaaataggaaaaaatacccaggctcatcgtctttaatcattccacgataacaagttttaatcattttctgcagctcctaatccaggcattaaactcttccttttctttccacttcttgtatttcattcggtaagctaaaaatgtgcagcaattaatcaacgcgataatcagcttccacatgaggctgaatgcgaaaacacctaaaaataaaagcaacttctgaaattctgagacgttcaacccaaataatgtccctccaataattacgaaagcacaatataaaatccatgtcacgattccaaaagctggcgccagtccatcttggttccaaaacccgtcaggtttacattcattcattttcttctcacctctttaataaactcaaacgactttttgcggttccattcaagagttaaattcttgcactgttctttccattcagcctttcgttcacagttatgcttaacatactttacccaacgaaatagttcaattaatcctagaccaagtaaacctattaatccccatgtaagtaatattacattcactaatgatgtactgctaatttcagccaaattcattacgtcgattatgataagcgttatcatagttccagcagcacagaccatccccggaattagaacataatcagtttggtcaaatttatatacataattataaacgggaagttcacttggcagatataaattactcatttctgcaccctcttacggcaatatttgataaattcatcaatgattaattgtttgcctaccatgttgttagagtcaaacatactcataacctttggtggcaattcattaatgcagtaatttaagtaattgatgtaatcatctttagatgtcacatatttaactaggttaatgccaagacgatagctatttttattatgaataatctcaataactatggtgtacgttgttgaaccagaggtagaatatccatcggcattagcacgggctgatgttagatttgatggagaatcgttaaaagaataaattccgtaccgaagtgcaaagatatctacaagcttaactccatcggaaatagacgaaatgctagaaattaagtttttcagcttagaatagtctttaagaacgatagctcgcggcaaaactgtagtgttatacccgttatagcgagttttccaattctcaggccgagtatcaagacaagcaaatttctcaagaatatcagtgatttctgttgggaatcctgctgcaattaattctttaatttgaggtgttgccattggaatatctccagcgcattcatataacattttattatccaagttagggggcccgaaggccccggtaaaattacttcagactttccagatattcctggacatcagcagtggtggtttcaataccaggctgagtaccgctgaaggtttcaactttcatcatgatgtcttgtacatctactttagcgagttccgcgatttcaatcacgtcatcagcagaggtaatacccagagcagaagcattacgggtctcacggatgtattcgagtttcactgccaaatcaagacgttggtcatcaagcttaactacagtttcttcaatttgggcccgcatttctttatattcggcagctttatcgcgtaaagctttagcagtacgacgatacagaagacccagtttagcatgggtttctacattcataccttctgccatcaagcgacgaatttcgcgctctttggaagcacctgcctggtctttttcgtcagcaagtttcagcagacgcttttcttcatttactgatttaacatgcgtggtacgcagtttagtgatttcatcaataatacgatttgctgcagtggtgtactggtcttcaacagaagtgttctgtgcaacaaaggtaccgaatttagaacggatgaattcaacaagttttttcagaatagacattttatttcctttcaatagttatggtggttttattcgtacggattaatccaatcataaacatatggtttaatgattagaccctgttcatttttgctgcgctcgaatatctcgatgtaatcagtaacgtatgattctaatccgagaataagtacagactcttttccttcttctactgttgctttaattaaacgctcgatggctattttagcttcaagacgaatatcagcaagagtttttggaacttcatttgtatgcattaatgagttcctccattttgtccaaaactgcgatatcaacaagacgattaaccgccgggtcatcggcaaactcattgtaagttgaaatcaccaggttctcaatagttttcagagcagccattcgttcttcaccggatggaaaatttggagtttcaccaaacagcctagcaaaagatttaaaataagtttgcgctactaatttcaacttatcttgatacataccaatttcctcagtaggtggggagttcattataactccccaaaattattagcagttaattaccgcttcaattcgtttaaccaaagcaggaacggttttagcaaacttgatagccatttgaaccgtagcagcttcttcatggtaaactcgaacgtagtactcttcaacagcaggccaatctttgcgaacatgtttaatcaaatctttcagttcacgagtttctgctacgttgaacactgcgtgttcatgttcacctttaatccaaaccgcgcgataacgatcaggagtaccatattgattataaccacgttcaatctggataaagttgaatttagacattttattctccgttactctgttttgtttcgatgtagctatagtaaccgagttgactggcgttgtaaacaactttgtgcacaaattttcaaataattttagggaatctggaaggactttctagagagtagaatggatttatacagcttgggatatagaaatgcccagacgacctctagaaggtatctgggctgtagttttgatattattgtatactaaaaagccccgtccgaagacagggctctgagaatcgacagcatcacctactggcagatgacctgctaaattcattcctttgaactcggaggcatcagtctcatccaaaggagtatagcgtcaggaggttatgcttgcgacagggaacaaccgactagcggcaatggacgaaccattctcttctatctgacgactcaacgagggcatacgcaagtttcccttcgaatttggtgccgattgcaggagtcgaacccgcgacatcttcattacaagtgaagcgctctaccagctgagctaaatcggcataagacggaaataaggattcgaaccttatgtagttgcacagacgtatctgccgttgaattcctcactaagtttaagcaactattcccggggtcttaatttggtgcaccgagagggattcgaaccctcaatccttgcggcgtagcattttaagtgctatgtgtataccagttccaccatcgatgcgaaatggtcgaggcagaaggattcgaaccttcgacctgcggattagaagtccgctgctctatccaactgagctatgccccgagattgttcaggcaggactcgaacctgcacgactgattccgtcagcgatttaccaccgtcgccagcatatgatgcaatatgcgagctcaaaaggtgtctgtcaccatgtctaccgatttcaacactgaacaagataattatattactgattatttatagcatttctcaaacgataaagttgattgcagaattcgcgttcagtcaaaatcgtttcagaaattttatttttacccatactgtgagtgagcgtagcattcctggtagcagccaaagcttttctgaatccttcatttttactaagtgcatcgtatgctcctgttagtaaattctgatacgcttctgaggcacggtgaataggaacacctttccaataaagcgtttgtgttggccaccaacgtttcttcttacctttgaacttagcggactttccgactagtgtacatacatgtgcttgcatttcaggtgaagaaaatttgagggactgcaagaatccctccattgaggcacattctacgccatcatagataaatttatgaggagcaaagttgctcaaagcacatgatggatatgaactacctgaaccaatatccatttacttttccttcacgtatttcaaccaatcaacttttaacgggctttctttttgtttatacgtaattccaacatggaacgcaaccggggcgtcaggaatacggatttcttctttaatatcgaagatttctactttctcaaatacccgcatgaaatcatagtcatattcaattggattacccaaccaagcctgaatagcatacataacttcatttgaacaagaatagtggttatctaaataagcatcaaactcttcgtctgaacaatcatatgcaggaacatcaacgccaaagaatttcttggaaaattcaggagttacatacttctgttcagtatgaagcttttcaagaattgcctcatggttgtaatcattatttccaaggcattcaccacgccggccacgagaagaaaaccattcaagaacatgaattacttgattaatctcttctttttctaagccataaaccatttgggtagaataccgatcagcatcattttcccaagtggtaattgccattgctaagcctttaggaataacttgtccaaatttaactttcattatacattcctcatatctattcgttctaaggtatattctttaagaacaatctgttgaccacttttcaacaagaataattgaataggatttaatccaaacccgtgttctaaatcgtggtcagttaaatttctgtcgcaataattgaaatacatgtcaattctaacgagaatggttttcataactcctcacacgaatttggtgaccctggcaaagactcgaacatgcaaccaatcccttatgaggggaacgctctaccaattgagctacagggcctttatagaaatcttatgacttttataaaagccctccgaagagggcgccttgtcgggcttatccacctgctaggcagaattactcacacataaaatcagctacttcccagaagtcatttttaactgctactttaaccaccggagaaatttcagatgttttaatagaaacaattacatcacctgcgacagtttctaccagaccaacgattttctcgctgcgagcaacaaatttactcaccggatgaaatttaccggtagcagcgaacatagcttcttggtcaacaatcagtgcgatacgtttcattctttttccttgtttgttttgatgtagtaataataacaggttattcttgtagcattaaatctcgaaaatcgttccgttttcccacattgttgcgaacataggagaaaccttaacgaatgatttgcttcgcattgcaacgtagtcgttatctactttagccaatcctgaaacaatatcagtaatacggccacacttcatagaaccgcgaccacctttattgtatgtgcgttctccgtagaaaacgatatcaccaacttgtacttctcgacctttagaatctttcatcatatttcgcctggcaaatttgtttaaaatctaatacaagttgctctacattagtatcagcggttaacggagtaacttgccgcagtttattaattttacacccagagtgataagcaataatttcttgaatatcacgttcactaaagtactcatatttgagtaatgtgtcgtatcgatatttaatccaaacccacatacctttgcgttcatcaaatgtatatgcaaagtcagcgttaatcattaaatcccgtttagcacaagatgaaagccctaatgctaaattaaccggtccatccaaagacagcttcaccgtaatagcatttacgtcatttgatacaccaataaaaatattcattctatttccttcgcttgtttttggccttcttgtcgtgcacgagaacgtcctgctttatgcagtgattcgtaatatgctcgacgtctatcaatgttttctgtacgatatgctttcccgaaatgggatgttttgaagccgtaatatttcataatataattctcaatggcgagtgattggacggtatgcccggcctcgaaccgagtcacattgactttgcagaatccatgtgtttaatatatcacccatactcgatagcatatctgaacgagactgcaatcccgctactcagcttacgccatcttgtattgtgtcataccgataatttggtctccatagaatgactcgaacattcgacctctccatcccaaatggagcgctctaccagactgagctatacggagtaatttggagcatccaaagggaatcgaacccttatcaagtgagtggaagtcacctataatagccgttatacgatggatgcaaatttggcaggccctgaaggaatcgaaccctcatcactgggtttggagcccagcataatagccgttatactaagaacctgttatttggtgggagtaactggactcgaaccagtcaccgctcgattatcggtcgagagctctaccaaatgagctatactcccatggaaagctaatcatctaattgttgatgtaccactgctatgggcagcgtttaactttcataaatttggcggagagtaaaggagttgaaccctcaccgtttccgatggcccggatttcaagtccggtttgctaccactagcgctactctccattaattggtgaaggaagtgccatatagacacaattcgcttagcgacagccacagcattttgcgggccgtgtatttttccaccattccttcattgttggggtgaccgatgggagttgaacccatgactacgagaatcacaatctcgagttctaccaactgaactacggccacatcaatattcactccatccatcatgaggacttcatacgaaattaagagaagaatgatcagttcaacccctgtagacgcgttgaatgaatattaatttggctggactatctggattcgaaccagagataccggagtcaaaggccggtgacttaaccgcttgtctatagtccaattatttggaggcggaggcaggactcgaacctgcgcgtgtcgggatatgagcccaacattctaccaactgaagttaccccgcatttatccgggttcttgaagtactaacaagtagcttgatgtagaacacgctaaagatataatcttacgaatatagagcttattccgtgggaacaaacagcttcgtcctcggcattatcttacaggacttaaactcatcttcaagaactgccacgttactttataaacttatttatgaactttctagcttgagtatgactaattccaagtttatttgcaaattttactagtgcaccacgctgtgtaaaatctatagaattatacaggtctattcgcaaagaaatttcgtctgcatttaacttgtgtgcatggttttctgatatttttatttttgtttcatcagaatggttatgtccagtaaaaccagtagatattattcttccgttagcgccagcgtctttagcgttttgcgcattagttgcgcaatagatgttatctaaagaatatggtccaacatctcctttacgacacatgcaatagttatctgatgctctaccccgcaaatgatatttgccagtagctttccaccatgataaccattcatcaaatgtcaatttgaattcaatacctcttgatttggcatgcactttttgcatgcggtacttttcataatctttcatgttgctctcgtatttggcagtgctgacgggtgtcgaacccgcgatctctcccgtgacaggggagtgtcttaaccatctcgactacagcactataattcgctttcagagatactctggcacgatgccgaagcaaaggggaacaggactctcatcaccttggtaccagatgaatcttgtttagcactctgttctaagatgtatccctgaaagcgaactttcaacgccgtaagaaattataacatgaacaagcattaagcaggatgaaatcatactccttaatacaaacgccatgccagggatttctgtgccgacgatttatcagaacgtcttctgacttcttcatttggcgggccgtgcaggtatcgaacctgcctagtcatttctgacacggattaacagtccgtcgcttaccctctcagccaacgacccgaatttggtgggacaccgaagactcgaacttcggacacccggattaaaagtccggtgctctaaccaactgagctagtatccctaaatttggtggggagtaatggagtcgaaccactcgagccttttgagcaacagatttacagtctgtcccgctacccctacggtctaactccccaatgggtaattttatttatactgctctaaaattaatcagagcagttgatagattaataataacaaagaaaacctaaagcatattacacaatcggtgagctctttgatttaaccaggaatacccgatgtggtgaatccatatgagagagcaatacccggtgctcaggaattggacttgtatggaaaggaaccacacgataacctttaggagtaaatcctagcaaaataccaacgcttgctgcagaaagtgacccgccgcagtagtatgatactaaatcaccaggctggatttcattgtcaagagaatcggttttggtatgcttaggcgtaactaaatcattagtaattggaacgccttgtgcatcatagtattcatgggcaagaagcttataattctcttgatagaaagtattaaatgcagctctgatattcatcacaatttcctcacaattaatctttgtatgcttcagttgaacctttagcaacagtctcaaatcgggaattcagtatctcaaaatagtcttgatacgttccctggagggcttcatagcattcttctaccgtagtgtagacacctctgatttggtcagagccaggagcaggataataattagaccaagttaaaagtgcgtacattacttacgtttccagctgtagtgagccaaaataaaaagcactgcaatagcaagtagtgatgaatgcagtgctgccagtagtgcacctagtcctacacccaaagtaacataatcatacttagttacttcttcacggtttaaatcatagtttttgatgaaccactgcttaatctttttcatgtgctattttatccattatgaaagaaatgatacccattagaaatgcaacacttaacactgatactgtttcaggaagagacataaaggctgcaccgataatgccaaaacctaacgctcccatgcagatagttgatgcaacatttctaattaattcacaacgtttcattttattctcctcaagttgatagggttatagtatcactactacaacccgttgtaaacaactttattcagcgccagcggcttttaaaagctttttaagattagcagaacctcgggctgaaaaagttaccttaccatctttttcaccgatgctgccagtcaatttagaaagtttatcactaggaacttttttaaaatcggctaatgtcccgtcaacggtttttgtaacaatcggcagttcatcatcctgtcttttagcttctgtaataaattcttggtacgttttcatgttgcttccgtttggttagtttgttttgatggagctatagtatcaccactaggaccggttgtaaacaactttgtgaaataaatttctatttcaaatcttctgaccagttcagttttagtggctcttggtactctctatcaagcactacaggtacttgaacttcaccctcgaagtgagctggaccgacattgtagctgagagtaatgtgcggtgagtaatctgggaaatcatgagttgctcccagagctcttgcatattggtgacggaattttaagtattctgaatctagtttaagaaccagtgtacgtccgtcttgcgtgtcccatacttcaagtttacctgatgtagcaacttcaaaacttcctgaagcgcaaacgtatggaacatgaactcttgaatagcatatcgtcgtatgaatcttatgacgaggtacaggattaggaaccttcaactcacgctgaaggtcctcaatagcatcaagagttttctcagagaatttagcagctacatatagaccagtgctaaaatcactgaagttcattaggcatcagcttcttcagtagtttcttctgcgaactgtgcttcgatttttgcaaccaggtcgtcaagtttaacctgaccatcttcactgatttcaacgccggacacagcaatcagtttctgcagtacttcttcatactgtgcacgcagagcggacagaccttggatggtttcagacaggtcaaatacacgaactttcagagtatcgacttgggcttgcagttgttcagtagtcatttttgaattcctaatatagtgttgatttttgaataaagttcttctagagaaccgtcgttagttattacgatatcgccttcgcgaatcggaagtccacgctctgtgacgtgagtatcttttttagaaccttcttgctcaggacgaactacatgaataactgtagcacccatcgccctggctacatcaagttcatggtcttgacgggtatctgggacaatgaaataatcataatcaccaaaagtatcagccataaccaaagtaaatcgttttacccaatacatgcgatcgagcttatcacagacaatgtcagtcccaagggtctgcatgagacgacgaattgaccatggctcaacaggtttatttattacaacttgacggatgacttccatcgtatcgccgtcaagaattttacgcttgctatcataaaccaccccgggtaaaggcaaatcatgatggacatattcaatggcattcgccataatacgaatcacgtctttagtagacagatttaaatcctgctcacgatcgtaatcaataccttcaatcattgaccgagtaatgcgaggaaactgacgtgatgtatcgcgataccactcagtaagcattgcatcagccaacgcatctttaattggacctgctaactgatgctttgttgcgttatagttatccataatgtagtcagcagttgtatctttgccactacgttttttaccaatcaaaaataaaagcttcaaattattacctcatagaaggatgcattcccataactttctgttgatactgggattcgcgagtatcattgacagaaggtctaccagtaattattataccatctttttcaacttcaatgtatttgtactgcaaagttgctacacataccattgctgggtcggattcttcggttaaagaatactcaatttcagataaatcactcacccaacctccgatgtagcggacagttaatactatatcatgtttatcgttatcaagaacatgcattaaaactgcaccaggaaatccttcaccgccgttattccatccagacttgtctcggtcaatgtagttttgacagcttaacatccatttgtacatttgtacccatgaatcaagattttcatctactaaaaatctaacaggaacagcgtcaaactcaaaagtagacccaggcaatttagcacgatgcatgccttgaggcgaacctacagtatcagtagcaggaatatgaattccaggaactacagctgtttgaagattagctttaaacgcttgggtgaggcccccatcagggacctctaatataaagttagttgtgttagtttgattaaacagtccagtagacattatgatttccatacagaagtagcagagtagcgtttgcctttcgacatgaactgctgcagtggtaacatgactacattcgcccaatcagccggttttatctcaattaaagcaccctttatattaccaggaatatatgctttaatcattttgtcagcgccagcaaatcctttaacttggctccagtttatctttaatctggtcttattagatatcactggcgtattagcatactgtttaagaagttcttctaaaaactgctgacgagcctttggcggaatgtagtgaaggtttaacccatacatcaatgtggttgtaccttgctttccaagaccaagataaactatcaaaggaaatttatcccagaatggaagagtgtctttgtgcttagcgtcatacatgtaagcatatagctttccaggttgaggcttggttacagaatgaccacgtatatttttctttatagtttctgcaaaccatttagcagatttattgtttactgctgcgccttcattacgaattttatctttgatagagcttcgaaatgaatttaccatcacaagagcacgctcttgtttggtcattttgttagcaggttttttctcaatttctgctactttaattgccgttttaattcttgatgcatgacgagccattgctttactgaacgtagcaggatttattcctttgctttcagcgaatgatttagacgtcatgccttttttacgagcagcagagtattcaactcctaatgctacccattgattttcactacgggatttagctttaggcgattctgtagcttcagtgataaattcaaatatagccatcagcctttccatcctaattttttaagtgaatcttcggtaattaacctaaattctatacccattttactggcagtagcttgagctgctttccacttatcaacgtttacagaccaggtgtaaatttcatcaatgtaccgtttcttcgctgatgtcgtcaactttgttggtttgaccggaggtctagtttctttctttggcttaacttcaaaaaagaactgttgaccattagaaaacttagcccagaaatccataaaataccggcgtttctttccatctgcattactaaagtatggaatgactacttcttcgctattccattggactacatctggatgattgtcaagccaacgcatcatgtactgttcccatgtagaacgataagtaatctttctaaagtcgcctttatatttgtggagattctgtggcatgaatttgccagaatatgccatagtggcctccttataaatactgttattaatatttataagaggataaactatgctcttctcattttttagtccgatagattattctgcaaagaccgtaaaaggtgctaaggcaaaagctatcccaaccgctgacatatttcgtaattatcgcaaatatttcgacactgtagcagaaaactatcttttacaaacatattacataagtggagctcctagaccagaagaattagcatatattctttatggaaatagtcagctgtactggattcttttaatgtgcaataacgtatatgacccgtttagagattggattaaaacccaggatgcatgctatcaatttgcacaacaaaaatatgcagatgtaggtggagaccaaatactctatcacgtggatgcaaacggcaatcgttattataacctcgagcaatatcctgaaaattcaggcatttggtatgataaaggcgactttaatcatcagtaccctcaatatactggggctttagctggtgttgacatttatgaagactctattatagaaaatgaaaaactgcgccaaataaacattatcaatcctagtgatattgaagcatttctttctgatattatacgagaaatggaaaaagcacctgacagtgaatacgaatcaggccggtacaaatcccagactaccatcggagaagttttatgattgaaatgaacgattcattaaaatggtttaccggtgttgttgaagacagacaagacccgttgaaacaaggaagagtgcgagtacgtgtttatgggcttcatccatttgaaaaggtgcaaggagctataaccggtcttcctactgaagaccttccctggatgtcagtgattcagcctaccaactcagctgggatttctggagttggctcatctataaccggaatggtagaaggaacatcggtgtttgggttatggcttgatgaattcaaaacagcaggactagtaataggaacatattctgcgcatagaaaaacgaagccaaactatacagaaggattttctgaccctacaggtcaatatcctagacaggtcgggtcagataccaacccactagttcaaggcgatgaaactgggtatagtgctataccaaatatcatccaagacagaaatttagacattggcattaatcctgatgatgctgacttaagtgatattcctgaagacccaaatcctgcaattacaataacagatatgcttaatagggatgaaggtcttagattgaaggtctactgggacacagaaggatatcctacagtcggtattggacaccttatcatggcgcaaaaagtacgtgatatgtctgtcattaataaaactttatctaatcaggttggtcgtactgttacgggaaatcccggtatcattacaatggacgaagcagtcgcgttatttaagcaagaccgcgataaaatgctttctgatattaaaacgaattcacgtgtaggacctgtatatgctaaagtcaacaaatcaaggcaaatggctttagaaaatatgagttttcaaatgggcgtaggtggattagcaaaatttggtaaaatgcttgatgccatgctcattggtgattggaaaaccgcttatacagaagcaagaaactctgtttggtttaatcagacaaaaggtcgtgcttctcgtgtttccatgattattctaacgggtaatatggaatcatatggagttcctgctccaaagccagaaggaaaaaacctgtctgctgcttacgtagaaccaaagtctggagggaatcctgaagacccatggactccggaagattcaagaattcttttcaaagaacctgagtcttcatataatggtcagtatccatatgttcacacaatggaaacagaatcaggtcatatccaagagtttgatgatacacctggctatgaacgttatcgtattgttcacccaacaggttcatacgaagaagtagctcccgatggacgccgtaccagaaaaactgtagctgatttatatgacatgactcagggcgatggaaatattttaatctctggggataagaaggttaacgttggagggaacgagacctattataacatgtataatcgtcgacagcaaattgatggcgataacacgctttatgtacgtggaaatgaaactaaaactattgaaggcgatggtactatttttgtcaagggtaacattaagatagtcgttgaaggaaatgctgatatccaagtcaacggtgatgccactactaaagtagatggcaaccacgacgtaaccgtcggtggtaacttaacttggcaagtagcaggtactgtgaattggaatgttggtggggcttggactgagacaatggcttctatgagctcaatcgcccaaggtcaatacactgttgatggttcacgaattgatgtaggttaatcatggctgatatacttcctattaataccacgttacgcgaagtaatagaaggtgaatacgttgagcagtactttactgctcaattatctaccaacgaaacattaaaatcaataaatattatcgactatcaaccagtatctgatatctctgtgtctgaaacctattataaaggtaattataactcagtttttacttttggaaacgatgtgcttaaataccgtgaaggcgatgagctgaagtccgcttcagcgtgggaggatttacctaatcccaaaactgctgatttatatctgtggaaagcccccagaacactagagaagacatttacctatacagttgagataatatatacagtgacagaagaatcgtctggaggttcatccggaggttctagtgctccaatcgtaacagaatataaaaagcaaaaggtttactctcaaaccgttaaaggtaactggagcagatggggcgaccaacttcgtgcttacgtatatgcggggaattaaatggctggtctttcatatgataaatgcgtaactgccgggcatagtgcgtatcctccgacagaagtaaatgctacacaaagtaaagtattcactggtggaatagcggtattagttgatggtgactcaattacaccgcacaccaagacggttgaccctcatgatacgcatggaggagttgttcaacctcgcacatccaaggtatttgtaacaggcaaaaaagctgttcaaatggccgatccaatttcttgcggcgacactgtcgcgcaatcaagctcaaaggtattcatacactaatggctattaaagaacctttaaattatcagttaacgcgtactgcaaacgctatcccagacgcatttactggagcaacattcgacgaaattaaaaatcagcttattaactggcttagcgggcaaaaagagtttcaagactttgattttgcaggttcgcgtttaaacgtgctattagacttattagcatataacacgctttacatacagcaatttagtaatactgctttatacgaaagctttattggaacagctaacttgagaagttccgttgttcaagcagctcagcaaaacgggtatttgccaagttccaaatcagcggctactgcatctattatgcttgaggtaactcatccaaatccagagccagcaataaaaatacctcgtggaaccaagtttttagcatatgcacgagattcatcagtagacccatacaactttgttgttactgaaaatgttattgcgctaagagatacttcagcaccagaaggggttaatagatatcttcctattgtcaatttggcgcagggacgtattattcgtactcagttgtcatatgacccgaagaaacctattgttattcgtgatcagtcgattgaccgtaagcaggttaagctgtgggttgatggcgctgaatggactaactggacagacaggtcaatggttcatgcttcatccatttcaacaatttattatatgcgtgaaactgtcgacggaaataccgaattcttctttggtgagggtgtggcagaagcatctgtggcaggaggagttcttgaaagcaacttcatcggcggattgaagcctactaagggtgcgcaagtcgttattgaatatattcgtactgatggtgaagctgcgaatggtgcgactgatttcagctatgctgataccctgcaatatatcgtagtaaacaaaatcattgaaaactggtcagattctcctgattatgttggtgctgatggtggtggggaacctgaagacatcgagcgtattcgtgagctcgcccagattaagcgcgaatctcaaatgcgttgcgtgtctaaaactgactatgagtcattcgttagctcgcgatttggttctattgtgcaggcagtacagtgctttaccgaccaagataagccagggtatgcgtttattgcaattaagccaaaatctggactgcagttaaccgctgttcaaagagaagacatccaagattatcttcgtccattctgtcttgctcccattaccccttcggtaatgagtccagactacttgttcatccgtcacaatattaaagcctcttacgcgctgaataagttacaagaatctgagcagtggttacagtcaaaaattatagactcaattaatagatattacgttgatgaagttgaaatgtttaacaaaaatttcagtaaatctaaattattgacctatattgatgatactgaccattcaatcatcggttcttctgttgatattcagatggttcgtgaaattgtcaactatttcactcttcctagcgcaggtattaaatactataatactattactccgcggacgttacgttctggtgatttggtctttactgtcactccaaccgcagattcatatccagttaatatcgttggaactgacccagataaaaatggtaaaggaaatatggtcattggaccatttaaaccaggtgatattaaagagaatactcatattcagccatatactgaagacgattttgatagaactgctaatggagaaagaactcgttggtacaaaatcggtgaagtagattattatggtgataatatttactggagccttggagctattggagccgatcctcttcagtttgaagaccaaagtattgagctttattctactcctacccaggatatcgtcttcgcccgcgatggaacacttatcgtatttgagaatgaccttcgtcctcaatacacaactattaaattggagcctattactcaatgacaattgcaccgttcgtcaccagcttacgaattcataagctatctgcgaatcaggtcaatattcgttgggatgacgttggtgcaaacttctactattttgtagaactggccgaaactcgaaacagagcgggggaagttatccccgctgataatttgagttggtcttcactgggttataccgcggataatgattggttcgaacaaaatcgtattgaaccgcttacttattataaaatgcgtgttcaaactacgtcagcagggtttgagccgtctgaatgggttgaaacagaagagttccaaactttcgaagaaaacgcatacacatttgagcatatgcaagaattcagtttagtgaaagaattcattaaacagaagttttctttaaacaacatgtcgtatgttaacttcaacacatctgccatgatggcgtctttgatgactgagtcttttcagtttagtcctgaatattctcatttatcagctattgaaaacttcgttgtaggtgaatctggatatcatgaaattcagggacctattgaagcagtgtgtgttgataaaaatagaactatgctgggagaaatagacggaattttgtatctgtttgaaagattccaacatatggttaaagtatcaaatgataaaggacagaattggcaatacgttcagttatttaatgaccgcgtcggaaatccggtttctagagtggtaatttatcaatctaaaactacttcttatgttttaggatatgataaaatcttttacggaaggaaatcatctgacgtgcgctggtcatcaaacgaggttaagtttagcgataacgaagttacatttgctaaattgggagaccagttaaagcttggctttgaagtagaattattcggaacgtatgcatcattgcctgctgacgttaccaaatatgctgaagcgtttacatgtaatgatgactatttgtacgttgttgcaaaagacactgtccgtaaagttaaattaaaagatgctccaatagatactgaccctttaagtcctacatttggtgaaaaggtgtttgaaaaggaagtatctcatataacaggcaatcctaaatctgtatgctttaaaatggattccgttggaggcaaaatctttgcccttattaccggggaagttaaaaccttaggattagacccaacagacccaaggaacgttgtggattctgcaactaaaggcgtctatgtttaccaggaaggcacaaatacttggaagcgtgtatttggtaataccgatgaagaaaaacgtcgtatagagcatttatggacttctatgtcaactgacggaaaggaaatattcttttcatcagctaattttaagacaacagagtacgctcaggatattgagcttgagacgaaatatccagaactaatttctaccgcagttaaaaatgttaacccaattcagtatcactctgataagcattatcacatgatgagtttcagagcagatgaattttcaagatgggaaacatttgttcctggacctatgaggttttatgctgaaccgtggtttgtctggatggctcgtgaaggcaacagatgctggataagtacagctgaccatgcagttgtcatttataatgatattctttatcaaaaaagagtagatgcagcggcgcaggtaactaccgagcgtattctttcggaagtgtgggataaaggtgacgcaacgttttattgccctccagtttcatttaatggatttttgcagtatgcttctggcatcatgtttcacgaaccagacggaaaactgataggctattacgcatttgactaccgtgttcgtgaccaggtaacgcttaactggaaaccaactgatgtaatgtttaaggcgtttctgcagaaccaaacacgggaagaagactggacacctgagcatactccaggcttacgtgacccagatttgcgtccgtatcttactaaaatgatgccggatagttacttgctacaagatagtaattttgagcacttttgtaagtactatctccaattcctttcagatggaaatggaacacattacaacagtctcgttaatcttgttaagaacaagtatcctcgcgaagaaaatgcatgggaatatctgtggtcagaagtttataaacgcaacatttatctgagtaaagacgctcgtgacgctgtcgtccgtttctttgaagcacgcaagaatgatttctatgctactaaaggaattgaagactcatataagttcctgtttaaacttctttataacgaagacgtcgaaatcgatattgagtcaaagaacactaccgaatatgacattattgttgaaagcacaaatatttctgatgatttagttggtcgtacgatttatactgcttccggtcgtagtaatgtgacttatatcgagagagaataccgggatggtcgtctgttatggcgtattactattcataacttatcaggacggttcattgaaggccaggaaattaaatcagagcgtacggactttgagggtattatagttcaaggtgttcgtggaaaggatatgctgagtaataacattgattatataaaccgcagccgttcttactatgttatgaaaattaagtctcagcttcctacttctcgtttccgcgacgatgtattaaggtttgttcatccggtaggtttcggtttcattggtataacattgctgacaatgtttatcaatagtggcttaaatatgaagcatgttgagactatcataaataaactcaagaactataaatgggatgcaggactgccatcagtttatcctgatagagttgctattatcgcttcagatgatacaatagaaagagacccaataaccaatgagcctaggtattcttcacgtgctcaagctggtgaacctttcccgttacctgctaactataatcaagaaaataacaatagtgttatcgctggacaaaatcctggacaacgacgtaaaccgttaagtcctacgtttgaccaatcagcagtaacgtttgctaattatcgcgatttagttaaccaacgtcttaaagacgatgcaggtaatcctcgcgatcctgaaaatccgacacaggtaaaaattgatgagtaattcaacaagagcaagttcaacgcgtagcacgatttatcgtgctatcattacatctaagtttagaactgaaaagatgtacacattttataaatcaattggtccgggaacggaccaaaacacattgtatgtttcatttggaaaaagcactccatggtcagataacgaatctgaacctgggtttgcacctccatacccggccgataatgaagacggtgtggttgatatttggacaaatatgatgggtgcagttaaaattgaatcatctatgcttgactgtgttgttccaagaagagactggggagatacaagatatcctaatccacgcacatttttaatcggcgatatcgttgttgctaactctgcgccatataacagaactgatgctggatttggatggatggtatatagatgtattgatgttccaaagaatggaatgtgttcaattggtaatcttacaagcaaagaagaatgtattaagcttgggggtaaatggacgccatccactatttccggttcagcgcctcgtgggcgtggtgatgcaaacggtaccgtcgatttgggtgatggatatctttgggaatatctatatgaaattccagccgacgtatcaattaacagatgtacaaatgaatatatcgtagttccttggccagaagagattgaagaatctccagcccgttggggatttcaaaacaacttaacttggcaacaaaacgactttaatttgatttatcgcatgaaatgcaatactatcaggtttaaagcgtatcttgatgcggtttattttccggagttcagtcttccaggaaataccggatttagacagctatcaattataactaatccgcttgaagttaagccaatgccaaattctcctaacgttaaggctgaaaaaggttggtatagcgcttctggtcttgaaagacagtcaggtgaaatgatttacatggaaaatcggcaacctattatacgttcaatggaccaaacagaagagttaaatttaattttcgagttttaattatggggagcctttggctccccatttttatataaataagactatactttgatatgaggttaacctatgtatacagataagggtaaaaaaataattgacgtcggtgagatcggtaatgcttctaccggcgacattctgtatgatggcggtgtgaaaattaatgataacttcgacgccatttataacgccttcgctgatcaacgattatttgcagccggtggtggagctttaaaccaaaaaatccacgcaacaagttattatcaaaagataaaatttggtgatgctaactctgcagggacagttccaatggggtcatgcatagatgctgattgctcagaaggggcagttcaaattcgtctttcaaaaggtaaagcgggagaagctgtattcgttgtaaatagtaatggctcagcatcaaaagctagatccataaaaataacaacaaatggcgaaggtgtagcagatgcatttaaagatggatcgcgagagttgattatcaacacgccaagatgtagaattgaattgtggtgtgttgaagtcaaagctaacggtgctgcagtttgggattattcaatttcaagtatgtttggcagcacatattcgccgttagaagctacatataatttaacgagttctcctattaatattcggcttggatataacgatgattactctactgttaaattgttattaagcttcagcgcaaatccaggtggtcaaaccatcaaaaggcaatcatctgaagtcatgcttatgattgacccgactattacttcatcagcgccaaacggaagagtatttgacactgaatatgcagtgttaagaagcggtgaatcatctgaaaatgaaaagatgtattctatttcatactctattaacgcgcagaaagatttaatatgcacagcttcaacatcttatggaaacgcccgtttggcagttaaagttattgctacacagaccgtaggggtatctcaataatgaaacaaaatttgatagtaggccaatctgtagatgatgggtctggtgattacctccgtaaaggtggtcttaaaattaataacaactttgatgatttatattcagagttaggtgatggttcagttccgttcgcagcaggtgcatggaaaacttttaaagctagtcctactggaactactttaaatgctaagtttggtcaggcctttgctattaatacccaggcagcaagagttaacgttcagcttccaaagggtacagccaacgactataacaaagttattaaacttcgtgatgtttggtcaacctggcgattaagcccaatcacagttattcctgctcaaggcgatacattaaagggttcagcttctcctaaaattttcaatactaacttccaagatttggaattggtttattgcgcccctggccgctgggaatatattgaaaataaaactgtagataagctaactaatggcaacttaagtactgtagcgaaaaaatcaattattgctactgctggtcagactgactttcttaacatttttgatggcgtagaatataacgaagactctcttaatgtatatcgtcgtggtaatattttatattacggcgaaaccagcgttatggataaagccaatgccgattacggttctcctggaacagtagcaggtcaattggtagaattaaacggtaaagacattcgtttaaaagttccatgcgttgaaggggaagtaataacatttgaaaccttcctagatggaattggtgtttatcggtcttcatacaacaagttggctatccagatacgagattcagcccagactacatcccagacgattcctgggtcaatgatagtagataaccttgctactctccgcagaatcactctggatgacatgggtgtacttccaggcgtaggggtaaatcctaactcgcttgaaatttcattgaacggaaaggaattacttgaagctggaactgctggtcttcctttattttattgtgaaggcgcggaaggtggatacgcagaagactgtataaacaatggtggtcaatgggtaaattctaaccaagattacagattagaatttgactcaactggtactaacgtcgaagctattatttttggtgaggcgtttgaagataaagaccttcttaccgtccgttggttcaataataacatcggtactactatggatattgacgatatcatggcagaaaccgaccaagtgtatatgaatgctgagcaattagtaactctaaaaaatcgcattgaatacacaaattatgatgaacctaatcagaaaaatatgcgtccggttgctgacgatattatgattaaagtcaataatattgcagcattttttgacgtaatttatccgattggcacgatttatgaaaacgctcacaaccacgcaaaccctgctgactatatgggatttggggtgtggaagctttattcacaaggccgtgttactgctggttggaataacgattcatctgatccttatttttcgcgtaacaacaataacttaaacgaaaatggtcagccatcattaacagcaggtggaacggttggagatttgacatttacgttaggaaaagaacacattcctgaactaatgtcaagagataaagttctaatttcagaccctgaacatggaagcgtagttatcggtggatgtcaattagacccagacgcgcagggaccaggttattctaaataccgtgaagacactgttgcggtaaacaatggtgtagttccaaatgacatcactaaaattcagccaacaatcaccgtttatcgttggattagggtaggttaaaatgacgattgaaactaaaactcgtgaaggagctaaagttaattcaagattagctgctttttcagaatatcgcgttgacccgcaaaatattgcggtaggaaatacggctcctatagggagcctaacctttgaacaaatggatttgggggtttggtatccaaatactgaagctgctattaatgatttgatgtcattgcagtcagcagaaattggaactattatttgcaatgacactggaatatctccacagcccgcacagcaaattacgcgtgctactttttcaggtgtcgttgcgttagagccaaaagaagacggctctgtcggtgacccagtaataattcatattcttggcttaccaattagaattgcaaacggtgatgactttgcagcagtagcaacacgttggtatgataaagtaaaagaattagaagctgttggaaaggttgttcaacaggttactcaatcgccggcaacaccccagtatgttgatattattcatttagattatcagaaccataattttgaaacatataaaaagtatggtttaactgttgaatttactattacttcaccagctaaagcaggttatggacaatgggatgctatcggcaacgaatctaaaaccttcggcgcgaacacatttactttccactattttagaaggatgggataatggcccagaataactataatcactacagtgatttggccaaatatacgatatttgacccaacaaatacacaatggcctgttgctataaaagacgtccaatcagcgttagagctgattggtagctgggcaagaactgataccggattacctgtagcatctcctacagtagccggtgtaattcgcacagcaacacaggctgaagttgatgctggaactattggtaatgctgcggtaactcctgctacattaaaatccacagttacccgtcctgaagcaactacagcagttcttggcttaacacggtatgctactaatactgaagccgcagcattaaccgcaggaaatagaactattaccgcggcggctctcggtcatgtgtttaaaactgtgaaagcccaagaaaacgtagatggaactgttaggttaactactgcggctcaagcacaagcaggaactgacgaaactaccgcagtaactcctaagcgtgttgtagaaatgattggaaagttcagtgtcagtcctcctagttatacctctgcgacagaaagcaacttgggattagttcgtgtcgcaacccaagcccaggtagcagcaggtgctgttcacgatggatacgcagtaactccaaaaaccttcatggcatcaaaagcgtctgacagtgtatttggtatagtaaaatttgctaaagactcagatgtggcttcagctacttctaacaatttggctgttactccaaaaagtcttcaagcgctaaaatccaccaaggataaatatggattaaccagattatcaggttctccaactactgatgcttcattggcagcggctgcaacagatgcagtctttaaaacccgtagaataaacggaaaaactcttgataatgacataacaattactaataatgatattaattgttatacaagacaagaatctgacgggcgttacatgccagctggaaccagagtaggtaatgttacttgggttgaaggacaatcttggattagtcgaggtgcaacgtttacatgtaatgcaccatgggaagcttctagtagattagctctaaatgttaatgtaaaatttgagcgtaacaacgacggatatgacaatcgtattttcagatttgttgtaatagttaacggttcccaatggggcggtgaacttactcttaacatcgaaaatactaaaggcggacgaaatggtcattcatggagatttgaagcttacgcatctagcaactttttcttcaataacattcctccaaatgccactgttcaaataagaccaacagaagacagtcgtattgtattttatgactgcatgcttacattctgtacaaatagaccgtaaggaataatatgaccaaactagtagattcgcttccgtttgtagacggaattccagacgattttcaacagagaattaactggataaaaaatacagagcctcttaatggggcttcaacccgctatggaaatgatggagaactgaatagagcttctgtgcagattcagaaaaatgtggttcaggtacataacgatttgaacaacgttggaactgctgtagaaaatattcaagtagatgtagaccaaatcaaaaaatcgttagaaattacaggttcttctgacgccattgagcaggtttatatcaataaaaagaatattgaaaagcatgatggacaaattcttaaattagaagaagacaccgaaaaacttcgaactgaccttgattttctcgaagaggatgtaggtgtttatgattctagtaaagatgactattacagaacagttcgtgataatatagtttgggttaaacgtgaaattggtgcgtatcctgggcaagatgttaacggacagcctaagcaagacgctccaggttctggtatgaaataccgaatcatcaataatgcgtcagctatagtaaaacatgacgagcgtattcaggcgctagaggatgcatacaatgattcagacgtaggttctctgactattgaagtaaacgacctgcgtaaagaagttggtcctaaatccggagctacgtcagcttcaatttatgcaaggcttgtgaataacgctgatgctatttccgcagctaataatgaaatctttgctattaaccaagccattgattttaccaatccagtaaaaattggagctcgtactactagattagaaaacgattatcgtatagttgacgcaacacttaactctgcacaaaccgggttagttcctcgtgtcaataatattgatgctcgtttggggtcttctgataagcctgatactattgaaggaaaaattagttctctttcaactgaccaagggtacatttctgatgttgtaggacgtgatacttcatcagggcttcagggtcaagtagcatggataaatcagcaagttggtattgttcctggcggacagccgattcctccggggtcaattttagcgagaatgaccaatgttgaagggatgcaaaactctcagcagtctgctatccaggacattcaagtagaacttggcaataacagcgaagggttaaaaggttctgtatttacgttacagactcaaatgaatggtgacttttcgtcagaaaatccggttcagcgggatggtgtgtatgccactgtagtagaattgcaagataaattcgtgactgcagttactgacgtagaacaagatggagcatacctccgtaaacggggcgaatggtttaagaagccttcatcaataggtgaattcagtaaagaagatttcactgttgatttaagttctgatgcattggtaaatcctaactcattggtcgctgcttcatttaatgctggcattcgtattgtcgatgatattattgttgatgacgatggcgtattttgtgtagaaactgatacagttatcaaagcttctgattcagataaagccgtccaaattgttattctcgtcaataacattgaggtgtttacttatagcctaggtgttaaagcagtaaccggcgagcagctgttgaaaaccaagaaacttattaagttttcgtctggcgatgcaatcaaaattgtgtatagagctgcttcagaagaatcaaaagttcctgttagtattaaatcattggatattactattcatccagcagtataatgaaagggacctccgggtccctttttcgtataaatagaatataaagaggagcttatatgtcatacaacacatacaacccaaaaacgcttaaagacgctatacttcgacgtctaggagcgccggtaattaatgtcgaagtaactgaagaccaaatttatgattgtattcaacgagcattagagttgtatggtgaataccactttaacggattgaataaaggctatcaagttttttatattggaaaagatgaagctgacaacgcaagatttttaaatggtgtgtttgatttgcgtggtcgtaatgtatttgctgtcactcaaatcgttagaacaaatgtaggttcattaacttcaatggatggtaatgctacctatccgtggtttactgactttttaatgggaatggccggaattaatggtggaatggggtcaagttgtaataagagttatggaccaaacgctttcggtgctgacctgggctattttactcaattaatgacttattggtcaatgatgcaggatttgcttgccccacttccagactattggtataactctgataatgaaatgcttaaagttatgggcaacttcatgaagggtgacatcattgtctgtgaatgctggaccaaatcatttatgaatacagatgtgatggtaggcaatacagcaggatacggatttgccgggccgcaaactgctgatcattggggcttaggagataggtatcagaatcctgaccttcgcaataacggccaatatgcaggtgaaggtaatacaaatagagaaggtgcttataataatcgttgggtaaaagattatgctacagcactgactaaaaaattgtggggtgaaattctgtttaaacaccaagggctacaattagccggcggcgttacagttgatggccaaacacttaaagtagaggcccaagaagaaatcgagaggctccgagaggaacttgatttacttgacccgggttgtcctattctgttggggtaaaagatgactacatttaattctagtttattcgctcgccttgaggattaccgaggatacaataaaactaatgagacagaaattctcaatccttatgtgaatttttataatcacagaaatagccaaacgttagcagatgttttatcagctgaggctattcaaatgagaggaattgagttttatttccttcctcgcgaatataacaatccggatttgcttttcggagaagacccatcaagtaaattcaccaaggcttggaaatttgctgcttacttagactcttttgacggttattctggtgataacacgttcttcagtaaatttggtatgatggttaatgatgaagtcaatttgactattaatcctaatttgttcaagcatcagaccaataattcagaaccaaaggcaggtgacctgatttatttcccgatggataattcgctgtttgaaattaattgggttcaaccatatgatccattttatcagttaggtcaaaatgttcaacgtaagattactgcgcagaaatacatttattctggtgagcagcttcaaccagaattgcagcgcaatgaaggaattatcattcctgagttctctgaacttgatttagaaccaatcaaaaacattgattctcttgctgatatttctgacgtacaatacgcagaaagcgatgcaattaataaagaagcctctgaatatgttcatccgtattatgttaataacggaagaggacttgagtctcctcctaaagcagattcgtttgatgacggattttttgaataaataaaataaagatgggacctttgggtcccttaggagaaatcatgtttggacattggtataattcgtccttacgccgatacattgtattgcttggagatttattttctcatgtacaaattgctcgttggcgtgaagacactggactaaaatatattaaagtacctatcacttatgcttcaaaggaaaagttcctttctcaactcggaaaatggactgctatccagtctaccgagaataaagcaaagatagaaaccgttttgccaagaatgaatttgcacttggttgatatgcaatacaacgcgatgtataaaacatcacagttgaatagaaccaaatcatataaaaccccttcaaaaattacatctcagtataatcctactccgattaagatgatttttgaattgggaatttatacgcgcaaccaagatgatatgtatcaaatcatcgagcaaatcgttccttattttcagccgcattttaacacgactataactgaactttacgacaaagacacgagctttaaccgtgatgttagaattgtattacaatcattttctcaggatgaagctgttgacggagataatattactcgtcgtagattagaatggtcattgatgtttgaagtcaacggatggctatatcctcctgttgccgagattgacggcgaaattagaaccatttatttggatttcttcgctaatagtaaagaattaacaccagaaggaaattttgaatctgtggatagcgaagttactccacgtgatgtccagcaagaaaactgggatggttctagcaaacagacgtattctcacgatattcctattccggtaaatccggaggctcctggaccgagaggtgaaaaatgagtgacttacaattagatatggctaaattactagacatcgaaggaattcccggaatagaagggcaagaaattccggtttatgaaaaattagaattagtcgaagttaaatctaatccaaatgatcgtaaacctgaccttgaagacgactattctgtcgttcgtaagaatatgcacttccaacaacaaatgttaatggacgcagctaaaatatttttggaaactgcaaagaacgctgattctcctagacatatggaagtatttgcaactcttatgggtcagatgaccacaactaacaaagaaattcttaagcttcataaagaaatgaaagacattacttctgagcaggttagtactggaaagggagctaatcctcatcaaggaatgaatattcaaaatgcaacagtctttgtagggtctaccgctgatatgatggatgaattcggtgatgcctatgaagcacaagaagctcgagagaaaatagtaaatggaacagactcaaccgtttaacgttctgagtgatgcccatcctttaaatgacgggaaacaggtggttattcgccacccgtctgaaatggaaacgaaaattgaaaacggagttcgtttctttaaatcgcaatgggatgataagtggtatcctgagaaatttgaagactatcttaagttgcatgggatagttaaaattcgtttgcaaggtgaagacccagctcatttccaaacgtttaaggacaaaaataataagcgcacccgctatatgggattgccaaaccttaaacgagcaaatattaaaatgcagttgacgcgtgaaatagttgcagaatggaagaaatgccgagacgatattgtgtacttcgcagagacctactgtgcaattactcacattgactatggtaccattaaagtccagcttcgtgattaccagagggacatgctggaaatcatggcggctaaacgtatgacttgttgtaaccttagtcgccagcttggtaaaaccactgtagtagcaatattccttgcgcactttgtctgttttaacaaggataaagcggtaggtattcttgcgcacaaaggctcaatgtctgcggaagttctcgaccgtactaagcaagcaattgaactgcttcccgactttcttcaacctggcattgttgaatggaacaaaggctcaatcgaattagataatggttcatctattggagcgtatgcttcaagtcctgacgccgttcgtggtaactcatttgcaatgatttacattgacgaatgtgcgtttattccaaacttcatcgatgcatggcttgctattcaaccagttatttcatcaggtcgtcgttctaaaattattatcacgactacaccgagtggattaaaccacttttatgatatttggactgcggcggttgaaggtaaatccggctttactccttatactgcaatttggaactcagtaaaagaacgcctatataacgacgaagatatgtttgatgatgggtggcaatggtcacttcaaactatcagtgcttcttctcttgaacagttcaagcaagagcactgcgctgaattccatggcacatccggtactcttatttccggtatgaaacttgctaatatggattggattgaagttactcctgactcacacgggttttataaattcaaagaagctgaagcagaccacaagtatattgcaacccttgactctgctgaaggacgagggcaggattaccatgcactaaatattattgacgtaaccacatctgagtgggaacaagttggagtattacattctaatacaatttctcacttaatcctcccggatatagttattaaatatctaatggagtacaacgaagctccgatctatatagaacttaactctacaggtgtttctgtagcgaagagtctttatatggatttagaatatgagaatgtcatttgcgattcaatagttgatttaggaatgaaacagacgaaaaggtcaaaagccgtcggatgttctgcactaaaagaccttatcgaaaaagataaactcattattcaccatcgtgctactgttcaagaatttcgtactttctctgagaaaggagtatcctgggcggcagaagatggatatcatgacgatttaattatgtcactcgtaattttcgcatggttaacaacacagcaaaaatttgctgatttcgtggataaagatgaaatgcgattagcatctgaagtttttaaacgcgaattagaagatatgaacgacgattacgctcctgtagtgttcgttgacgccgtgaatagcgcagaatatgcgcctcaagaacatggtctttcatttgtataaataataaaaagcaaacaacattgaggatatatcatgcctttagtctctcctggaattgagctcaaagaaacgagcgtacagagcacggtagtacttaacgctacaggtcgtgccgcaattgtcgggaagttccaatggggtcctgcatatcaagttactcaaatcactaatgaagttgaactggttgatatgtttggcggccctaataaccaaactgctgattactttatgtcagcaatgaactttctgcaatatggtaatgatctacgcaccgtccgtgtagttaaccgtgaagctgctaaaaacgcatctccattggttgataatattgaatggactatcactactgctggtagtaactatgaagttggtgataaaattacggttaaatatgcagaccaaactgtagatgacaccggttcagttactgcggtagatagtgacggaaaaattaagtcggtgttcattccgacatcgaagattattgcatatgcaaaaagcattaatcagtacccagatttagggtcttcgtggacaactaccattacttcacagagttctggtgtttccgctgtcattactttaggtaaaattatttctgagtctacagttttactgactgagcatgaaactgcccatgaagaaatgacaaaaaccgaattccagactgctcttgctaagtataaaatgcctggaattgtagctgcgtatcctggcgagctcggaaatcagttagaaattgaaatcgtatcaaaagctgcatttgataaaggtgaacagctgacgatttatccggctggtggaaaacgcgcttcgactgcaaaagctgtatttggatatggtcctcagaccgatacccaatatgctatcattgttcgtagagatggcgcggtagttgaatcaacggtgttatcaacaaaccgtcaagataaagacatctacggaaataacatctttatggacgattatttctccaaaggttcttcacgttatatatttgctactgcacaaggatggcctgaaggattttccggtgttattcgtctgggtggtggggtttcagctaatgaatcagttactgctggcgatttaattcaaggttgggatttatttggtgaccgtgaagcattgcgtgtaaaccttctgattgctggtgcttgcgctggtgaaactgatgaaatcgcaagtacagtgcaaaaacatgtgtcgtctattgcagatgaacgtcaagattgtttagcactcatttcaccaccaaggtcaacgattgtaaatattcctctgacccgtgctgttgataatttaattgattggcgtcaaggtgaaggaagctacgactctgcaaacatgaacatcaatactacgtatgcggcaattgacggcaactataaatatcagtatgataaatataacgacgtaaaccgttgggttccgttagctgctgatattgcaggactgtgtgctcgtacagatgatgttgctcaaccttggatgtcaccggctggttatcgtcgtggtcagattctgaactgcattaaacttgcgattgaacctcgtcaagcacatcgtgaccgtatgtatcaagcaggtattaacccggtaacgggtcaaggtaccggtgatggtttcattctgtttggtgataagactgcaaccactgttccaactccgtttgaccgaattaacgttcgtcgcttgtttaacatgctgaagaacaacatcggtgattcttctaagtggcagctgtttgaattaaacgataactttacccgtagttctttccgtatggaaaccagccaatacctcgcaggtattaaagctctgggtggtgtatatgacttccgagttgtatgtgataccacgaacaacactccagcagttatcgaccgcaacgagtttgtagcgagcttctacatcaagccggcacgttcaattaactatatcactctgaacttcgttgctacggcaaccggtgcagattttgatgagttgattggaccacagtaatatgaaccccaggacattctggggtcatctaatctttagatgataaattatattaccgcacactttaatagcctctacgatgatgtagtcaatcgagaggctatataaatatctataggaaacaacgatggaattaacagacatcactcgtgcgtttgaatctggtgactttgcgcgtcctaacctgtttgaggtagaaattccttatctgggtcgtaacttcagtttcaaatgtaaagcagcaccgatgccggcaggtatcgtagaaaaagttccagtcgggtacatgaaccgtaagattaacgtcgctggtgaccgtacttatgacgactggactgttaccatctataacgatgataaacatgaagtacgtaaggcaattattgcttggcaggctcaggcccacgcccaaggcaatgatatctctggtatgactccagctgattacaaaaaggttgctacggtacgccagtttagtcgtgatggcaaaactatcacaaatgaacacaccattactggtctgtggccaactaacgttggtgaagtacagatggattgggacagtaacaatgaggtagaaacgttcgaaactacctttgctattgactggtgggaataatgctatggggcttcggccccgtatcgaagttctgtgagttatttgcttaaatatctgacaaaacttcgatataaatatacttatagataatttcggagactccaatggcctttcatattttggacttattcgctccgtgggaaaaacgcgacgaagctgaatataagcaacaaatcaacaatgacctagagtcaatcactgctccaaaatttgatgatggagctcgtgaagttgaatcaaacgaaaacgaaatccagtataattcattcaaccaaatgatgtttggttccaatgaacctggaatgaaaacaactgctgatttaatcaacacttatcgtagtttaatgaataactacgaagttgacaatgctgttgaagaaatagtttctgacgcggttgtatacgaagacggtcacccagtagtttctcttgatttagattctaccgatttcagtcaagcaattaaagaccgcattcttgaagaatttaatacagttttaacatgccttaatttcgagagaaagggcgctgaccatttccgccgttggtatgttgactcaagaatattcttccataaaatcgtcaacaccaagaaaatgaaagacggaattcaggaactgagacgtcttgacccgcgcaacttacaattcattcgcgaaatcgttactgctgatgacgctggtactaaaatcgttaaggggtacaaagagtatttcatttacgatactggcaaagaaagttattacgcagatggtagattatattccgccggaacaaaaattaaaattccacgcgatgctatagtatatgcacattctggattagttgattgttcaggtcaaaacatcatcggttatttacaccgagccgttaaacccgccaaccagttaaagctattagaagatgcgttggtaatttatcgtattactcgtgctcctgaccgtcgtgtgttttacattgacactggtaatatgccttctcgtaaagcggcagcccatatgcaacatattatgaacacgatgaaaaatcgcgttgtgtatgatgcatcaaccggtaagattaaaaatcagcaacataatatgtcaatgacagaagactattggttgcagcgtagagatggtaaagcagttactgaagtagatactcttcctggtatgtccggtatgagtgatatggatgacgtccgttactttagaacagcgttatacatggcattgcgagttcctctttcgcgcatgccggatgcaaataatcaaggtggtgtgcagtttgatgctggcacaacaattactcgtgatgagcttgattttgctaaatttattcgtagattacagcataaattcgaagagattatgcttgatccacttcgcactaatctaattcttaaaaaagttttgtctaaagatgagtgggaagacgaaataaataatattaagattgtgttccataaagattcatatttcaccgagttgaaagatgctgaagttatggagcgtagaatcaatatgctcacaatggctgaaccgtttatcggcaagtatatttctcataagacagcaatgaaagatttccttcagatgtcagatgaagaaattgaacaagaagccaagcaaattgaattagagtctaaagaggctcgcttccaagaccaagaaaatgaagaggatttctaatggaaaattatatttccgcaattgaatccagagacctcgtagcagccaaaaaagcttttggtgcaattatggctgaacggacatctggtttaattgaagagcgcaaaaaatttatcgcagcgtctgtcatgattgagggtgaagagcccgttgacgatgaagatgaagacgacgaagatgaagataagtctgagaaagacgacgacgaagaggacgagtaatgcttatactgcctgaaaatcatgaattagttatcgacgctgtcgaagcttttcttcctgaagcacaggcacgttttgataagttgtccgcagcgctttctaaagatgatataaataaaattgtagagaacatggttacttctgagcctgatttagcaattgctttaggttcaattaacgaatctctacaattaaatgaatttatcgttaagcacgttgattctaaaggtactattacccgtaccaaagatcgtaaaacacgtgagcgtaacgcgtttcaaacaaccggactttctaaagctaaacgccgccaaatcgcgcgtaaagcagtaaaatcaaaacgtgctaatccatcggctcaaactcgtggattacgtaaacgtaagaaagcacttaaacgccgtcaggctctggggctaagttaatggaaaacctcaatgaacaacttttaattgagcattggggtcaaccgggcgatgtaattgatggtaaacccatgctggaatctattatcgttgaaggcgaaaatgaatctggcttaaaacctggtctgtatatcgaaggtgtttttatgcaggcagaagtagtaaaccgtaataaacgtctttatccaaaacgcattcttgagactgcggtaagccgttatattaaggaacaggttgctactcgtcaggctctaggagaattaaaccatccacctcgtgcaaatgttgacccgatgcaagccgcaatcattattgaagatatgtggtggaaaggcaacgatgtttatgggcgagcaagaatcatcgaaggagaccacggtccaggtgataaattagccgctaacattcgtgctggttggattcctggtgtatcaagtcgtggacttggttctttgaaagactcaggaaaaggatataacatcgtacaagaaggctttcgcctgactgttggtgtagacgcagtttggggtcctagtgctccggatgcatgggtacaaccgaaacaaatttcggaaaatacctcggcacaagttgccaatagtgctgatgatgcttttatggctctcgcagataagttaaaagcgttataaataattatgtaacttaacacaggacatcaaaaatgcttaaagaacttttaatgaccgaagctaaaactatcgatgcttccgtcgctcttgacagtattttcgaatcagttcagctttctccggaagctaaagctaacttcagcactgtattcgaagcaacagtcaaaaaacacgccgtagctctggcagaatctcatattgaaaaaattgctgagaaagcagaagaaaaagttgaagaagaaaaagaaaaagctaaagaagaagctcgcgaagagctgaaagaagctgcttctaaatactttgaccatatcgctgccgaatggatggcggaaaatcagctggcggttgaccgcggtattaaggctgaactgtttgaatccatgtttagcggtatgaaagaactgtttgttgagcacaatgttgtaattcctgaagaatcagtagacgtagtcgctgaaatggaagaagaacttgctgagcaaaaagaagaaactgctcgtttatttgaagaagtttctaagcgtgatgcttatatcaattacgcccaacgcgagtatgctattcaagaagcaacccgtgaattgactgatactcaaaaagagaaagtagtttctctgacagagggtatggattattctgactcgttttcaactaagctgaaagctattgttgaaatggtgcagggttctgtagagcagtctgtaacggaatctgccgatataaatactatcgacaaagaagcagacggtttaaacttcacaactgaagcagtcgaagaaactcctgcgactaaaaccccatccgttatggatgcttatgtagcccaagcggctcgtctttcttaatttaaaaggttatacaacacatgaaaaagaataaacttatcgaaaaatggcagccgctgcttgagaacgaagctctgccgaaaattgttggcgctagcaaaaaagctctgatcgctaagatttttgaaaaccaggaagctgatattaatcaggctcctgaataccgcgatgaaaaaatcgctgaagcatttggttctttcctgtctgaagcagaaattggcggtgaccacggttatgatgcacagaacatcgcagctggtcagacctctggtgctgtaacccagattggaccggcagttatgggtatggttcgtcgtgctatccctaacctgattgctttcgatatctgtggtgtacagccgatgtctaacccaaccggtcaggtattcgctctccgcgctgtttacggcaaagacccgctggctgctggtgctaaagaagctttccatccgatgtacgctccggatgcaatgttctctggtcagggtgcaaccgagaaatttgaagcagttaaagctggtggtgctctgactgttggtgatatcgttgttcacgatttcgcacagaccggtcgtgctcatctgcaggttgttgaagatttcactgtagacgctggtgctaccgatgctgctaaactggacgctgcagttactgctgctctggaagctggtaaagttgtagaaatcgccgaaggtatggctacttctgttgctgaactgcaagaagcctttaacggttctaaagataacccgtggaatgaaatgggcttccgtatcgataaacaaactatcgaagcgaaatctcgtcagctgaaagcacagtattccatcgaactggctcaggacctccgtgctgttcatggtatggacgctgatgctgaactgagttcaatcctggctaccgaaattatgctggaaatcaaccgtgaagttgttgactggattaactactccgctcaggttggtaaatctggtatgacccagactgttggttctaaagccggtgtattcgacttccaagacccgattgatatccgcggtgctcgttgggcaggtgaaagctttaaagctctgctgttccagattgacaaagaatccgctgaaatcgctcgtcagaccggtcgcggtgaaggtaacttcattatcgcttcccgtaacgtagttaacgtactggcagctgttgataccaacgtatctccggcagctcagggtctgggccgtggttataacaccgacaccactaaagcagtatttgctggtgttctgggtggtcgctaccgtgtatacatcgaccagtatgctcgtcaggattacttcaccatcggttataaaggtgctaacgaaatggatgctggtatctactatgctccgtatgttgcactgaccccgctgcgtggttccgatccgaagaacttccaaccggtcatggggttcaaaacccgttacggtatcggtattaacccgttcgccgattctgctgctcaacagccgaaaggtcgtattacctctggtatgccttctatcgtcaactctgttggtaagaatgcttacttccgtcgtgtatgggttaaaggtatctaataccaataagggagccttcgggctccctttagttgttttaatggatataaataaacttataaatccacagaggaaagcgcaatggctaaaatcaacgaacttctgcgcgagtcaactacaacgagtagcaacttaattggtcgccctaatctcgttgcattaacgcgcgcaaccactaaattaatctatactgacctcgttgctacacagcgtactaaacagcctgtagcagcactgtatggtattaaatatcttaaccccaatggtgacctgacgtttaatacaggtgcaacctatgcaggtcaaatcggtgccccggaacgtgagtcaattgaagaactcactatggcgaataaagattcttttaataaagatgacatgtttaagtaccagaacgtagtctttaaagtgcttaaagacgggccgtttactggtacagctgaaaccgacgaatttggaattgtatctgaagcagtagcagctaataatattcgtatggtgtcagatgctgcagtcactgaaaaattcgaaggacctgattcagacccaatcaccgaagccagttttaaaattgataaatggcaaacagctgttaaatcgcgtaagcttaaaacggatttaactgtagaattagctcaagacttagaagctaacgggttcgatgctccagagcttattgatgatttacttgctactgaaatggcagaagacattaataaagacatcctgcaatcattgattacggtttcttctcggtttaaagtaactggtgtatccgataaaggtgtattagatttaactaagcaggattctgctccggaacaaggtcgtactctgtatcgtttcatttgtgaaatgaattcagcagttcaacgtaatacttcttattctggtacctatgcagtagcatctactcgttgcgcagcggtactggcagcttctggttggttaatgcagaagaacgatgggactattccagaaaacgcatatggcattctgaataacggccttccactgtattgtgatactaacagtccgattgattacgttattgttggtgttaaggcagaatttggtgggaaggaaactgtaggttcattattctatgcgccgtataccgaaggtcttgatttagacgaccctgagcatgttggtgcatttaaagttattgttgacccagctagcttgcagccttctgtagctttactggttcgttacgcgctgtcggttaacccatatactgtaggattggacgaggacgaagctcgtgtgattaatgctgcggatatggataagatggcaggaagaagtcagatgtctgttatgctcggtgttaagttacctaagctgattgcggactaatttatgggagccttcgggctcccctttttttgctataaactaaatatgtcaaacctcggggagtattcctcctcgagggatttaaacactttcttatcatatagattaacacattctatcccgtgcctgcgagctatatcaacagctactctcgtccctccagatacactcccgcatcttttctcaggcgcccaatataataccttatctacaggctcagtgcattctaagcccaatacctgcatagaattccgtgcaaataatgtctgcactattttcgagcattcgtcccagtacgacgtaacttctctcgccttaatgatgcttttgattttggcttcgtttgataattcagaccatacaacaacacctgtaccaggaacatggccacaaaagccagaataaggaataatcctacaagaatttgacctatcgtatttcgccaaccacgcttcatctgaacccggagctccacctgaatatgaaaaatgcccctcttccgagaggcgttgacctattgtagtcattagactcagaactctgcgtggcgcttctcttgaaccaatcagcgccagcctcattattctaaaacctcatgccatttactacgaatagtgttttgaattaaagtagtgatttctttcttaacagcagaagggttatcagcgaatagcatgtcatgaccttcacgagctgcttcgttaatgatatctttcatagtcagtcccataacacgaccgaaatctttagcagttacagtaccaatatgagacagaacgttacttacacggttccaggttacatactcagaaaagatttccagaacacgcttatcattctcggtgagttcaaccttcgctttaataggcttatcggatttagccttctcgctgaacttagagttcttacacttaatagcaacacgagtaccattattgaagaacttaggatgaaccggcttaagaacatagccttcagctacgccagtttcagaagaagcctgtgggccgaacacgtgtttatttgcatgttcaaggtcagtcgtgtcaacaagctcattatagtaattgacaatagatttaaagtcattcacatactgagatagctcggcaaatgaacctcgaccaagaagtggagccaatttaagaccaagaccagtagcaaacgattctactacataatcgtcccaataaactttttcgttaccggaatccgacaggatatcaaacacgtagaaatctttctcaccataatctacgcccttctgaatgccaccgccagcaaattcgccgaagatttgaacagatactaaatccatggcgttcagcatgttctgcatcttaacgaaagaatccttatatttcttcatgataatatcatgaccaaagaaactttcactttctaaaataggtccagtacgcttagccggaacgatttcggtaggagtaataatcacactgaagttagtgccatgaatcttctcacgagccacccactcaacagtatgcatatcaaaaccagcaccgcgaatcttctcgatgaacttaccgttgtaatgattctcaagactagaatattttgcaaacattataatttccttagaatgtgattttcataaagtcagtatcaccgttacgctgggaactggtataatttgttacaaatccttcatcatgcaaataattaagaacacttgtaatgtgtttcttaactagactacttggatacataattagctcacgcttacccgctaaagcggttttctcaatctgagttaatacttcttcttttgctgctgataattcttctgtggctacgttaatagcagtattagccattctatcggcaaggttcataatttttctctcaataaataatataaaaccaggagtccatctattttggacaagggtaatggtatcagaggatttcccctgagcccattataccacatcgatttttaaagcaattaatatccgcttggaacaaagcgatacattaatttgtcatgtttatttcgcatgatttcaaactggtttttaggtccaacttctaatactaacggaacatttacatccattagcatccaatcaatttttccataccgttctttaatcaaatctgagattttgcgtgcgccatttttataataagtgttatcgaatattcgagtcatcatattatcaacaaatcttgatgcagaacgccaataattaatattgctagccgcaggagcaaacttgcgctctaggaacatctcaaatttctcttctacctttttatctactttagacattataaagtcctcatgtgtttaacaagtttcttatgacgagattttataccaacgtttgttaagcgtttccgataaacgactttttctttttgcttaaaccgttcgtgtgctttctcaacagagacccacagcttagcggcttcggctggagtgatatataacgcccttgcaatttcttgaaaatcctttccgctttcatgcatcaagtgagcttgtaatgctttcataataacctcatctatgtgacgaggacataataaaccaatccatgaatagcaaaaagggagcccgaaggctcccgaatattacggatagataatacctgcttccagcgcagtacgatgaacaatgtatccatttctagattcttgtacatcgacttctggataatcatctagcattttagctagagtataccgatgcaggtaataatcgctatcagggtcgtcgagtttccaatctttgccctcaacagtcattcgctggatttcatccattacccaccatccacaccagatataggctgttccacggaacggtagaggatgaatatacggaagttctccgtctggctcaggggctacctttttagtaaaaacaacctcgacacctttagtagcagtagccgggttgtaatctgctgcagaaaccgtgacttcgcaatttaaagtataattagcctctgccgattcagttacggtaattgttttagcagtctgaccatcaataacgtcagcaccacgtttccaaacataagcaatgcttgctcctgctggtgctccagtaacatcagccgtgactacttgggattgaccaatttctttagaaacagaagttgggctcaaagttaaagtaatagcaggcatagttttattctgaacggtcagagtggtttctgcctcagcagtttcaggatcgccttcagccggagtaacagtagcaactactttaatagttttactgcctgcaggacccgcagcaacataattcatggctgcggtaacagaagattgttttacgccgtttacggtccacacaaatgattctgtgcctgcagccgcggctccagaagttgttgcagtaaaattggttgttgctccaatgactgccgaagcagccaaaggagcaatagatacgctataagccataggtgttccttattttaaagttacaaatgaagaattacgtgtttcacgaatcataacagacccgtttcttttgatgtaatagattaaactaaacagtgtctggtgtgctgatgggtgttcaaacgacgttggccgagatttccaatctgggttatctttaatccattggtaaatccaccacggaagggtgatatatcctgggttcttacctagcaactgcatgtttggactaaagttttcaggaagctcaatgatttcgtccgttttaataattttaactactttgtccattgctttggagaattcttcagggtccgtagtactaattgggatgtttgtaagttttccttcatcatcgatatggataatgctatctccaataggagcttcagcataaaatcctttatcattgatagaaggtgtttttacttcaaaccctgggtcatttaccttaggggtttctttatagaaacctgggtcaatatcatgaattttaacacttgcacttactggagcatcaaacagtagttttgcttcatcagacgcttcatcattgaaaagtgcttttccttcaatttcatcatccgcttggattaaatcggcaattgatagaccatcgttgtcttctggcataggctcatcggccaatttagccagttctttttccaaatcagcaaccatattgtcaaatgagcgggtcttcttcagtttaataccgaaggttttggcatattcgtcgagcttgtctttagcttcttttttgtcgagtgcctgaatttctttaatatagtctttatctagcattgggtgtgcctcatgtaatgtataaatatgattgtatttataaactgaggatagtacagtgcacgacatccaagtcaaatttaaagattttagtcatgttcatattgagtgtgatgactcaattttctatgaactcagagactattttagcttcgaagccgatggatacagattcaacccgaaatatcgttatgggcattgggatggacgaattcgtctgctagattataatcgtctcttaccgtttggtcttgttggccaaattagaaaattcgctgaccaattcggatataaagtttatttcgatccagctatattcgagcaagaaactctttcacgggaggattttgacacgtggttagcatctaaagaaatctattcaggattaactaagattgaaccccattggtatcagaaagatgctgtatatgaaggactagttaataggcgtagaattcttaatcttccaacgtctgccggtaagtctcttattcaggcattacttgctcgttattatgtagaaaattacgaaggcaaaattcttatcatcgttcctaccacagcgttagttgaccagatgattgatgatttttgtgattatcgtttatttcctcgcaatgctatgctgggtattcgaggtggtactgctcgtgattcgaatgcattagtttatgtatctacctggcagaccgctgttaagcagcctaaagaatggttttctcaattcggcatgatgatgaatgatgaatgccatcttgcaacgggtaagtcaatttcaacaatcattgcgggtctcaccaattgcatgtttaagtacggactgtctggttctcttaaagacggcaaagctaatatcatgcaatatgttggcatgtttggtgaaatcttccgtccggtatcaacttctaagttaatggaagacggacaagtaactgagcttaaaattaatacaatcttcttaagatatccagatgcagccgcaaatgctttaaaaggaaaaacgtatcaagaagaaattaaattcatcaccaatgttaagaaaagaaaccgttgggttgctaatctagctgctaagctagcatcgcgtgatgaaaacgcttttgtgatgtttaaacatgtagctcacggtaaagagctattcgagatgattaaagctactggtcatgagcaagtttattacgtatcaggtgaagttaatactgaaacacgtaatgctttaaaggctatggcagaaaacggaaagggaattattatcgtcgcaagttacggtgtattttctacaggtatttctgttaaaaacttgcatcatgtaattttagcccatccagttaaatcgaagattatcgtactccaaactattggtcgtgttcttcgtaaacacaaagataaatctttagctactgtctgggatatcatcgacgacctcggtgtaaagccgaaatccgccaatgctaaaaagaaatacacgcatttgaactattgcttaaaacatgcattagagcgtattcaacgatatgctgatgaaaaatttaactacgtaatgaaaacggtaaatctatgattaaatttgaagatatttatgaagccacaattcgtgaggctactatcgataacttcatgagtaaaattaatgcttgccagaccttagatggtctggaagaactcgagaagtattacgataagcgctctaaagaaactactcttgctgattctgatgacatcattgtgcgggatgctttggcggggcgtagacaggctcttgaagccgattctgaagatgaagatgacgaagacttctaatacaaaaaagccccaaccgaaaggaaggggcaaagccaattggctacatcaacactagactaaattaaaagctgcgtttcttgtaattgctcttctgtgtcttcagtgacaggcaattcaatcgcataattatagcaagctccgggatgaaccgggcctttgtctgtgtggacaaccaatgcttcatcgattggtcctttacagacgacacataccgtattcgacatgattgtctccttagtttacaggtttatttattacgcgccagcttcaaactgacgaaggtcaataatgtgcttaatgctaaaacctcgtgacttgatagcatccattgcatcactacagaactccaaaagaattccccaatattgcaatttagtatctacacccaagatttctttatcggcgcttaaaacagttttcatttctgatttttcatatacatccatgcatacttcaccaccaacctcgccacggccagtgtaataatccaatcgtgctttaagattttgctttttgagggcatctaatcttaacatctcttttcgacaagtcgagtgcttacgcacccatttaccatacagaacggggttattagccgcttcatactgtagtttagtctggtcgataatcaaatcattatccaattcatcctgtaattcttctaatctcattctatctccactctactgtttcttggaaggactagtcccattatactctactgctagagttagcattactacgcatctgtatgcgtatacgttctagcgtatcagggtcgtctactatagaaaactgcacggtgacaattatagcgttatcgtcatataacggaagcacatcaactgatagacgattaatcctaggctcataattacgcacggcagagactatattacgctttatcgtatcaccagttaacggagtcatgttttcaaataattcgtttgtgatatcacaaccaaacgctgggtcaaatggccgagacccctttcttgtggttattattccaagaaggctatttttaactgatcgagctcctactgtttttgacacatcggtatcccaagcaagtcgcatctctgggtcaaggtcagaatatagtttatcaatattgctcatgacataatcttaaagaattctttaagccccttaattacatgaatgtgagaaattccgcattcacaagtaatgggaactgccaattgaacctgtggcttcaatagcatatttttgatgttaactacatcttcggttgtaatagcagaatataaatcatcgatttctgcatcgtttaaatcattaaagtaaatctgctcatttccaaccacgatataatctatgcattttgatatcatcattggaatgtcggaatcgtcaaaaagattaggatacttaaactttatcttgaatccctttaagtcataccagaggtcttctggaggatcgatttgcgcatgtgtataatttaatggcacaggaattttacgcccacaggtgcaattccaggtcacctcatgattaacctcgcctatactatgcgcccaaagtataactataagtaattccgattcttgtttgtttaacccagtagcattagtacattctctgagcaatgctttaacacattcatcgattgtaccgtttttcttcgctgcaattaaattagcgtattcttctagtgtaaaagctcggcactggatattcttgccatttattcttgtttcaaatttatatgtgatgttcatatccactcctcttattcaattatttataaatagtataaagaggattaccttatggccaacatagttagatgcgaattaccagatggtgtccaacgttttaagccatttaccgtagaagattatagagaccttttattggttagaaacgacatgaacaccaagtctgaagaagaccaaaaacagcttatagcagaattaatggatgattattttcatgaccatcctgtcgagtatcgtccttatatatttc

SEQ ID NO: 25 - DNA, 40493 bp, unidentified
  source 1..40493: mol_type = genomic DNA
ttgcatcgttcgtggcctacaaggtcaataaggcggcatccggctcaacaccgggcaacctgacagtaacctttaagtccgagaacggtaccactatcggtacaggctcgacgtctaacttctcgaacactgtcggggtgtggcagcaaggtggcctgttctgccgaggcgttgccccagtaggtgctgtatccgctgagatatctctccgtgttcgtgatggtgctgaggttatccttgatgacgttatcgtaaacttcttgtaacacggaggtatcatgttatccctagacttcaacaacgaagttatcaaggcggctcccattgcgggggtcgctggggctgatggcgtagcgaggctcttctggggcctctcactcaacgagtggttctacgtcgcggcaatcgcctacacagtggttcagattggtgccaaggtagtcgacaaaatcattgactggaagaaagctaataaggagtaacatatggacctgattaagttcctcgaaatgctagacactgagatggctcagcagatgctcatggacctgaagaatccagagaagcggacccctcagttgtacaacgccattggtaaactgctggagcgacataagttccaaatctctaagctgacccctgacgttaacatcttgggcggactggctgagggtctggaggcttacaactccaaggtgggcgctgatggtctgacagacgacgataagttcaccctacagtgatatactcaaggtactactatatgtagtgcctttatggatgtcattgcactacgctaggcgttcctacgtgaaatctgagaaacaacgggaggcattatgctggagttcacaaagagaatcgtcccgtatcttgtggctatcatggtgtttgccttcgggtggcacttgggttcgcaatctacggacgctaaatggaaggaggaagtacagaatgagtacgttaagaagcaaacggctagagctgaaactcagaaagcgattgacgcagtatcggctaagtaccaagcagaccttgaagggctggagggcagcactgatagggttattgctgatttgcgtagcgacaataagcggctgcgcggcagagtcaaacctaccagtgtcaccgcaggaccagacggtcgatgcctcgttgatggttccgtcgaactacacgaagcaactgctcgaagtcttatcgcaataacccagaaggccgacctcaaagagaaggccctacaggacactattcgcaagctacagcggaaaggaggtgaatattgagtaactctcagcaagccaagaacgccttaatcattgcgcaactgaagggtgactttgtcgcctttctcttcgtgctctggaaggccctgaacctgccggaaccaaccaagtgtcaaatcgacatggccaagtgtctggcgaacccaaagaacaagaagtttatccttcaggctttccgtggtatcgggaagtcgttcatcacgtgcgcgttcgtggtgtggaccctatggcgtgaccctcagttaaagatactgattgtctcagcctcaaaggaacgtgcggacgctaactccatcttcatcaagaatatcatcgacttgttgcctttcctgagtgagcttaagcctcgccccggtcagcgtgactccgtgattagctttgatgtaggccctgccaagccagaccacagcccgtcagttaagtctgtgggtattacgggtcagcttactggtagccgtgccgatatcatcattgcggatgacgtggagattcccggtaactctgcaacccaaggtgctcgtgagaaactctggacgttggttcaggagttcgccgcactgttgaaacctctgccgactagccgtgttatctatctgggtacccctcagaccgagatgacgctctacaaggaacttgaggacaaccgtgggtactccaccatcatttggcctgcgcagtatcctcgctccaaagaggaagacttgtactatggtgaccgactggccccgatgctccgcagtgagtacgatgaggacaaagagggcctcagtagccaacctaccgacccggttcgattcgactctatggaccttcaggagcgtgaggtggaatacggcaaggctggctatacgcttcagttcatgctcaacccgaacctaagtgacgccgagaagtaccctctacgcctccgtgacgctatcgtgtgcggtctacagatggacaaggccccaatgcattaccagtggttgccgaaccgtcagaaccgcaatgaggagcttcccaacgtgggcatgaagggtgacgagatttactccttccatacagcctccagtaacactggtgcgtatcagggtaagattctagtcatcgacccaagtggtcgcggtaaggatgagactggctggtgcgtactgtacaccctcaacggctacatctacttgatggacgctggcggtactcgtggttacgaagagaagtcccttgagttcctcgctaagaaagcaaaacagtggcaggttcagactgtggtcttcgagagtaacttcggtgacggtatgttcggtaacgtcttccagcctgtgctcctgaagcatcacccagcgcagctcgaagagattcgtgctcgtggtatgaaagaggtacgtatctgcgatacccttgagcctgtactggcaagtcaccgcttggtcatccgcgatgaggtaatccgacaggactaccagacggcacgggacgcagacggtaagcacgctctgaagtacagcctgttctatcagatgacccgtatgagccgtgagaagggcgctgtggcacacgatgaccgacttgatgcgttagcattgggtgttgagttcctacgctctacgatgcagcaggacgctgtgaagatagaggctgaggtacttcaggagttcttggagcaccacatggagaagcccctgagtaacatctcccagttccgggccaccagtagcaacggtgtggacatccggtgggaagacgatggggatgacactatgttcatcgcatggtgattatgcagggattgtgcataaggattcattaggccacggaaggccacttcaggaaaacttcaggcataacagacacttggaattaggtagcactatagggagagacccctaaagacttactataagaacacttaaagtttcattcatatagttatgcactataagtctcctcacaggtagagggtagtgatgataatatcaccctctcactataagacactaagagctaacacaaggaggacctatgcgcttattgttaaccttactgcgccataggactacttggcgatttctgctggtacttgctggtgcccttggggcttcacttgttactaagcagcaactcagtggactggagactctcatgtgctctctactcacttgtagcgattagggtcttcctgacgcgctagggattccgtagtgatgcttatcagcatacaccactccatccctctacagtcaatacttaaagttaaccttaggtgattcactgggtctacctacgggtctatgcactgacctgaggactacctgaggttacctttaagaattttacataaagttctgagtgtacatctcacagtttaaacttttggttatcccccccccggtacctccagttcacccaaagtaaccatggggggccttaaaccttcggtttaaccttaggtgggactgatgggaaaccttaggtgatactatatgttgtggtgttggtgacccaatgacactatatgttgatgcctctgtgtccctatctgttgggcctctttaagtatccacctgaggtaatacctgagaccatacaccttaggttaaccatgtgaccatccagcgagtcatcactataaggttattcattgtaggttgtcaatacaccaaccaattaggtatcactatagggagacactttaagtattactaagagaccataaccataaagataactatcactacaggtctaactaaaagtttaactttaagtattgacattcggattacgttatgagacattagcagccgttgagagacacaacgctacaaaccactagcatacttcgagttactagctggatgctgaatggtctcaagtagtcatcaaccggacatacgaaagtggttgactcaacgatgaacaagtagtaagatgcaccacagattcacgaagtatcgctctttaacaatatggattagctgacatgtacatcactcatcacttagtgtttaactagtggttacattcaggtctctggcaaggtacgtcctgtcaccctgagagtagccacgatgataaccactaatcaactgaaggatatacatcatgatttacaccaaagagccagctaacaaggtattcgtgttcgttactgcttaccgtggccatgagtcgctcgaagttaacgagaagatgctcaaaggtctcattcgcaccattaagacctatccgggtgcatacggcaacattcgtaatgagcacgtgcaaggctgctttaaagaagctggtatgcctgaggcaacgcaagaacgcacgcttaaagttgaatgtactgagaagcaagccgcagagctgacgtggctggcctgtaagacctactcgcaagatgctgtgctggtggtgaactcacagactcacacggctgcgctatggtctatcgaggatgtaggcgaatacccacaggtctacccacgcttgaaagaggtgtccttaggtggcacgctgcaacaagtagatgcaccaaagggcgaatgctattcagtgattgacgggcaatactgggaggttgtatgaagcactacggcctcactcagcaggacatgcaggaataccgcagcgcctttaagacggcctgcgagtgcactgctggcacacctgaagcaaaggccgactggttcggctattacatggcccagctggcccaaacctaccgcacacgtaaggtaatgtatgataaccctgtttgtaattagcgtgtacgccctgattgtcctgtactttgtgcgggactttcacaagggtctcaaggcgcacaaagcatcattcagttacatgaagtggggcgtgctgcctcgctttactgtacggctacctaatggccgctttaaggctaacaaggtaggcattttctacatcgcaactcattgactcatcgcacataaggaaacaacctaatgaactacaccgatatgcaagaacgcttagacgccatccgtaacctgccaatctgtgaactcgacaagcgccagccgctgctggtagcactcatggcggacattgtgaactgtgagacatccgacggtgacgatacggacagtgattggggtctggagcgtcaggactactggcaaaccctgaagattaaggccaaagacgccgggtttaacctgctgggcaatggtcacttcagcgcagcgtttaagcacgagctgctaccgggtagggtcattaaggttggctttaagaaagaggactcaggggccgcctacgtggctttctgtcggatgcaccaaggccgagtagggatacctaacgtctaccacgtagcgcgtcacgctgggtgctacacggtggtgcttgatgagcttgagccgtgtcaacgccgtgagaacgatgagcacgaccactacgcagacctcgcgtattactttgtcgagggtgaacctgaccctgaggactacgcggaggctgaccgcccgtttatcgagacgtgccaaatgattcgcaagttcttctacgggattgcgtcctttgatatgcacagcggaaacatcatgttcaccaaagacggcacgccagtgattaccgacccggtgtcattctcagcggaccgggaccgagagcctttctcactggaacctgaggacctgctcgcagagattgagcagatagcacacgacaagatgattgaacgctgcaagcgcaacaaggctaagcgcaatcctctggggacctttcagagagatcgtaagcatatcaacaaggcgcgtcgagcacgtcgtaaggcacacgctcggtggcgtgaggagcgcgagcggattaacgctgaggccctaaagctcgaccttgcgaaaatcgaggagcgggtactagcgtggcaagtgggacccggcctagcgatacagcagggcaagccattgcctatagacaactaccttcagggtagactcatgggctaacaaggtgtatcttaggtgtctctcacgcaagaggcacccatagataaactttattcacaaagaggcacacaatgaacgcattaaacattgcacgtaatgacttctcagagattgaactagccgctattccgtacaacatcctcagcgagcactacggggacaagctggcacgtgagcagctggcacttgagcatgaagcgtacgagctgggcgagcagcgtttcctgaagatgttggaacgtcaggtgaaagctggtgagttcgccgacaacgtggccgctaagccgctggtcttaacgttgcacccgcagctgaccaagcgcattgacgattggaaggaggaacaagcaaacgctcgtggtaagaagcctcgtgcatactacccgattaagcacggtgtggcttctgagttagctgttagcatgggcgctgaggtgctcaaagagaagcgcggagtgtccagtgaggcaaccgcactgctaaccatcaaggtcgtcttagggacgctcacagacgcctcaaaggccacaatccagcaggtgtcctcacagttaggcaaggcccttgaggatgaggcccgcttcggtcgtatccgtgagcaggaagccgcatacttcaagaagaacgtagcggaccagctggacaagcgagtaggccacgtgtacaagaaggctttcatgcaggtcgtcgaggccgatatgatatccaaagggatgctgggcggcgacaactgggcgagctggaaaactgacgagcagatgcacgtagggaccaagctgctggagctactcattgaggggactggtctggtggaaatgaccaagaacaagatggcagatggctccgatgatgtgaccagtatgcagatggtccagctggctccggccttcgtggaactcctgagcaaacgcgcgggagcactcgcaggtatcagcccgatgcaccagccgtgcgtagtccctccgaaaccttgggttgaaaccgtaggaggtggctactggtcagttggtcgccgcccgctggcactggtgcgcacccactccaagaaggcactgcgccgctacgcagacgtacacatgcccgaggtatacaaagcggtaaacctcgcgcaaaacacgccgtggaaggtgaacaagaaggtactggcggtagtcaacgagattgtcaactggaagcactgcccggttgctgacgtcccggcgattgaacgcgaagagttaccaccacgaccggacgatatcgacaccaacgaggtggcacgtaaggcatggcgcaaggaggccgcagctgtctaccgtaaggacaaggcccgccagtctcgccgtttgtcaatggagttcatggtcgcacaggccaacaagttcgctaaccacaaggccatctggttcccgtacaacatggactggcgcggacgtgtgtacgctgtgagcatgtttaacccgcagggtaacgacatgaccaagggtatgctgacactggccaaaggtaagccaatcggtctcgatgggttctactggctgaagattcatggtgcaaactgtgcaggcgtcgacaaggttcccttccctgagcgcatcaagttcatcgaagagaacgagggtaacattctggcgagcgcagctgacccgctgaataacacttggtggacacagcaggattctccgttctgcttcttagcattctgctttgagtacgcaggcgttaaacatcatggcctgaattacaactgctctctgccgctggcgttcgatgggtcctgctctgggattcagcacttcagcgctatgctacgcgattctatcggtggtcgtgctgttaacctactaccttctgataccgtgcaggatatctacaagattgtggccgacaaggttaacgaggtgctccatcaacacgtcgtcaacgggtctcaaacggtggtcgagcaaatttccgataaggagactggcgagttccgcgagaaggtaacgctgggtgagtccgtactggctgctcagtggttgcagtatggtgttacccgcaaggtaactaagcgttcggtcatgacgctggcatacggctccaaagagtttggcttccgccagcaagttcttgatgacaccattcagcccgctattgacaacggcgagggcttgatgtttacgcaccctaaccaagcagctggctacatggctaagctgatttgggacgctgtgaccgtgaccgtagtggccgctgtcgaggcaatgaactggctgaagtctgccgctaagctgctggctgctgaagtcaaggacaagaagaccaaagaggtgctgcgtaagcgctgcgcaatccactgggtaacacccgatggcttcccggtgtggcaggaataccacaagcgcgaccaagcgcgcctgaagctaacgttcttaggtcaggccaacgtgttcatgacgtacaacaaaggggaagccaaagagattgacgcacataagcaggagtcaggaatcgcccctaactttgtgcactcacaggatggtagtcacctgcgcatgaccgtagtgcacgccaacgaggtctacgggattgactccttcgcactcattcacgactccttcgggaccattccggcagacgctgggaatctctttaaggcagtccgtgagacgatggtaaagacctacgaggacaacgatgtaatcgctgacttttacgaccagttcgctgaccaactgcatgagtctcaactggacaaaatgcctgcggtcccggccaaaggtgacctgaatctgcgcgatatcttagagtctgacttcgcgttcgcctaaggtctcaggcaattaggtagcactatagggaaccttcgaatgaccgagggttccattacttaaagtcttaacttaaagaatacttaaagaggcacgctatgacttactcaatcgtcgtaaccatcttgttaatcatcatcacaacactcctcattgtgagtctacgtaatgcaatacgtacagaagaacggttggaacgtaaggcgcgagaggccaactcccagtttagtagcgagtcagccaaggtccttcgactggtggacagggttgattccctgagtagacaggttcgctacttagaaggcgagcttgagagtgagaaacagaaggtgcgcgacgtgaacgaactgcgtagccgccagcgtgaccgcatgaagtttctacgcaagtcactagatgagacacaaaacgagctgctgatggtctccgacctgattcacattaagttcaccgcattattacctgacggacagccagtaaagacgctctttaagttaggacttgggccgtgtggcctgcacgttaagtccctccgctggacagagctgggtgaccgctacctgatagaccagctgtgtaccaatggcgagcgtaagcagttcgtctactacaagagcgaagtagtaggacgcatcgagttccgccacggtaagtctgaataaggtagcactataggaacatactcaaggtcatcacgttcggtggccttcatgaatgtcccttactagcacaatcaggagtaacaccatgacacgtcaagaagccaaagtaatcaccttcgcacttcgttattcaggcgcaatgcaggacgaggtagtcaacttcgagcgcaaccgtgaacgtcagcagaccgagggttacatccctaagggccgcaagctgaacaagacaaggcgtggtggcggcgtgaagggttccttccgtaacgcgaagggtgacagcgttgttaaccaagagaaatacttcgtaggagcgtaaccaatggctactgaaaaaagatggcttttcgatgggagcacctcacaatggtctcgtttaggagcagcggagcgtaggctactggatacgacaggcctgcacgtggtcatgcttgacgacccattcactaacaccgtgctgttcaacgtgttcgagccacgcgggtcgcttctaataagtaagcggttcagccactggtcgattgactcagcgtcagactggctggcaaaactcacagctgactactcaagttggaaatgattaggtagcactataggcagactcaaggtcatcggatttcggtggcctttatgattgcttattgcacactaaatgaacactacacttcggagacatcatcatgatgaacattaagactaatccatataaggccgtatcgttcgttcgctctgctatcgagaaggcgctggagacttccggctacctcatcgcagacactaagcacgatggtgtacgcgggaacatttgcgtagacaacacggccaacgcagcgtggctcagccgggtctccaagaccattccggcccttgagcatctcagcggtttcgaccagcgctggcagaagttactgaaggacgaccgttggattttccctgatggctttatgcttgatggcgaactcatggtcaaaggcgttgacttcaacaccgggtctggcctgctgcgtaccaagtggctcaagaaatacaacatggagtaccacaacgttccagtaacaccagacatgctgaagcctcgcaaggttggcgttgctaagcgtgttcgtaccgagtttagactatctgccgcgcacctcaaagttatcctctacgatatcattccgcttgacattatcgagtccggtgatgattacaacgtgatgaccctcctccgccttgagcacgtcaaggttgccttaccagttctgcaagaccacttccctgaagtcgagtggtgcctctcggagtcccatgaagtttacgacatggacgaactcgatgcgctgtaccgacagaaacgcgaagaaggtcacgaaggtctggtggtaaaggaccctcgcggtatctacaagcgcggcaagaagtccggctggtggaaactgaagccagagaatgaggctgacggtgtagttgtgggactcaactggggaactcccggtcttgccaacgagggcaaggtgattggcttcgaggttctccttgagtctggtcgagtggtctccgctaacaacatctctcaggcacttatggaggagttcaccgccaaggtgttggatgctttcacagaggatgaaacgaagaacccgttcgagggctgggcgtgccaaatcaagtacatggaggaaactccagatggctccctgcgtcacccgtcgttcgacaaatggcgtggaacagaggaagaccctaccgttaaggtgtaattaggtagcactataggagacaacaacatgtccatcaatctgattctaatcatcgtgttcatcctcgcggctatcgtgtggtcaatgaatgacgagccacctaaaggagcataacaatgcgcttacacttcaataaatccaacggtatcttctcggttcgccgggaggaccgcagcactgtagcagcctccgagcgccacggtaagattccacgcatcggcgacaccttcgagctggcacctagtgtgcacatcttggttactcgcggtctctacgaattggctcagactaagagccgtcctttcgtacccgttgtggtaaccaagtggccacgccttcgcctgttctgggagcgcatcaaggaggtggtcaatgactgaacgtgaaattcaagtggtgaacctgctggtggcccacaacgctgaccgcccagattccacgaaatgcgctgatggtgtggtgtgtgccagcgtacgttgcagcgagtgtccactcaacgcaaaaggtacaaccattggggaagttcgtgcaatgaaggacagcaaggctccgagtgtagaagaagacgatggtgttaagcaaccaagtcactaccagctgttcggaggcatcgaggccattgaggtgattgctcgcagtatgactcaggagatgttcaaggggtactgcctcgggaacatcctcaagtaccgactgcgggccgggaagaagtccgagctggctactttagagaaagacatggcgaaagctgctttctatctggaactatacgagaaacacaaggggttgtgtcatgcttgagttaacaccgagtcgtattgaaatcctgaagtattgggcgaaggacttcctcagaatctaccagactgaggacttcaccaaggaggagcttgagttcattgaggagattcttagcgatgaacccgagtgactggtgccgagcgatgtacgagaagacgctcgaccatgcgtacatcaccctgtataacatgtggaaggagcgagaagatgcaaaagttcgtcgtaacggtcgagacagctaacgcatcgtatgaactcccggtacacgctgggtctcttgaggaggccctagaagttgccgaggcggagtacgaagagttaggccaagtgactcgggtacgcccagatagtcattaggtagcactatagggacacatgctgtccatcttacctattattgaggagattattatgtcactcactgagattatacgcacagcgtttgtggacaatacctgccgtaacttcatgttcttgcagatacagaaacacacagggtgctctagacactgcgctaaggccctgacgtttgcgttcatctaccacgctactgaagaataccttcagaaaatctttgaagaaaacaaataggagattcatcatggcattcgctaagaagaagatttataccaccaagattggtacctgtgagccgtatgcttacttcaacaagccggactatggcggtgagggttttgagaacccacgcggtacctacaagggttccgtaacgttcaagaacgaagactgtcaggagctggtagacctcatcgttaagacccatgaggaaaactacgcggcccgtctggaagcgcacgaagcgaacccgccgaaggttcagaagggtaagaaacctctgaagccgtacgaaggcgacatgccgttcttcgacaacggtgacggtaccaccacgttcaacttcaagtgctacggttcgtacgaggacaagaagactggcgagaccaagaagattgttctgggcgtagtagacgcgaagggtaagcgcatccaagacgttccgattatcggcggcgggtccaaagtgaagattcgcttctcgctggtaccgtacggctggtctgcggtagctggcgcttccgttaagttgcagctggaaggcgtgatgctggtcgaactggctacctttggtggtggagaagacgactgggctgacgaagccgtagaaggcggttacgaagctgacgaacctcgcagccgtaaacctcaggaagacccggaagactggtctggtgaggaagctgacgagggcgaagccgaagaagacgatgacttctaatgtcgggctatggggccaaagggattcggaaggtgggtgccttccggtctggccttgaggacaaggtgtccaagcagttagaatcaaagggcgtcacgttcgactacgaattgtggcgcatcccttacgttattcctgcgagtgaccacctttacactccagacttcttgctgcctaacggcatcttcgtggagactaagggtctctgggaagccgaggaccgcaagaagcacctattgattcgcgagcaatacccggagttagacatccggttagtgttctcttcgagtcgcactaagatttacaaagggtcgcccaccagttacgctgagtggtgcgagaagcataacatcttgtttgccgacaaattgattcccgtagactggctgaaggagccgaagcgtgaagtaccgttcggcaagttcaagcagaagaaaggagcaaagtaagtatggccaaggttcaattcactaagcgacaggagacctctcagattttcgttcactgttccgccaccaaggcaaccatggacgtaggtgttcgtgagattcgtcagtggcacaaagagcagggctggctggatgtaggttatcacttcatcatccgtcgtgacggtaccgtagaggctggtcgtgaccaagatgctgttggttcacacgtcaagggatacaactcgacttctgtaggtgtgtgtctggtaggcggtatcgacgccaagggtaaccctgaagcaaacttcacacctcagcagatgagcgcactgaaggggttactgcacgagctgaaggggacctaccccaaggctgtcattatggcgcaccacgatgtagctccgaaggcttgtccgagcttcgaccttcaacgttgggtaaagactggtgaactggtcacttctgaccgtgggtaaacattaggtagcactacagggagacaattacgtttccctgttgtcgcttgaggagattactttatgagcaaagaccatattatagatatcatcgttctcgttgtggccactgcgtccgcgatggtgcttggtgccaccattatgtactcctaccttaactgaggtgacttatggaaaacttaaagcaacatttagtagatacgtggccactatacgtgtacgcatcggcattagtcatcggcgcacttcgagtgtggctgccatgagttacggtgactctcaagaagacggtcaggaaagtatcttcctgttccacgctccgtgcgaaaactgtggttcttctgatggtaactcagtgtactctgacgggcacgagtattgcttcgtgtgtcaacaccgggttcccggctcagaggaacgtaccgaaaagttatcatcgagaagacccaaaggagggaattacgggatgagtacacaaggttcaggcttattggtattcggcgagagtgacggtcggtacactgacctgacggctcgtggtatctcaaaggcgacatgccagaaggctggctactgggtcgccaaggtcagagggactgcctatcaggtggctgactatcgtgaccagaatggctccatcgtctctcagaagttgagggacaaggagaagaacttctctacccgagggtcccacaaaggggatgcactgttcggtaagcacctatggaatggcggcaagaagattgtcatcaccgagggtgaaatcgacatgctgaccgtgatgcagcttcaggactgtaagtggcctgtggtttctctcggtcacggtgcgtcagccgctaagaaaacttgtagtgcaaactacgagtatttcgatagcttcgaccagattatcctgatgttcgacatggatgaccccggtcgggcagctgttgaggaggccgctcaggttctccctcccggtaaggtccacgtggccgtgttaaccgagaaggacgccaacgagtgcttactcaaaggcaagggcaaggaagttctcgaccagatatggaacgcagcaccttgggtaccagatggtgtcatcggtgcgatgtccatgaaggaccgagtgcgtgaggtcatgaccagcgaacaaagcgtcggataccttttctcgggatgtccgggactgaatgaccgaaccttgggtgcacgtggtggcgaagtcatcatggtcacttctgggtcaggaatgggtaagtctacgttcgttcgccagcaggccctagggttcgccagagggcaaggacttcgagttggtatggcgatgcttgaggagtccgtagaggagaccatggaggatgtcctagggattgctaacggcatccgcttacggcagcagcctcgggagttcaagcagaaactcattgaggacggtacgtacgatgagtggttcgatgcgctgtatggctcagaccagttccatctctacgactcctttgcggaagctgaggtagaccgcctgctggccaagctgcactacatgcgcacagggttgaactgtgacgtaatcattctggaccacatctcaatcgtagtgtcagcctcggaggaatccgatgagcgcaagatgattgaccgtctcatgaccaagctgaaagggttcgctaagtcaaccggagtggtacttattgttatttgccacctgaagaacccggagaaaggtaaagctcatgaagaaggacgtgctgtttccattactgacctgcgtgggtctgggtctctgcgccaactctctgatactatcattgcccttgagcgtaatcagcaaggggacatgcctaatcttgtcctccttcgtattctcaagtgtcgctttaatggtattggcgttggcattgcggggtacatggagtacaacgaaaagaccggactccttgaaccgtctagctacactggcggagaaggagagggagatactggctgggaaggccacgaagaagacgactactagtcatgacgagtggtgctcctgtgagcactgctgtccaacactcgaagcattccgcatgagaatgtacagagactttaaccataaataggagaatcaacatgtttaaactcatcgaaactttaggccgtctggtcatcgcgctgtacatccgtgaagccaaggcactggacaaagcgtcaaaggttgaagcagaagcagccgctaagctggctaaagccgccgacaaggcgcgtcaggcatctctggatgcaaccgcagaggcagcgaaagttgcacttaaagctcagaaacttaaggagttcttctaatgactaccaaagttaaattccccggcaacaccatccagctgtccgacactgtagaccagtggggtcgcaaggttcacatcaacgtccgcaacgacaaggtgactctggtctaccgttggaaggctaagagtgataaccgtgcgcacactcagcgtgtgaccctcgacgacacacaggcggctcgactgcttgcgtccgtagctgtagccgctactgtggccatcggtgaggacaaagtgcgtgaggcaatcctgagcaaagaggttggcgaaacgtccgtacgtctggccgaagcgtcagaagttaagtgataaactcaaggtcattactatatgtagtggcctttatgattatcacacacaacatattgagaggacataaccatgcgtaaacctgaagaaatccgtgcagacatcgagaagctgaccaaagagctggaagctgttaagattcacgagtccagacaggttgctgctgttaacatcttgtataacttagggtggacacacgaccctcacaagggctggcagaaacctgcgccaaaatggagcgactacaaggccccactgaaggctggcgagctggcaacatgggaggatggtgcccttggtggaaccgtgtatatccgtagtgttggcaacaagttctcacaggtgtctcacgtccgtggcgttagtcgccttggtgctgacgtccttacaggcagcttcgcaattgagaacagtaagttgacaatccgtcctcgtgagtatttcatcgggcgtcgttaagtaacaggagaccactatgttagtaaccgatatcgaggctaacaacctcttagagaaagtcactcagttccactgtggtgtcatctatgactacagcacggacgagtacgtatcgtatcgaccttgggacttctcagcgtatctcgatgcgttggaagctgaggtggctcgtggtggtctcatcgtattccacaacggtcacaagtacgatgccccagtgttgaccaagctggccaagctccagttaaaccgagagttccacctgccgcgtgagaacgtagtggacacgttggtacttagccgtttgctttttgcgaacattaaggactccgacatggccctgctgcgttccggtaagttacccggtaagcgcttcgggtctcacgctctggaggcgtggggttaccgcttaggcgagatgaagggtgagtacaaggacgacttcaagaagctccttgaggaacagggagaggactatgtggacggtgctgagtggattagcttcaacgagccgatgatggcctataacgttcaggacgttgtggtgactaaggcgctcttagagaagctgctgagcgacaggcactacttcccggatggtgatatccactggtgggcacacgatgccgtgtcgttctggagcaactcatgcgaggccgtatggctggaacaccgagccgcttggttactcgctaagcaggagcgcaacgggttcccgttcaacaccaaggccattgaggaactctacgtcgaactcgctggtcgtcgttctgaactccttcagacactcaccgacactttcggaacttggtatcaacctaagggaggcactgagttgttcctgcaccctcgcaccgggaagcctcttggtaaatacccgcgagtgaagtacccgaagcagggtggcatctacaagaaacccaagaacaaagctcaacgtgagggccgtgaaccctgcgagctggacacgcgggattacgtagagggcgctccatatacaccagtagagcacgttgtgttcaaccctagtagccgagaccacattgcgctaaagctgaaggaagccggatgggtaccgacagagttcaccgaaaagggtgcacctaaggtggacgacgaggtccttgagcatgtgcgtgtggaagaccctgagaagcagcgctgtatcgacctcatcaaagagtacctgatgatacagaagcgtatcggtcaggcggctgagggagacaaagcgtggctacgttacgttcaagaggatggtaaaattcatggttcagtcaatcctaatggtgccgttacgggccgggccactcacagcttcccgaacctcggacaagtgccgggtgttcgaagtccttacggcgagccttgcagggctgcttttggtgctgagcatcatcttgacggcctcactggtttaccttgggtacaagctggtatcgacgccagtggtctggagttgcggtgtctcgctcacttcatgtccaagtacgacgggggagcttatgcagatgttattcttaacggggacatccacacagtaaaccaacaggctgctgagttgccaacacgtgataacgccaagacattcatctacggtttcctctatggtgctggagacgaaaagattggacagattgtgggagcaggtaaggaacgcggaaaggaactcaagaagaaattccttgagaacaccccagcaatcgcagcgttgcgtgaaggaatccagcagaccctcgtcgagtcatcccgatgggtcgccggagagcagaaagtcaagtggaaacgacgctggattaagggactggatggaagaaaggtacacgttcggtcaccacatgccgcgctcaacacgttgcttcagtcagcgggtgcgctcatttgtaagctgtggattgtcgagactgaagagttacttctcaaggctggcttgaagcacggctgggatggcgactttgcgtacatggcgtgggtgcatgatgagattcaagtagcctgccggaccccagagattgcacagcaggtgattgacattgcgcaacaagctatgcgtaacgttggggaccactttaagttccgttgccgtctggatacagaaggtaagatgggccctaactgggccgtatgtcactaataatacaggagatttatcatgggtattaacaaacagtttcgcgtaacgttcgatgtaacggctactatgagtgatgaccaagagcgggagttccttgaggacctactatctcttgcgtatggcgtggacgacaaacgtcaggcgcacattgtaaccgaagcaatcaccaaaggtcatgagtcggcactggcattcgtcatgcagagcggtctgcggaaagctattaaggacctcggtaaggcgctgagctgttccactgtgacagtacgcttctctccggcaaccgtgagggtgacaaagtgagtgagtacctcaaagttctggcggccctcaagggctgccctaagtccttccagtcgaactacgtgcgcaataacgctgcgttagtcgctgaggctgcgagccgtggtcacatttcgtgcctgaccatgagtggtcgcaacggtggcgcttgggaaatcaccagtgccggagtgaaattccttaagacccatggaggttgcctgtgagaaagcgaatggtgttcgttcacccgttggaacctaaatcacactgggaaaccgctggtggcatcgtctggttttataaggatggctacatgctgagacagtcccatgtcacccacaaggaccttcatgacccgaagatgggttttaaattcaaggagttaaagaatgagtaagcacacattgttatccttcagcgactaccgggcgacccagaagattgccaaaggtgtccttgtgatggatggtgactggctggtgttccaagccatgagtgccgctgagttcgatgcctcttgggaggaggagatttggcaccgttgctgtgaccacgctaaggcccgtgagattctggagaactccatcgagtcctacaagggtcgcaagaaggcatggaagaatgctgacgttgtcctagcgttcaccgaccgtgtcaactggcgcaagctgctggtggacccaacgtacaaagagaaccgcgcagtcgtcaagaagcctgtgggttacttcgagttccttgagtacgtcttcgagacctacacgtgcgtccttgagcctcagctcgaaggcgatgacgtgatgggcatcatcgggtctaaccctctcgtgtacaactacgagaaggctgtgctggtctcctgtgacaaggactttaagaccatcccggattgcgacttcctgtggtgtaccactggtaacatcctcgtacagactcaggagacagccgactactggcacctcttccagactatcaagggtgacatcaccgatggttacggcgggattcccggatggggcgataccgctgaggacttccttaaggaacccttcattgtggagcctgtaacgtccgtgctgaagtccggcaagaacaagggccaagaggtaactaagtgggtgaaacgcgctcctgagccgggagagacgctctgggactgcattaagtccattggtgccaaagcagggatgaccgaagcggaagtaatcaagcagggccagatggctcgcatcctccgttctgatgagtacaacatcgagactggggagattactctatggcaaccgggcagctgattcttatcgtcctgaccatgggcttaatcgctcgtggtctctggatgttggccttgattatcaagcagatagtcgagcacaaagtagagtgataaactcatgggcactaattaggtagcactatagggaagtgcccattatgattattacttaaagattacttaaagaggagactcaaatgttaaaaccgatagagcacatccttaacaatcctaatgaccttcctgacgtaccgcgagctgtcaaggagtacctacagtctcgcttcaatgctgacttcctgtatcagtcagaggtccgtaagctgcgcgaggctggccacagcgaggagttcatctccggggtactgtatggtcactacatggcttctcgtgtccttgacgagatggagggacgccagcgtgcactcaaagaaggagattgattatgtgtttctcacctaagatgaaagcacctaaggtcgacacgacgactgtccctgagccagctccgctaaccgaggaacctaagggtgtccagtacggtggcgacgaggactcaaacagcaccactcctgaggcgtcagggcgtaagtcactcaaggtgaccaagacgaccgagcctacagggtccgtcagtaaaatccgtaagtcagctttaggaggctaacatgggactgttcaagaaaatcaagaaggctatctccaaggtagtcaaggcaccgctcaaggccgttggtctggcagcagatgcacccaacgtgcaaacagccgctgagacacctgtggccgcacctcaggaagcaccgaaagaggtcgtggaggacgttgagtcttcagcagacactgagtccggcaagaagaaaactcgcgcctccggtaagaagtccctctcagtttcccgcagctctggcggtgggattaacttatgattggttacggggagggctaacaaatggcagaagttaaactcgaaggcttcgcagaggagggagccaaggcggtatacgaccgtctgaagaacgaccgacagccttacgagacacgagcagagtcctgtgcgcagtacacgattccctcactgttccctaaggactccgataacgcatcaaccgattacacgactccgtggcaatccgtaggtgctcgcggcctgaacaacctagcgtccaagctgatgctggccctgttcccgatgcagtcatggatgaagttgaccattagcgaatacgaagcgaagaaccttctgggtgatgctgagggtctcgctaaggtcgatgagggcctctcaatggtagagcgcatcatcatgaactacatcgagtccaacagttaccgagtgactctctttgagtgcttgaagcaactgtgtgtggccgggaacgcgctgctgtacttaccggagcctgagggttataccccaatgaagctctatcggctgaactcgtatgtggtccagcgagacgctttcggtaacgtactccagattgtcactctcgacaagattgcgttcaacgctctccctgaggatgtccgcagccaagtggaagcagcccaaggtgagcagaaggaagacgctgagattgacgtctacacccacgtgtacctgaacgaagccggggatggctactcgaagtacgaagaggttgccgaagaggtggtaccgggcagtgaagctgagtacccgctcgaagagtgtccgtacattccggtccgcatggttcgcatcgacggtgaatcctacggtcgttcctacgttgaagagtatctgggtgacctcaagtccctagagaacctccaagagtccatcgtgaagatggccatgattaccgccaaggtcatcggtctggtagacccagcaggtattactcaggtccgccgactcacggcagcacagtctggcgcgttcgtaccgggccgtaagcaggatattgagttcctccagctggagaagtcgggcgactttaccgtagcgaagaacgttagcgacaccattgaggctcgcctctcgtatgcctttatgctcaacagtgcggtacaacgcacaggcgagcgagtcacagccgaagagattcggtacgtggcgtcagagctggaagatacccttggcggtgtctactcgattctctcgcaggaactccagctgcctctggtaagagtgctcttgaagcaactacaagccacgcagcaaatcccagagttacctaaagaggccgtcgagccaactatcagcactggccttgaggctatcgggcgcgggcaggaccttgacaagctggagcggtgcattaacgcgtggtcagctcttaaggccctcgaaggcgatgacgacctcaacttggctaacctcaagttacgtattgctaacgctatcggactcgacaccgctggtatgcttctcactcaggagcagaagaacgcccttatggcacagcagggtgcccagattgctacacagcaaggggccgcagcgttgggtcaggggatggccgcacaggctactgcaagtcctgaagcgatggccgcagcggctgattcagtcggtatgcaaccgggcatgtaattaggtagcactatagggagacgcatccagattgaatgcggtctggtccgaaggttcgagtccttcgtgtttccctcttagtcttaactttaaggagattgaaatggctggcgaatctaacgcagacgtatacgcatccttcggtgttaacagtgctgtactgactggtagcacacctgaggagcaccaagaaaacatgttggctcttgatgttgctgcccgtgatggcgatgatgcaatcgagctgaacaccaacagtgatgacccgtatggctctgatgtggacccgttcggtgaacctgaagagggccgtatgcaggtccgcatctccgctgacggttccgacgaagagtccaccgaaggtgaagagggttctgaagaagaacagcagggcgacgaagagagtcagccggaggaagcaaccgacgatggtgaacctgaagagttcaaaccgattggtgaaactccggctgacatcaacgaagcctctcagcagctggaagaacacgaagctggctttaacgacatggttgctactgcaatcgaacgcggtctctcacaggatgctgtgacccgtattcagcaggagtaccagaacgaagacagtctgtccgaggagtcttaccgagagttggccgaggctggatacagtaaggcgttcgtcgatgcgtacattcgtggtcaggaagctctggtcaaccagtacgtcgagaaagtgatggacttcgtgggtggccgcgagcgcttccagcaggtctacggtcacatgaagaccaataaccccgagggtgccgaggcgctcatcaaggcttttgagtctcgtgacgtagccaccatgaagacgattctgaacctagcgggacagtctcgtgataaaacctttggtaagaaagctgagcgctctattgccaagcgtgccaccccagcgaaacctgtggcccgtaaagctgaaggcttcgagtctcaggctgagatgattaaagctatgtcagacccacgttaccgcaccgactccaagtaccgtcgtgaagtggaacagaaggtcatcgactctaagttttaattaggtagcactatagggagactgacaacctcgcaataatggcgaccattcgtcaggtgtgagactgtgctatcagatagactaggagattatgggtgaggcctagactcccttcgagttacacaatgagtatcacctcgtttcaagtagtacctcaatagcttggcaacgataggcccgtttggtcagcgtaatgactaattctattctttaaacaacataaggagattcaacatggctatcatgcaaggtggacagcagctcggtactaaccaaggtaaaggtcaatccgcagcagacaagctggcgctattcctgaaagtattcggcggcgaagtcctgaccgcattcgctcgtacctctgtgaccgccaaccgtcacatgcagcgtcaaatcagctccggtaagtccgcacagttccctgtgattggccgcaccaaggctgcttacctgcaaccgggcgagtctctggatgacaaacgtaaagacatcaagcacaccgagaagaccattaacattgatggcctgctgaccgctgacgtgctgatttacgatatcgaagacgcgatgaaccactatgacgtgcgctccgagtacacctctcagattggtgaatctctggcgatggcggctgatggtgcggttctggctgagctggctggtctggttaacctcgcggattccgtcaacgagaacatcgctggtctgggcaaaccgtccttgctggaagttggcgctaaggctgacctgaccgacccggtcaaactgggccaagcggttatcgcacagcttaccatcgctcgtgcagctctgaccaagaactacgtcccggctaacgaccgtacgttctacaccaccccggacgtgtactctgcgattctggcggctctgatgcctaacgctgcgaactatgcggccctgattgaccctgagcgtggttctatccgtaacgtgatgggcttcgaagtcgtcgaggttccgcacctgaccgctggtggtgctggtgatgaccgcccggacgaaggcgcagaagcgaccaaccagaagcacgccttcccggcagctggtggtaaagtcaacaaggagaacgttgtgggcctgttccagcaccgttccgctgttggtaccgtcaagctgaaagacctcgctctggaacgtgctcgccgcgctgagtatcaggctgaccagattatcgctaagtacgcgatgggtcacggtgctctgcgtcctgagtctgctggtgcgctggttttcacggcggcctaagcgtaaatacctttagtgctcgggtggtaactccgcctgagtatgaggtacagactgtggctattgctggtgattcacttaaggtgacacttgatgggctggatggagtaacggactggtcaacccttgaggtaacttatggtacttcagggattgccagccacactcgccggaccaacacgctgtacttcaaaggaatcgctgtaggcgaaactctggtgactgtcagctttgacgggtctgaaaggaagacctttaagctggtcgtgactaactaataagccaaaccccttggggaccactcacggtctctgaggggttttttcgttaggagcttataatatgaacatgcaagatgcttactttgggtctgccgctgagctggatgcagtcaacgagatgctcgcagccatcggtgaatccccagtgaccacccttgacgaagatgggaacgcagacgtagctaacgcccgtcgaatcctcaacaggattaaccgccagattcagtctaaaggttgggccttcaacatcaatgagtcggccacattgaccccggatgccagcactgggcttatcccgttccggccagcctacctgtcaatccttggcggccagtacgttaaccgtggtggttgggtgtacgacaagtcaacagggacagataccttctctggaccaatcactgtgaccctgattacccttcaggactacgacgagatgcctgagtgtttccgccagtggattgtcaccaaggccagccgccagttcaactctcggttcttcggagcggaggacgtagagaactcgctggcacaggaagagatggaagcgcggatggcctgcaacgagtacgagatggacttcggtcagtacaatatgcttgacggtgacgcatacgttcagggcctcatcggtcgttaatcagaaacttaaggaggaccaaatggctctcgtatcacaatcaatcaagaacctcaagggaggcattagccaacagcctgaaatcctacggtacccagagcagggttcgcttcaggtcaacggttggtcctccgagactgagggtctccagaagcgaccacccatggtgttcatcaagtccttgggaggccgtgggtatcttggggaagacccttacatccacctcataaaccgtgacgaatacgagcagtattacgccgtgttcacagggaacgacgttcgggtattcgacctgtccggctatgagtatcaggtccgtggcgaccgctcttacgtgaccgtcaataaccctaaggataacttgcggatggtcactgtggccgactacacattcatcgtgaaccgtaccagacaggtccgtgagagtcagaacttgaccaacggtggtaccttcagggataacgtggatgccatcattaacgttcgcggtggtcagtacggtcgaaagctcgaagtgaacattaacggcgtgtgggttagccaccagctgcctccgggtgacaacgctaaggaggacccaccaaaggtagacgcacaggctatcgctgaggccctagcgactcttctcagaacggcacaccctacgtggacgttcaacgtgggaacagggttcattcattgcatagctccggcagacaccacacttgacatattcgagacaaaggatgggtatgcggaccagctaatcaatccggtcacccattacgtccagagcttctctaagttgcctctgaacgcgccagatgggtacatggtgaagattgtcggagatacgtcaaagaccgccgaccagtattacgttaagtacgacaagagtcagaaggtctggaaggaaactgttggatggaacatctcgatagggctggattacaccactatgccttggacactggttcgcgcagctgacggtaacttcgacctcgggtatcacgattggaaggaccgacgtgcgggtgatgaggataccaaccctcaaccgtcatttgtgaactcaacgataactgacgtgttcttcttcaggaaccgcttagggttcatctctggggagaacattgtgatgtcacgtaccagtaaatacttcgagttctacccgccgtcagtggccaactacacggacgatgacccactggatgttgctgtgagtcacaaccgagtgtcggtcctgaagtacgctgtgagcttcgctgaggagcttctactgtggtctgatgaggcacagttcgttctgtcggccaacggggtgttatctgctaagacggcacagctggacttgaccactcagttcgatgtgtcagaccgtgcgcgaccttacggtatcggcaggaacatctactatgcgtctcctcgcagctcctttacgtccatcatgcgctactacgcggtacaggatgtaagctctgtgaagaacgcagaggacatgacggctcacgtaccgaactacatcccgaacggtgtgtatagcatcaacgggtctggtacggagaacttcgcgtgtgtgttgacaaagggcgctcccagcaaggtgttcatctacaagttcctctacatggatgagaacatccgccaacagtcgtggtcccactgggacttcggggacggtgtggaggtgatggccgcaaactgtatcaactcgacgatgtacatgctgatgcggaatgcctacaacgtgtggatagctgcggtggactttaagaagaactctacggactttccgttcgagccttaccgattccatgtggacgccaagcggtcataccgcatctcagagactgcgtatgacattgagacgaaccagacggtagtgaacgtcaaggacatctacggtgcgtcgttctctaagggtaccgtggcaatctgcgagagtgacggtaaaatcaccgagtacgagcctacgggttcctcttgggattcaaccccggacatccgcattagcggtgacatctcaggtaaggacattgtcatcgggttcctgtacgacttccagtatgtgttcagtcggttcctcatcaagcaggagcagaacgacggcacaacgtccacggtcgactctggtcgcctacagctgcggagagcgtgggtgaactatcaagacactggtgcgttcactgtgagcgtcgataacggcagccgtgagttcaactatctggtcaacgcccgagtgggttctaatggtctacgtctaggccagaaggccacgaccactggtcagtatcgtttcccggtgacaggtaacgcactgtatcagaaggtgtccttgagttccttcaacgcttccccagtgtcaatcattgggtgtggctgggaaggtaactataccaaccgcgctaacggtatttaactgaacgtctccctgtggtgttgctcaattaggtagcactatagggagaccacactaagagggggacttaaagcatgtacataagaaacactgtaagtaatgacttcgagttattcatcccggcctaccatgacgtacttgaggcgcaggccatgggtatagaaccatcgttcccagcggttactgagtgtgtcacgttagaccacgatggttttcctttggctataggtggacactacggagaccagtgctggttcgtcacgagtgaccaagtgtggagactcgacagggctggcaagctggagttccgtgagagaatcatggagtacagggacatgttattaaatgtttacccatccctgtggaacttcgtgtgggtcggcaatggtccccacaagcggttccttaagtccatcggtgctgtattccacgaggagtacactcagggtgggaagttccaactgttcaccataactaggaggtaactatgtgctggatggcagctattcctatcgcaatgacggcagtacaagctatcggtcagtcgcgtaatgaagccaagatgattggccttcagaatgaccagatgcgccgacagtctgcccagatgattaaagagtcaaacattcagaacgctaacgccagccttgagcagaagcagaagctggaagaagccagtgcggacctgaccgctaagaatctcgataaggttcaggccatgggtacaatccgtgcagcaatcggagagggaaaccttgagggtaacagcatggaccgtatcagtcgaatcgaagagggcaagttcattcgggaggccaacgcggtcaccgataactaccgtcgagactatgcatcactgttcgctcagcagctgggtaactctgagtcgactattgaccaagttaagtccatgcagaaggctgagggcaaagataagtctaagctggagcaggtactagacccgctggcgctgatgacctcacagggtgcatccgcatatgcttctggtgcgttcgatagcaaaggcaccaaggcaccaatcagtcaggcccaaggcaccaaggtaggaggtaaataatggccagtaaattagaacaagcattaagccaactgccgcaggccgggtctacccgcatccgtggtggctcagcgtccatgcagtatcgcccagtaaccattcagcaggaagggtacagacagtccaacctagtgcagtccttggcgaagtttggtactgcggtgggtgaggcagcggatgcctacgacaagcgccaacgggacaaggccgatgagcggtccgatgagattatccgtaagttgaccccagagcagcgtcgcgaggcaatcaagaatgggaccctactgtatcaggatgacccgtacgctatggaagccctacggttcaagactggccgtaacgctgcgttcctcattgacgacgaagtggcacagcgcgttcagaacggtgagttccgtactcgtactgagatggaagagtatcgccacaaacggttgaccgaaggtgccaatgagttcgccgaacagttcatgattaaccctgaggactctgagttccagagagggttcaacgcgaacatcactgagcgcaacatctcgctgtacggtaagcacgatacattcctgagcgagcaagcccagaagggtgccatactggcctcgaaggtggaactgtcaggagtgctcaaagaccctgccgttctggcccgtccagagtccggtgagttcttccagcgctacattgacaatgcgcttaagactgggagtatccctagcgacgctcaggcgcagcaggtcatcatcgggtcccttaacgacgtcatccagcgtccgggtgctaccaacttcctccagagccttgcagaccgtccggtgaccctcaacgggaagacctcgacctataaggagctgatgggagaggagcagtggaacgccctgatggtcaaggcccagtcgactcagttcgacaatgacgctaagttgtctgaaggtttccgcctcgggattaccagcgcgttgaaccaagacgacaccagtaagggctgggagatgcttcagggtgccaaagcggaacttgaccgtctacagcccggtgagcagatgaccccagagcgtgagcgtttgattcaggctgaggagcagatgcaggcccgtttccgtcaggaggctcaagcagcagctaaggagatggacaagcgtcagaagactatcaacaagaatcaggtcatcgaccagcagttcaccaagcgtatcaacggccagtatgtgtccaccagctacaaggacatgccgaccaacgagaacactggcgagttcactcacagtgacatggtgaactacgctaacggtaagctggccgagattgaccagatgcagctcacggagcaacagaaggaccgcatgaagctgagctacctacgggcagactcagagggtggagccttccgtaccgttgtgggccagatggtgaccgacgctgggtctgagtggtctgccgctgttattaacggtaagctaccagaggacaccacggcgctgaacaaactgcgcaccatgcgtaacaccgacccggacctcttcgctgcgctgtacccggacaaggctgacttgttcctgacgatggacatgatggacaagcagggcattgaccctcagattctcatcgacgctgaccgttcccgccgcagtctcaccaaagagatgcagtacgaggacgataaagcgtgggcgtccctgaagaacaactcagagtctcccgagctgtcccgcattccggctagtctggatggcatggcccgtaagatttacgacagcgtcaagtaccgtacaggtaacagcgacatggcgatgcagcaggtcgacaagttcctcaaggaatccactgtgaccttcaaaggtgacgacgtggacggtgataccattggtattatcccgaagaacatcctacaggtcagtgatgaccctaagagctgggagcagggacgagacatcctcgaagaagcccgtaagggaatcatcgcggctaacccttgggtgaccaacaagcagctgacgatgtaccagcagggcgactctatctacatgatggacaccactggcactgtccgaatccgctacgacaaggagctactgacccgaacctatcaggaacagcagcagcgactggccaaggaagccgaagagaaggcactgaaggaagcaaccaaacgagcacctattgccgcagccactcaggcccgtaaggccgctggtgagcgtgtccgtgcgaaacgtaaagccactccgaagttcatctatggaggtggtgaccaataaccattaaggagacaacatgagctacgataagtctaaacctagcgattacgatggcatcttccagaaggcagcagactctcatggggtctcctacgacctcctgcgtaagttatcgtttaacgaatcatccttcaaccctaaggccgtctctaagactggccctaagggcatcatgcagttcacccgcaacacggcccgagcgatgggccttaacgtgaccgatggtgacgacgatgggcgatacaacccagagttagccattgacgctggcgctaagctgcttgccagtctcgttaagaagtacgacggggatgagctgaaagctgccctagcgtacaaccaaggggaaggcccagcgggtgcccctcagctccaagcgtacgacaagggagacttcgggtctatctctgaggaaggccgtaactacatgcgcaagctgctggatgtggccaagagtccgaactcaggcgcactggaggcgttcggcggtatcaccccaaagggtaaagggattcccgcagaggatgccttcaagggcatcgctaaggctggcaaggtaggtactgagctgccggagtcccatgggttcgacgttgaaggtgtagcacaggaagcacccaacactccgtacgctaaggacttctgggagaagaccgggacgactctcgacgagtataacgctcggtctaccttcttcgggttcggtgacgctgctgatgctcagattcagaactcaacattaggtgtggccttccgtgctgcgcgagccgacgatgggtacgatgtgttcaaggatacgatgaccccgactcgctggaactcttacgtcccctccaaggaagacttacagaagctgcgcgactctgggttacctccgagttactacggtgtggtgactggtggtgacggcgagaactgggatgcgctcatcaagctggccaaggataacttcgaggctgaccaacgggccgctgaggctggtactggtgcgaaactcgccgctggtatcgttggtgctggtgtagacccactcagttatgtgccgcttgtcggtgtggccgggaagggactcaaggtggttaataaggccttgcgagtaggtgcacaggctggagcgctcagtgttgcctctgagggaatccgtacgtcagtagctggtggcgaagctcactacgctgatgcagcacttggtgggttactgtttggtgctggtatgtctgcccttagtgacgctgtggctgctggtatccgtaagtctcgtggagtcgagtctgtgaatgagttcgctggaccagcactccgtatggaagcccgagagactgccatcaacactggcggtcacgacacctcgacactgcctccagagaacttctcgttcgagcagaaccacagaggtgttccgtttgctaaccacccgaccgaagagggagcagtggttctggccaatggttccatcctgagtgataccaacccgcttaacccaaggacccaacgtgacttcgcagagattgacccagagcgtgcagctcccggtatcaagctcggcgggttcactgagattggcctgaagacattagggtccaaggatgctggcgtccgtgcaatcgctcaggacctcgttcgttctcctacagggatgcaatcagggtctagtggtaagttcggtgcgacagcttcggacatccatgagcggctccatgcgactgaccagcggatgtacaaccaactgtatgacgctgttgaccgtgccatgaaggacccagagttctccgtaggtgagcagaagatgtcacgcagagccatccgtcaggaagtctacaagcgtgctgccctagcgattgagcgtccagagttacaggctgatttgaccaaaggtgaacgcgaggtgatggacctgctgaaagagcatttcgacaccaagcgtgaactgatggaacagccgggtatcttcggcaacgctaacgcagtgagcatcttccccggtagtcgacacaagggtacatacgtgcctaacgtgtacgacaggggtgctaaggagctgatggtgcagaagctgggtggacctgaaggactccaacaggcaatcgctcagagctggctcaccagttaccgagtgcggcctgaggtcaaggcacgtgtcgacgagtacctgatggaacttaacggctacaagtcggtagaccaagtgacacctgaggtggtccagaagcacgccatggacaaggcttacggtatcagtcacacagaggacttcacagcgtccagcgtcattgacgacaacatcacaggtctggtcggtatcgagaacaactcgttccttgaagcccgtaacatgttcgacagcgacctcccggttaccttaccggatgggtcaaccttcagcgtcaacgacctgagggacttcgatatgtcacggattatcccagcgtacgaccgtcgagttaacggtgatatctccatcatgggtggtagcggtaagaccactaagcagctcaaggacgaaatcatggcgttagacaagcgggcagaacgtaaggggcaactgaagggcgaggtggaggcactgaaggataccgttaagattctcactggccgtgctcggcgcaacaatgacacagccttcgagacggctatgcgttccctgaatgacttggcattcttcgctaagaacttctacatgggtccgcagaacctcacagagattgctgggatgttggctaagggtaacgttaaggcgatgctacatggtatcccaacgttgcgagacctcgccaccagaacctctccagtgtccgggagtgaactccgtgaactccatggggcgctgttcggtaaggaactcgaccagttaatccgtccggggcgtgaggatatcgtacagcgaatccgtgaggcttccgataccagtggggccatggcgtcagtcattggtaccatcaagttcggtactcaggagctgtcggctcgttctccttggaccaagatgctgaacggtacggctaactacattctggacactgcccgtcagggtgtgctcggtgatgtggctggtgcggccctaggcggtaagggttccaagtttggcaaagagaacttcctcaaagctgcctctatcagtcctgagcagtggaagggaatcaagcagctctttgtagaccacgctactcgtgacgctaacggccagttcaccatcaaggacaagaaggctttcagtcaggacccgagagcgatggacctgtggcgtcttgccgataaggtcgccgacgagaccctgcttcgacctcacaaggtatcccagcaggattccaaggcgtatggtgctggtgtcaagatggccatgcagttcaagaacttcaccatcaagtcactcaacgccaagttcattcggtccttctacgagggctacaagaacaaccgcgctatcgacatggcgttgacccacgtgttgtctctgggtatcgccgggacttactttgcgatgcaggcccatgtgaaggcgtacggtctccaagagtctcaacgtaaggactacctgaagaaagccctgaacccgaccatgctggtctacgcagcgttgactcgaagttcccacaccggtgccccgctgtccatcgtgtcgatgattgcaggtgccgctgggttccaagacgcaaatatgctgcgctccaccatcttgcctaaggaggaacagttccagaagaaagacggggcgtccaaaggtcgggccgagtcgagcaaccttgcaggtaacttggggtctcaggtcccggctcttggttacgtagggaacgtcattgcgaccgctaagaacgcctacggtgttgctacagcacctaataagccgactgagcgtgactacatgactggcctgatgaactccactaaggagcttgtgccgaacgacccactgactcaacagcttatcatgaaaatctatgaggctaacggagtaaccatcaaacagcagcctaaacccaactaattaggtagcactatagggagaccagcacggtttcccttctcattcaactaaaggaggtcacgatggaccaagacattaaaacagtcattcagtacccagtaggggccactgagttagacatcccgttcgactacctgtcccgcaagtttgtccgtgtgtcgttggtgtcagacgacaatcgaagactgctgagcaacatcactgagtaccgctacgtgtccaagaccagagtcaaactgctggtagcaaccactggtttcgaccgtgtagagattcgtcggttcacatctgcgtcagagcgagtggtggactttagtgacggttctgtattgcgcgccaacgaccttaacgtctcacagctgcaatctgcacatatcgccgaagaagcacgcgatgcggcacttctggcaatgccggaggatgatgctggcaacctagacgcccgtaacagaaagattgttcgactggctcccggagagactggtacagacgccgtcaacaagaatcaactggacacaaccttaggtgaggctggcggtattctcagtgaagttaaggacctccagaaagacattgaggattacctacagaactggggagatgacaccacagctattcgcggcgttctctgggtatacaaccaagggtccgcagtgggcggtgagacctccctcgtgattaccaaagaggggcctgtccttgctgttccgtacatcgagattaacggcagccgtcaataccgtgggtggcactacgagtatgacttagggtccaagacaatcacgctggcgaaaccgctttctgctggggatttggtcgtatgcaccaccgctgagactacgctgccactggcggattcactcgcaggtccgactggtgcttctcagattggtaccgccaacggactgaatgtgcagattgcactggacaatctacgctcaggggttaacgttctggactttatgacctttgctgagcgagccgctgtcctgaactacacaggaaccaatgacaactctgaggcattccgaaaggcattcgccaccgggacacgccaaataattgtccctccgggaagatatcacgtaaaagacgttgtaatacccgctaaggtgaaactgtttggtacgtactcctacaagccttataacgtgacaagtgatgcatcctttggtacagacggtacgattattcgtaaagtggctggcgcagataacatgtttctgtggaatactgcgtgtgctgctgagggtgtcatgttcgatggtcgtgaccgcacgtccccagccattcaatcacagtctggtggtaaaataactgtagggttcttcaagtgcgggttctatcgattcgaccgagtaggtaaccgccggggcgcatacatcgggtgctccttccagttctgtaacttcaaccagaacaacattgggatttacaatacggtagatgggaaccacatcgggtgtaccatcaacgccaacaagtcccacggtgttatgcttgaaacaggcgcgaactccaacacgttcactaactgtcgaaacgagtggaacgaaggtgacaactggaacttctatggtgccacttcgattcaggtaatcaacgaactgtgcgaccgtgcgttcggctatgggttccgtatcagcaactcctcggtgacactgattaacgtcaacattaggcgttctgcgagaacagccgcatcgggggcagcaagcgctcagatttactttgagtcgtctaccctcaagatgattggggtgaacagctccgtgggcggtgatgacactggcggttctatcactgagccttcgcctgattacttcttcaggatggcaggtaccagcaagggtcgccttgagattagtgacagtcgcctcacaggctatactgttgggctaatctcgggtacagcacgtccttcagttatccgtgtgataaactctccgggttgggaggacacgattaacgagggggtcgctcgcatatcaggaggcaggccgtacattggtacaatgccaacagcgactggtccggcaaacgttagcccagctgtattgggactgtcctgtggtggagtaaacacctacgataacgacatgtttgatattcacctgactatccgcaataccaataacggaggccataatggtgcaatcctcactgtgttgctttaccgtgagggcggagccgctcgtgcgacaatcgtacgagtagacagtcggtccaatgccgtgggtgagggagatgtgaatagcacctcagcagaccctcagcagacctatcaagtgtccgtggaggttacgtcaaacgatgcgtctactttcaacctactggtctccaccaagtcggacaacaacgcatcctaccgcttcagggcgaaagttaaaccataaggagaaccacatgttagacagactgaatcagccgaaaggctcaaccattggtgtgctcagggatgggcgcactatccaagaggctattgatgacttgtatgtgtttaaggattctcaaggattcataaacgtggacatgcagactggtgccaccattgaggagaagctgcgcaattcctttacgatagccaatacgctacttgtgggcgtacgcctgacggctggtaaggtatacccgctgactggtacaactccgcttgaggtgaacctagctaagttctcgctgttcacttcaggaggccgtgctacgattgacgcctcggagttcactgggccgactgcgttgtggattcacgccacaggctcctatcctacacctatgtatcgaaacacgaccaactacatggagtccatcgagcttgtgggtgggcttaaggctggcgtcgacgggtggacttggggtaaccgtgggatgaccaccggaaccgagtacaacggtcagtgtataatccgtgggtgcagcgtttacaagttcgacaactgcatcaaatgtactgactcgtcttggcgctacaaggtatctgactgcatgatctctacgggaatcacctctgtgttcaacgcccctgctggactgattgactccggcgagtccataaccttcagcgacactcagttctccgactcgaacggggctaagttcatcattgcgtgtgcaaacttcagtgtaggcatgtctggcacaagtgtgctcaataccccggttgttatctctgggaatggtgcttcactactcatcgacggcatggggaacaacgagaaccccggtaaaagttcttggatgcgctacgtcgaggtgactggaatcggagcacgcttcatcctacagtcctcaacgctcgtgtgtaacggcccatcttctcagaccagaccgcttgtgcttgttggggcgaaagctcgcgcaatcttcattgccgtcaagttccccggtaacctctatatgttccatgtgaataacccagagaaggtgcgaacattctgtgaaggcgagggtatcgttaagacaatcgcgtgtacatacgacattgaatcgggggctggtaacattccagtccaccgctcacttaaccgattctacaataacgggttcgagcaggacttggctggatgggcgcttaacgttggtggcgacccggcacagacggctacaatcgtcacggatgataccaacagcggtggtaaggcggttaaggttgcctctctggatggtaagagtgtgttcctcacccagaatgtcagagtgtcttctggagaggagtttgcatcgttcgtggcctacaaggtcaataaggcggcatccggctcaacaccgggcaacctgacagtaaccttt

(The sequence listing continues in the following parts.)

1-153. (canceled)

154. A composition comprising a collection of isolated bacteriophage comprising:
i. an Ackermannviridae bacteriophage, a Tevenvirinae bacteriophage, a Slopekvirus bacteriophage, a Siphoviridae bacteriophage, and/or a Demerecviridae bacteriophage;
ii. an Autographiviridae bacteriophage, a Tevenvirinae bacteriophage, one or more Slopekvirus bacteriophage, and/or a Purpuraviridae bacteriophage; or
iii. an Autographiviridae bacteriophage, a Tevenvirinae bacteriophage, one or more Slopekvirus bacteriophage, a Demerecviridae bacteriophage, and/or a Purpuraviridae bacteriophage.

155. The composition of claim 154, wherein:
for the collection of isolated bacteriophage of (i):
the Ackermannviridae bacteriophage is an isolated bacteriophage comprising a bacteriophage sequence that is at least 99% identical to SEQ ID NO:1 or SEQ ID NO:37;
the Tevenvirinae bacteriophage is an isolated bacteriophage comprising a bacteriophage sequence that is at least 99% identical to SEQ ID NO:2 or SEQ ID NO:40;
the Slopekvirus bacteriophage is an isolated bacteriophage comprising a bacteriophage sequence that is at least 99% identical to SEQ ID NO:3 or SEQ ID NO:41;
the Siphoviridae bacteriophage is an isolated bacteriophage comprising a bacteriophage sequence that is at least 99% identical to SEQ ID NO:4 or SEQ ID NO:52; and
the Demerecviridae bacteriophage is an isolated bacteriophage comprising a bacteriophage sequence that is at least 99% identical to SEQ ID NO:5 or SEQ ID NO:56;
for the collection of isolated bacteriophage of (ii):
the Autographiviridae bacteriophage is an isolated bacteriophage comprising a bacteriophage sequence that is at least 99% identical to SEQ ID NO:74;
the Tevenvirinae bacteriophage is an isolated bacteriophage comprising a bacteriophage sequence that is at least 99% identical to SEQ ID NO:14 or SEQ ID NO:36;
the one or more Slopekvirus bacteriophage comprise two Slopekvirus bacteriophage, and the Slopekvirus are isolated bacteriophage comprising a bacteriophage sequence that is at least 99% identical to SEQ ID NO:20 or SEQ ID NO:47 and SEQ ID NO:22 or SEQ ID NO:49; and
the Purpuraviridae bacteriophage is an isolated bacteriophage comprising a bacteriophage sequence that is at least 99% identical to SEQ ID NO:8 or SEQ ID NO:32; and
for the collection of isolated bacteriophage of (iii):
the Autographiviridae bacteriophage is an isolated bacteriophage comprising a bacteriophage sequence that is at least 99% identical to SEQ ID NO:25 or SEQ ID NO:53;
the Tevenvirinae bacteriophage is an isolated bacteriophage comprising a bacteriophage sequence that is at least 99% identical to SEQ ID NO:2 or SEQ ID NO:40;
the Slopekvirus bacteriophage is an isolated bacteriophage comprising a bacteriophage sequence that is at least 99% identical to SEQ ID NO:20 or SEQ ID NO:47;
the Demerecviridae bacteriophage is an isolated bacteriophage comprising a bacteriophage sequence that is at least 99% identical to SEQ ID NO:5 or SEQ ID NO:46; and
the Purpuraviridae bacteriophage is an isolated bacteriophage comprising a bacteriophage sequence that is at least 99% identical to SEQ ID NO:72.

156. The composition of claim 154, wherein:
for the collection of isolated bacteriophage of (i):
the Ackermannviridae bacteriophage is ΦER12;
the Tevenvirinae bacteriophage is ΦER15;
the Slopekvirus bacteriophage is ΦER16;
the Siphoviridae bacteriophage is ΦER39; and
the Demerecviridae bacteriophage is ΦER46;
for the collection of isolated bacteriophage of (ii):
the Autographiviridae bacteriophage is ΦMM9;
the Tevenvirinae bacteriophage is ΦER11;
the one or more Slopekvirus bacteriophage comprise two Slopekvirus, and the two Slopekvirus are ΦER27 and ΦER36; and
the Purpuraviridae bacteriophage is ΦER3; and
for the collection of isolated bacteriophage of (iii):
the Autographiviridae bacteriophage is ΦER43;
the Tevenvirinae bacteriophage is ΦER15;
the Slopekvirus bacteriophage is ΦER27;
the Demerecviridae bacteriophage is ΦER46; and
the Purpuraviridae bacteriophage is ΦMM7.

157. A composition comprising at least one isolated bacteriophage comprising a bacteriophage sequence that is at least 99% identical to any one of SEQ ID NO:1-74.

158. The composition of claim 157, wherein the composition comprises no more than one, two, three, four, or five isolated bacteriophage.

159. The composition of claim 157, wherein the one, two, three, four, or five different isolated bacteriophage each comprises a bacteriophage sequence that is at least 99.1, 99.2%, 99.3%, 99.4%, 99.5%, 99.6%, 99.7%, 99.8%, or 99.9% identical to any one of SEQ ID NO: 1-74.

160. The composition of claim 157, wherein the one, two, three, four, or five different isolated bacteriophage each comprises a bacteriophage sequence that is at least 99.1, 99.2%, 99.3%, 99.4%, 99.5%, 99.6%, 99.7%, 99.8%, 99.9%, or 99.95% identical to or comprises any one of:
SEQ ID NO:1 or SEQ ID NO:37; SEQ ID NO:2 or SEQ ID NO:40; SEQ ID NO:3 or SEQ ID NO: 41; SEQ ID NO:4 or SEQ ID NO:52; or SEQ ID NO:5 or SEQ ID NO:56;
SEQ ID NO:8 or SEQ ID NO:32, SEQ ID NO: 14 or SEQ ID NO:36, SEQ ID NO:20 or SEQ ID NO:47, SEQ ID NO:22 or SEQ ID NO:49, or SEQ ID NO: 74; or
SEQ ID NO:2 or SEQ ID NO:40; SEQ ID NO:20 or SEQ ID NO:47; SEQ ID NO:25 or SEQ ID NO:53; SEQ ID NO:5 or SEQ ID NO:56; or SEQ ID NO:72.

161. The composition of claim 157, wherein the one, two, three, four, or five different isolated bacteriophage each comprises a bacteriophage sequence with no more than 20 nucleotide changes in any one of SEQ ID NO: 1-74.

162. The composition of claim 157, wherein the isolated bacteriophage further comprises a heterologous sequence comprising a peptide or polypeptide.

163. The composition of claim 157, wherein the composition comprises about 10⁸ to about 10¹² plaque forming units (PFU) per milliliter (PFU/ml) of isolated bacteriophages.

164. The composition of claim 157, further comprising a pharmaceutically acceptable carrier or an antibiotic drug.

165. A method of increasing the susceptibly of a drug-resistant and/or pathogenic Klebsiella strain in a subject to clearance by the subject's immune system or to conventional antibiotic treatment, the method comprising the step of administering to the subject a therapeutically effective amount of the composition of claim 157.

166. A method of reducing the level or virulence of a drug-resistant and/or pathogenic Klebsiella strain or reducing the number of capsulated Klebsiella in a subject in a subject, comprising the step of administering to the subject a therapeutically effective amount of the composition of claim 157.

167. A method for treating and/or preventing a Klebsiella infection in a subject comprising administering to the subject a composition comprising at least one isolated bacteriophage comprising a bacteriophage sequence that is at least 99% identical to any one of SEQ ID NO: 1-74.

168. The method of claim 167, wherein the Klebsiella is drug-resistant, hypervirulent, and/or from Klebsiella pneumoniae, Klebsiella quasipneumoniae, and/or Klebsiella variicola.

169. The method of claim 167, wherein the subject has symptoms of a Klebsiella infection, is at risk for a Klebsiella infection, or has been determined to be infected with Klebsiella.

170. The method of claim 167, wherein the infection is an infection of the urinary tract, blood, gut, abdomen, stomach, lungs, skin, ear, eye, nose, oral, kidney, prostate, bladder, brain, vaginal tract, heart, liver, spleen, tendons, or a wound, or a combination thereof.

171. The method of claim 167, wherein the subject is immunosuppressed or has an immune cell defect, asplenia, impaired splenic function, nephrotic syndrome, or an autoimmune condition.

172. A method of producing the composition of claim 157 comprising infecting bacteria with an isolated bacteriophage comprising a bacteriophage sequence that is at least 99% identical to any one of SEQ ID NO:1-74; culturing the bacteria under conditions to allow bacteriophage to replicate; and isolating bacteriophage from the bacteria culture.

173. A device, comprising, on, in, and/or around the device, the composition of claim 157.
